United States Patent Application Publication US 2022/0290142 A1 - sequence listing, part 6

SEQ ID NO: 10505 - DNA, 799 bp, Homo sapiens
cagccggggagaggccagcccggcctacagtgcggacacaggacagaggggagccaggttctttgcactgaccaatgctgagagcagaccctcggagcagccgggttggaagtgtctctccatagtcaccagacagatccaggataggatgggcagcccagtgcaccgagtgtcattgggggatacctggagcaggcaaatgcaccccgacatagagagcgagaggtatatgcagtcctttgacgtggaacggctcaccaacatccttgatggaggtgcccagaacactgcactccgcaggaaagttgatccatgaagcaagtgggtgagaagatttcaaggtgccagaaacctcacccaggtccctaagccctctgttctctgtcctctgcagagagcatcatccacagttacccggagtttagctgtaaggacaattatttcatgacccagaatgagcgttataaggctgccatgcggagggcattccacatccggttgatagctcggcgcctgggttggttagaagatggtcgtgaattaggctacgcttacaggtgctcactcctcgagcagccccactagagagggatctacctgggatcacctggaaaccccctagccccatgagccatttcccccaacaaagggaagacttgttgggaaaccaggatgctaggtgccctttatctcctgtactctgctcaggcagggggtacctgggcccctgtctccaataagctactcaactacagcatctctccccaacagagccctttctggagacgtggccttaaat

SEQ ID NO: 10506 - DNA, 2516 bp, Homo sapiens
ctaatttgcacgtattgtatgagctcccagtggggcaagtcattccttctggaaacatcagcagccaccccttctcatggactggctataggggactgtgtgtcccacacacagcccacagatgaaaggggagaactgcctgcaagtacagctgggagctgggccccactccatactgcgctgatgcctaagagttcagacccacctagaagcagcttcacaggtaagaaccccacctcaggccaatgtctaacacctctccttgatcctaagggacatatcttcagggcctggagactgaagccacctatgacgcagccacccaggagtttgtgatacacagccccacgctgactgccaccaaatggtggcctggagactgtgagtatacatccaccccccttccttaactctccccaagtagaagaatgttggagggcagagtagcactggctttgaggtccaacagacctcagattgattttctgttctaggctgctgaccttgggcaagtcagttcaccaacctgagcctcaggttcttactctgtaaaataggtgggatattaaacatttcattagtgagtggctggaaagtccccaaaggaactttgaagtagaggagacaatcgatccatgagagacaaggcctcactcacacacacacgcacaaacacacacacttggtctagtcctaggcactcctcacaaccccggttcctctcatctcccgagttagtggcagagcttgccaccagccagagcacaggccctgtgatgacacagtggaaagaatacgcctgcctgcccctgctgcagacacccaggaaggctcacgcccatcaccagcccccatcaggccaccaacgccgtacctcctgctgtggccaccaggtggcggccacatcaagcgtccctgaggcttggtgatttaccaagccccaacgagggatttccccttcctcaaacttgagaatttcacctccaaggacacatctgtggcacttggggacccacaccttgtgtggaaaaaattaaaacaaatatgctgagcccaactaaagcaggagagtgacagagatgagagacacatagagagagggagacacaggcagagaccagagacataagagagagacatgagccgggtgcggtggctcatgcctataatcccagcactttgggatgccgaggtgagtggatcacctgaggtcaggagtttgaaccagcctgaccaatatcattaaacctcatctctactaaaaatacaaaaattagtcgtgtgtggtggcgggcatctgtagtcccacctactcgggaggctgagacaggagaattgcttgaacctgggaggcagaggctgcaatgagccgagctcaggccattgcactccagcctggcgaaagagtgagactctgtctcaaaaacaaaagaaagaaagaaagaagaaaaagaaaaaaaaagagagagagagatgagagagtgatgacagaaagagagagagaaaataaatgaccactgtcaaaaatgaagacaaaagaaaccagccttttagatcagacagaccagggtacagatgaatcctagctctgcccctccaggccaatgaccttcagtgtgtcactctactctctgagcctgtttccttaactggaaaatgggactcatcatcctctctcccctgcaagaactggaaagcatctatcacagggtctagcgccacctagattttgataaatgataattatctgtattcattattataaggttgatgacagagtaattcattaatagttggggggggcaaaaaaaaagctggatcatttcacagtgcctttgccaacgctgctaggtttgcttggttctttgggggcaatcccctctctctttgatcagtgacttttcagggccccagaggtacccatccaaaaccccagccccaggaggctgggttggttgggaaaagcaatgcacaggtcttcctgtgacgggccgctactctctctgccctcagtgggacggtcagccacccatgccctggtccaggcccagctgatctgctcaggagccaggcggggcatgcacgcttttattgtgccaatccggagtcttcaggaccacaccccactgccaggtaagcccataatgctccctcaaggaaccctgccaggaggagagcccaggtggcctccctgacctggggccccagagggccacaggagtagctaagacatgtctcccttgggcagggagcggtccagttggacagacttggtgctaactggctaggtgaacttgagcaagatttagcatctttctgacctcagcttgttcacctgcaaaataggtacaataatcccagtgtcacaggctgctgtgacctggaatgtgtgtatgatacctgccacatagcaagcactctctcaactgataggtgtcctcatctccatctccttcaaggaatcatcattggggacatcggacccaagatggactttgatcaaacagacaatggct

SEQ ID NO: 10507 - DNA, 558 bp, Homo sapiens
ctaatttgcacgtattgtatgagctcccagtggggcaagtcattccttctggaaacatcagcagccaccccttctcatggactggctataggggactgtgtgtcccacacacagcccacagatgaaaggggagaactgcctgcaagtacagctgggagctgggccccactccatactgcgctgatgcctaagagttcagacccacctagaagcagcttcacaggtaagaaccccacctcaggccaatgtctaacacctctccttgatcctaagggacatatcttcagggcctggagactgaagccacctatgacgcagccacccaggagtttgtgatacacagccccacgctgactgccaccaaatggtggcctggagacttgggacggtcagccacccatgccctggtccaggcccagctgatctgctcaggagccaggcggggcatgcacgcttttattgtgccaatccggagtcttcaggaccacaccccactgccaggaatcatcattggggacatcggacccaagatggactttgatcaaacagacaatggct

SEQ ID NO: 10508 - DNA, 21614 bp, Homo sapiens
ggcatgagtagatgctcagtaagtggtgcacagggttggtccctatggtggaggccccctaacaccgcccaacccccctccatgttctcacagctccacgcactgagcacgggcatgaaggccatgatgtcagaattctgcacccagggagctgagatgtgccgcagggcctgtggcggacatggctactcaaagctgagtggcctgccatcactggtcaccaaattgtcggcctcctgtacctacgagggtgagaacacagtgctctacctgcaggtggccaggtaaggtccaggctgacccaggcctttgcccaagcccttggggacccaccaagcttctgttgggtggagggttccgtctgaggcccataaaaagagcaggctttgcgaagtgctatttgggagctgtccaattccccagtatgactaacctatccacttctaggccaccatcctctctcacctccaccacagcctcagacccctccctggtctcttgcttctatcctgtcctgcttctccacaggcagccggagggatctgttcagagcctagggaggatcacatctttctctggtttgaaattcttcaacggcttcccagtgctcataggaaaatgacatattctatgctgtggcctgcaaggtccatgtgacctgacccctgcctccccgtccatcctgctctcaccacctcctgcctctgctcacttcttcttcttctttttttttttgagatggagtctcactgtcacccaggctggagtgcagtggtgcaatctcggctcactgcaacctctgcccgccgggttcaagcaattctcctgccttagcctccgcagtagctgggattacacaccaccatgcccatctaatttttgtatttttagtagagatggggtttcaccatgttggccaggctgctctccaactcctgacctcaggtgatccacctgccttagcctcccaaagtgctgggattacaggcacaagccaccgcacccagccacctctgctcacttctgccggccacacacttctttctgtccaggaggcctttgcatttgatcccctcccacccaacatggccttgtttcctttggagcagtttcacaatctatcattgtctcatttttttgttcacctttttagctctactctccaactagattaggagctccctgagggcagggactacccctaccttgctcgctttagcatcgcctaagcttggtgcagagcctgcacacagaggctccaagcaatggccaagtcagcttcctccacacaggcgatttcttttcatccctcttaggtctgtgggccctggaggccgacagagcctcatcctcacctattctcaggtgaacaaacagggcaaatgcttccctatgcaaggagaaagaagttcactggcaaatatgaaaaacaacatttattatatttttaaaaatatataacatcccttggtttttttccaaattagaaaaggagtacaatagcacatattatgtactctgcactgtgccaagcactctacaaatatcatctcattccatttcacaaaccctcaatcagatgagaactgtcctccccacctagagctagagaaacagagacttgggaggtgaagcttctttcatcacacaggtctcggcgaggctgtatgggaatccagggctgtctaagcccagaacctgtaaccactggattatcctaaagcagcagttgagagtcacctataatcctcctactcctgttagcattcttgcctctatccttcttttttcagctaagaaaatttaatttccacccagtcactgtacaagtcattataaatcccaaaatcacagtgttctgatggaaaattctgtttgctcagatcacagaagggtttatgttcaggatcagagagtgtctggcccagctccacaggtcctgggatatgcctgactgagggcctcgaggcaggacggcccgagggggaaccctcaggagggaggccaggcagaggcctggtgacctggctctcccacgggaaggctggaacctagcatgagcttgcctgtctctgggagtgaggggtgctgggctgtctcacagagtctctgccctctcacctgcctcctcttccaacccccaggttcctggtgaagagctacctgcagactcagatgtcccctggctccacgccacagagatctctctctccatctgtcgcatatctcaccgcacctgacctggccaggtgtccagcccagagggcagccgacttcctctgcccggagctctacaccacggcctgggcacatgtggcagtaaggtaagccagtgctgagaaatcagccatcccacctgggcacaggctccatgccacactagggcctttggattggttgggtggacattcgtggattcagttctaaaaaccaccccatgcctagcctccccggtcctctcagttcctgccaccatgggcagagagaggggatgtcccccccatcagccatggacccccgtcacttccccatcctggtcacagtagtagaaggacatcacacctctggccagtgagatatttttaaaatctctagggtcctatggtgatttgcaatacaacgaatgtacccatatgtaaatactccaaatgtattgatatgcaaataccaataaataaagcaatactcactcgtacgtttgaaatatcccataatctaaaaataatttttgaaaatatgactacaccacgggatagaattcatttatttccagggtctagtaggctccagggaacatggacaaaaccaaggactcatccattctgtcattcaacaaatattgttcagtacctactatgtgttaggaatgaacaaatgtgccaggggctgggaatagagaggtcctgaccaaacacacataccaccatggaaaagatggaggtttaactacctaaaaagaaaacgttctgaatgctgcccccaaattaaaacaccgaaaacaggctgggcatggtggctgacaccagtaattccagcactttgggaggtcgaggtgggcggattgcttgagctcaggagtttgagaccagcttcggcaacatggtgaaaccccacctctaccaaaaatacaaaaaattttaataaaaaaataaaaaggaaacaccaaaaacaaactggaaaaacatattttcagtatataataagaggtcttatatcccaacctgtggtcccagggatggttaatagttatttcaagatcacaagcaacttggaacattcatttatttattccaaaaatatttattaactgcctataatatggcaggcactgttctaggcattagggacctatcagtaaataggcctgataaacaccccaaactcatagagctaacatttcaattgggagatttgaggaggggaagataaggctgctcgaggtgattaaagtgtcatggtatttctccttgcttgaaactcagtgtgacatctgcttatctattccctgacaaagcaaaaaacatattgcttaataaacagtttgctttacacacaaattctaagggtcatggatggatgggcagggaatagaaaataagaggggattaaaggttatttaatgactaatttagtggtttgcaggacaaaggttggttttctctttttgtttttaggtcccttgggtagaacctgcagcaggctaggtgaccgacgggcctctctagcctttacagaaaaaccattctccttgctcaggccacaggacgtcagtcaacaaaaaggcctgaacatactggtgtgaggctggaatctgcattagaaataggggacagctcctggcctgtggccctgaggctttataacatggcgattaacaacaagtcaaaatcctggctccactccttactagctgtgtgaccctggacaaattggttaacctctctgggactcagttttccccattgcaaactggggggtgcctgcccttaaaagagttaaaaagataataaatatcaatcatttagctttatggcacataagtggtcaataaacaggcattatttctacttctgagggaccacaggaagcccatcagttgtcttttccactcagtcaggaagctgaaccttttttgctttggctttcaggctcataaaggactcagtgcagcatttacagaccctgacgcaatccggagctgaccagcacgaggcttggaaccagaccactgtcatacacctccaggctgctaaggtgagcgcctgccagctgaagctgaaagggatccattttgcttcccaggcaggctaccctgctgggaaaatccgggctctgccattattccccaactctgcttcagtggcggctgccctcatttcacttccaaggctttagtccagggtattttaattaaaggacttaactccaaagcaatcttgctggcagctcttaggggaaaaggtaatgaggcagtgttattggatttgcttcaggttgttcaaatatttcctcccagatagaaaagcaggtcaagtctccccttagccccacaggcaatccttggatgtctgattccatttccactcgttttgtgtttctgcataattcacagtcggtcggcaaatatttgagcacccactctgccctgggcactgacctgggtgctcaacagtgaagccactgcccatgcacggctacaatcaaggaagcaccatgacagggaaatacaggctgctatggaatcccagagcaggtacacttctgcccacctggaggagtcagaaaggcttcccaaaagaagtggcatatcagctaagacttcaaggataagctgaaattagccagctaaagggtggggtggcagctttggagagaaaagtttccaggcaaagggagctgcgcgtgcaaaaggaagcagcaagaaggatcctggtgtgcttgggaggaagtgcaaatctcccaaggaggacctaaggagaaggactgagactaggggagaaggagagacaggcaaggcctctgaccttttgcaccactgtgaaaagttggggttttgttttcattgcaatgcctttgctgagtttgtttggaggtggggtaaagtgatcagtttcattctagaagaatcatgcaggttgcccaggatggaatgaaagggagcaagttagaaaggagcaagtctgaaccgggactgagggtggtcctgaccatgagcatggcagaaggcctggagacaagtgggtagatcagagatgctaagggggaagaaggcagggacaggcctcagagtgctggggtgggaaagaggtaagaacaactcctgagttctagcttaggcagctgggactctggcaccgccaataactggaaaactaaagtgatcacgccaatcctcaggcctcagacccagaaaatggcagccttggaacaggagagccctgaagggctgcagaggccctcgtgggacagggctggtcaggcaggctggacgttgagcaccaccacgtgacccaccacctccaccacaccacacgtgatgggattacctctgcagccctcagttctgctcagcctacagcaggggcaccccctgctgtgctaactgtcctgtcaacacagagggtgagccaaggcttcctgctttcactggatcaccaaaacagaaaccacagccacccattatccactcattcattttccaaacctatggcctgccttcaaatggaccagatgctgcttgccagggttacttcatttaatccacacagccctgggagggagactgacattatttccacttcaagggtgaggaaagagaactcaggacttaggtcccagaggtaggaaatagctgagtccagatgctttcccttcccacaccactgagggtgtgatgagtgactgaggtgagcaacaaattctggggggatggagggtgacagccagccagcctgcgggggaagaacacgtccctgacagcttcctggggaggtggtgccccagctgagtctccaaggtcataatggatagggctttctgtactctctgtgctttgtggggttatttagtctacagaaagcttcagcacccaactgggccccatctagaaaccataaatgtgcaggtagagataactgcaacttgagggaagaggggatgatactgccagaagagtagacaagggggagccacgggctaaattctggtcccagctctgtgtgacctcaagcagccccttccctctctgggctttaacttccctgtctgtagacaaaggggcatggaagagccctttaggctctgtcaggccgtggtcctataattcagactctgaccagaagagatgtcagtctccaggaccatgggaacaaatgctggcctcattataatccagcctcagtctcctgtggctttggccacacagggttaggaatacagccctggtgtggatctcactgctaccacttcctagccatgaccttgggcaaaaaacttaatctttcagagcctcagtctcttcgtctgcaagatagagctaataacagtacctactttgtaggattctaataaagattaaataagtaaaacttagagaggcagctagcacccccacccccaaattagacaggaggcaagatttaaaccaacacacacaatgtaaataatgttcactgtgctcagagcgtggggccaaggttcagctcagcccttccccaaagtgtagaggtcacctctgtctctgatcctcatcctgctttttaaggcccaggcccctgggcagctctccatcactccactcctcaactcagagccttgagcatttgaggatgtggctctcagattaggacaggaaaaggagtgcgggtccgcagttctgccaagctggacccagtctgagcaacaaaggctactggagccagcagaggcaacacagcacatctgctcaccttccacagccaaatgctgcaagcccagcatggctgtgagcacaccatgtctgaatggcaaagtggagttgtcagcacctgtgtgagggccccctaggaaacacaagttctttccaagtgagaaagcggatcgggtcactgcccagctgaagactcccagtcccacagagcaaattctgaccatgttattcacagcccttcactgacctgggccccaggtatgagtccaccctaacctccatggttccccatcatcacctcattataccaccacacttcagcctcattaaattgcctgcagcttcctgaaagtacagccttttgcacataaagctccccctgcctggaatgacctttcccccaactcatgtccgcctgggtgaactcctttgaacccccaaggcactctttttttttctatgatagagtctcactccaccacccaggctggagtgcagtggcacggtctcagctcactgcaacctccacctcccaggttcaagcaattcttgtgcctcagccttccgagtagccagaattacaggtgtgcaccaccacacctggctaatttttgtattttttgtagagacagggttttgccatgttggccaggctggtctcgaactcctgacctcaagtggtccgcccacctcaacttcccaaagtgctgggatataggtgtgagccaccgcgcccagccgaacccccaagacactctaagtcttgctactgaaaatcactacagcagcatgggcatcacaggggaccttgttagaaatgcacagtctcaggccctgccctggaatctgcattttgacaagatccccaggtgatctatatgcacataaaaaactgagaggcagggcggggtccagaggctcacgcctgtaatcccagcactttgggaagccaaggaaggaggatcacttgagctcaggagttcgagaccagtgtaggcaacatagcaagaccctcgtctctactaaaaatacaaaaaaaaaaaaaagccgggcatggtggtgtgtgcctgtggtcccaactactcaggaggctgaggtgggagaatcacttgagcccagtgggacagaggttgcagcaaggcaagattgcaacactgctcttcagcctgggtgacagagtgagattctatctcagaaaaaacaattaagaagcactgctttatactttctctcttccttgctctcccttatagaactcatatatcctacctgacaaaataattgtgtgtgcttgtcttgacgagatgcggactgttcaaaatatgttacaaccagtaggacaaggcaccaaccaatcaaaatggactttagccctaggggaagcaaggtcctgaaggcctcctgctgagtcaaacattaatcctttagttgctgggctgtggagagaaggagggggtcttcgggaaggagtccatctggcagaaggggctctcacagggttgatggcagtggacagttgccagctggtattaaagtattatttttacaactgccacagccagaccataacatatgggctaaataacagcactgcttaccttaaggagtttatactctagctggaataaatttcatatatatcttgaaactttctcaccccatggtgcacacatgtgcacgcacacacacacaccactgacttgaacacagcagacaacaaatagctattttcttttcttttctttttttttttttttttttttttttgagatggagttttgctcttattgcccaggctggagtgcaatggcatgattttggctcactgcaacctccgcctcctgggttcaaatgattctcctgcctcagcctcccaagtagctgggattacaggcatgcaccaccatgcctggctaatttttgcatttttagtagagacagggtttcaccatgttggtcatactggtctcaaactcctgacctcaggtgatccacccaccttggcctcccaaagtgctgggattacaggcgtgagccaccgcgcccagccttaaaatagctaatttcttaagaacagtggtgctgtcctccaccttccccaggccagcctccaatatgcctgtattctttccttctactttccaacctacttgaaaccgctccaagcaaaagaaaacaagggccatgtttcaaagcccaccagtcccccccgtccccgctcccccccccaacacacacatatacacaacatcaaaacgccttgatcagacccagagctaggagaaaaggcagctgctcatcagcctgctgggaagcacatcatgcctcaagtttattccagccatcttgccatgcttccagggtgacttctggagtagaaaaccagaaatcaggagaacatatctttgtgtctttgtaggtgcactgctactatgtcactgtgaagggttttacagaagctctggagaaactagaaaatgaaccagcgattcagcaggtgctcaagcgcctctgtgacctccatgccatacatggaatcttgactaactcgggtgactttctccatgacgccttcctgtctggtgcccaagtggacatggcaagaacagcctacctggacctgctccgcctgatccggtgagtggcagagacttcaaaccatgttagtcttcagagaataaccctaccccttgttcacaggtcacttccaactccaaaaccttgctaatgggcagagcagcaacagccctggagaggtctacaccctattatcattacaccagcataaagcattatgaattaatgaaagaaaaaaatgggaaaaaatgggaaaaatactgaagaataaatgagctacctcagttgaactctttacattgtcaaggaaataggaatagtatctaaggaaaatcaataaaatgaagcatgctacatatgaatgatatgtgctaatgtgctaataatagtctcaaccatagctaactttttttttcttttctttttttttagacagggactggctctgtcacccaggctaaagtgcagtagtacaatcttgtctcattgcaacctctgcctctgggttcaagtgattctcctgcttcagcctcccaagtagctgggattacaggtgcccacccccatgcccagctaatttttgtatttttagtagagatggggtttcgccatgttgaccaggctggtctccaactcctgacctcaagtgatccacctgccttggcctcccaaagtgctgggattacaggtgtgaaccaacgtgcccaggcatagccaacctttaaagagcacttatgtgacaggccctgtgccaaaagcttttacatacatctcatttaatccttacagccctttgaaatgggtactattaatctcctcattttattggaaaggaaattcaggctgatgggagttgcccagtatcacacaatcagccagaggaggggctgggtacaatctcaggtctggcccctgggcatgagctcttaacctgtatgttaaggttaaggttgaggtattatatactttgaacacatcctagtctttgttgaatgtgcttaagcaaattcttaccaagtttagtaaacttaccttaatcttccctcagcttcaagatgaaaaattttttttaactctgtaattcatatattgatttataaaataataacacaaagttttttaatgcagcattaatgcagtgccatgtatggtgaatgaaatactaatgcagtgctttcacactattattctataatctaaacgattgctttaaaaacatatcaaaaccaaagcccaacctgatcagagtcctagaaaaaaatagaaataaaaacaataaagaaaaaaaaaagcctgggcaacatggcaaaaccccacctctacaaaaaatgaatcaggcacacacctgtagtctcagctactcgggaggctgaggtaggaggattgattgatcccaggaggttgaggttgcagtaagctatgatcacaccactgcactccagcctgggcaacaaagtgagaccttgtctcaaaaaaaggaaagaaaagaaaacattgcaaattatttaccattgtccataagattaaaaaaaatggactaatttgagaatataatctttttgagacctcactgggcagaaaatatgatacctattgcatggggttagaggcgactcctagaatctccaacaattcttatatcaacaagactaataaaaagaaaaaaagaggctgggagcagtggctcacacctgtaatcccagcactttgggaggccaaggtgggaggatcacttgaggcaaagagtttaagactagcttgggcaacatagtgagaccctgtctctaaaagatttgtaattttttaaaaataagattttaagacaggtttttaaaaaactagaccaaattccttttatttctcacaatatgcaatatgttacatgccctttatgactactcatagcatgtaacagatagctggtggtcaaaaaaatgtttgttcaggccaggcgcggtggctaatacctgcaatcccagcactttgggaggccaaggtgggtggatcacctgaggtcaggagttcgaggccagcctggccaacatggtgaaacccggtctctactaaaaatacaaaaattagctgggtgtgatggcacatgcctgtaatcccagttacttgggaggctgaggcagaatcgcttgaacccgggaggcagaggctgccgtgagccaagatcgtaccactgcactccagccttggcgacaagagtgagactccatctcaagaaaaaaaaaaaagtttgttcagttaaatcatcaaaaactgtcaaaaatacgtttgacacaattatgtcccaggtataaaactttccctaatacagggaatccagtggtgaaaactattaagagcataattaagtactgcacagttcaagcccaagggtgtccatctttttgaaactctcagaatttaaaagcacttgaaaataatgttctagccccggttgtcagtgatgataaaatacaaaagattaccttaacaccctataagcatgttttttaaatttgcaaacagcatttctaagtgcttgccttggctccagaaacttacaattcaagacaagacagacagcccagatgcaatctgccaacttactcatgcgtcaaacccagaaattgatttacttccatgatggttcctaagtagccttactactgcagggtaattaggcacataacagattctatgcatatcactgtttggtgtcacagttccctgccttgattagtcactatctccctaagatttctgagatgaaaactgaagggcggcatagtatgctatggatgccaagaacaagctctctgcaatgttaactgacccaaacagtttttagttgtttaagcggtcataaaacctcagctggggggacttccaggtaaagatgacagattaaactatgcatttacttctgttctttcccgaaaccctactaaaacatcagtgaatggactgaaattttttaaaaggcataaacccacaaagagaaagagatgttgtctctgtgttgtccaggctgctcttgaactcctgggctcaagggatcctcctaccttagcctcccaaagtgctgggattacatgcatgagctaacacacctagcctctgtgagtaattttaagactttccttgactctgccctggcagaagggtaaatagaggatctgtggactagggagcatcaggtatagttgataataaggctacccttcagaaaacacagggttctttataggccaaatactgacacctccctcccccagaccttttttcccactggttcctaaaaaactggcagccagactagtaccctgcaagaagatggtaagatgatccttctctggagaatctgaccagcccaaggagaaggagctaaagacactgacatcagagtcccccaatggtccacccaattcactccatagtgaaccccatactagcaagcatagccacaagtttgtaatcagctagttaaggctttgcttttagctatgatcagacactcagggatcaccaaacacctgaagaatgcccctaacataaaagatggagaccaaaacaagcaagaacaaggcaattcagaggacataagagaatccacagggagaagaaaacttaaaaaaaaaaaacagtgatatctcagagttaagagacggtattgcaaccacaaaataaaaacctgaatgccattatttaaaactaatattcagagaacctaaaaaaagagctccttgaagttaaaaaatgataatggaaatgaaaaactcaatgtaaggactggaagataaagttgcagaaatctcacagcaagaaagcaaaaagacaaaaaaaaggaggacttttaaaaagtaagaggaccaatcttagctgttcatcatctgaagaacaggtctagaaagaagacagagaaaacagaaggaagcgaatcattaataaaataattcaagaaaacattcctcaaatgaaggatacgagtttcagatgaaaaagggtcacagatgcctacagactagaggagaggagacaggcacacacatgcacaaaataagtcacactgtataccatgtgaaatggtaatacctaccatgaaagaaaggatagcaggaagtggaggaaagaatgctgggggtcagtagggaggagggggagctacaattttaagtaggccagagaaggcctccctgggagggtgacatttaaggaaagacctgaggagaaggtagggagaagctgttgtggctgctagggaaagagcattacaggcagaacataagtacagtcatgcatcacttaatgactggaggatccgttctgagaaatgtgtcttcaggtgagtctgtcatcatgtgaacatcacagagtgtacttacacaagcctaaatggtatagcctattgctcgtacagtcacacctgcaaagcatgttgctgttctgaatactgcagccaattctaacatcaatcactaagcaataggaatttttcagctctatcataatgtcatgggaccgccatcatatacatggtccatcattgaccaaaacatcattatgcagtgcatgacagtacaaatgttggagaccagagtgtgcttggcatatccatccagagaacacagaagaggccacaggggcaggaatggcatgactgcggtggaaaatgacggcagagggcagagagttaagggagtacagtagggggtgggaagagacggtaaggtagatcattgcaaagacttaagagaatgcgagggttttgagcatgggatagaatgggagggttttgagcattggatagacacaacctaaaagaatctgatgtgtatttttaaaggcttgctccagctgccatattaagaactaagagtgaaaagcagggagatcagctggatcgctaatgcaatcatccaagtgagtgatgatagtggattggagcagtgacagtgctggaggtggtgggaatggttgaagtttgaatatatcttgaaggcagaacaggatttgctgacagattagatgtatggtgagaaagaagagaagaatcaaggtttttggtcagaagggcagagctgccatttactataaatgcggaagactacaggaggcccaggtttgggcagggtggacgggaaggagtttgggttcagatacattacttttgaagagcctatcagaaatccaagtacagatgttggtaagcaggggacactggagggataagtttggaagtcattggcgtatggttgatatttaaagccttgagaagaacatcacaaggagtgcatgaagagaagaggtccaagtactcagtcttgagaccctcgcaagataataaggaagtaaccgtggcaagagctatttctgtggagtggtgggagtaaaaacatgaacagatccagttcaggagagaatgtgaaaattggaaatcataagcataaacacacataacactttcagggagttttgtcctaaacgggagccaaggtgatggagaaggaaatagagtcaaaagcttgtgtttaagatgggagaaatgattgtctgtttgtatactgatggaaatgatccagtagagaggggatttttttttcttgtacctttctttgaacttgatcttggcctcccatcacgccttgtgtttaagagcaaggtctttgaggagatccttgttgatgacagtttgtccaagaggatatctacagagtaccttgtgggcatgaggtgattgcagttataagcttttgcaaaagacttgatccttgacctcttggagatcttcttgcctatggcagctgtcactttgtgaggatagcagtcaattccagctaccaaagcatgactgtaagaatggactgaggtgccatcatcaatgtccttcatgataatggctttgcgtccagagtagcatccagccaggaccagcaccactttcccactttttcatgaacttgcccattttgacagcaaccagccaggcctacagtaaaaagaaagaagggcatttccactaactttttacccctgaggggaattttgatgttgttggagaaaggcaggagaatgttgttctccagtatgcaagaggaaaagacatctagtagacaaggagggactgaggcctgagctgagagcctgaagagagaaagcattgtatgtataaatgcaagggtgggaacttacacagattctcttactgcttccacttcattagtgaaatacgatgtaaagccatccaggcaaaagagatgggaaaggtggatagtgtcaatctgaggatcaaagagatggtaagaaataactgcctaagaaaaagaaacagtaaatgaacaatgagtaaatatagcaatgtaatacgattgctgagctgcaatcagggcccacttgagcccttattacaccagttatgattgttttttccagccatgtatagttacaaaggtggtggcacaaagtgggtggaaaactaaagacaaagaggtatgcgttttgctaaacaggtatgacaaagcaagaaaaatcgttgagtgtgtgtgtgtgtgtgtgtgtgtgtgtgtgtatatatatatatatatatatatatatatatatatatatatatatattttttttttttttttttttttttttttttttgagcgggagtcttgctctgttgcccaagctggagtgcagcggcacgatctcagctcactgcaacctctgactcccaggttcaagcgattctcccacctcagccttcccagtagctgagactacaggcacacaccaccacacctggctaatttttgtatttttagtagagacagggttccgccatgttggccaggctggtctcgaactcctgacctcagctgatccatctgcctcggtctcccaaattgctgggattacaggtgtgagccatcgcgcccggcctgttgaatgtatttttgagagagtaatagaacatggaatttcagctggataaggaatgaagtgagaccacaagggggcagggggacattaaattggcggtagggctcatatgatgttggggatcatcaagaaacgattacattggatacagtatcccagttaccaccaatgctttaatgacacacaatcatcataatgtcaatactaaatattggtctggccaaaattataactatattgggaggcccgaaggccaggaggaagaagaatgggaacaaggggaggtaggagtgaagagagggggtgataaatataaatctttaccttttgaatgaagattcaacagataatatctcaaactgaaccatcaacaagcagcaatataaacaagatattttgacattcagataaatactgaaatatcaactaaaagattgaaattgccagccgggcatggtggctcatgcttgtaatctcagcactttgggaggccgaggtgggcagatcacctgaggtcaggaattcgagaccaacctggccaacatggtgaaaccccatctctactaaaaatacaaaaatcagccaggcatggtggcaggcgcctgtaatcccaactactcgggaggttgaggcaggagaatggcttgagcccgggaggtagaggttgcagtgagctgagattgtgccactgcactccagcctgggcaactgagactctgtatcaaaaaaaaaaaaaaaaacagattgaaattgcttctgaggaaaaagaagtggaaatcagacaggtatatgctcgttatttatttatttatttatttattttgggacaggagtctcactctgtcgcccaggctggagtgcagtggcataatctccactcactgcaacctccgcctcctaggttcaagtgattctcctgcctcagcctcccaagtagttgggactacaggcatgtgccaccatacctggctaattttttgtatttttagtagagacggggtttcaccatgttacccaggatggtcttgatctcctgacctcatgatccacctacttcggcctcccaaagtgccgggattacaggcgtgagccaccacgcatggccggatatgctgtttttttaaacaagccttacggaaccctttgactcattatactatgcacatataactgattaaaaaataaaaactaaaaaaaaatgctgaattgtttgaaaagcgaataatcatgcaacctctaattaggtattgttattcaccatccaagactagtttgattcataagagcaatctaaaatacttacaaactcttgtttcctatcccaggaaggatgccatcctgttaactgatgcttttgacttcaccgatcagtgtttaaattcagcacttggctgttatgatggaaacgtctacgaacgcctgttccagtgggctcagaagtcaccaaccaatactcaggtagttgagtggaacacattataaattatgtaagaaagcagagaacaggcagtgaatacaccttcatgttctcccattttaattgattcccgttaggttggcaatcacttggcgtagcacgtctgtttaaaatattcttagagaacacataaaagaaacaaggagtggcagtatggcctggcaggaactctgagcctggattgtaatcagcaaaatgcactgctcggaacttagtaaagggaattaagaggaaggcccaagctctaaatcatggcttgacagacccaagtgcatacacacagagtggtaaaccggcttttaagtaacaaaaagaaggagataaatcactgcggtaattgaaccaccttattttcagccttttaactttcagttttgtgtagataaaagtaggtattcagaagtggtaggaagcttgagggatgtctctcttagacctgattgcctgctagagatgataccctctcctcttcactctaaggaatacaatccaaggagcaaagaaagctgctgcactgccattagtagcccaggaaagccatatgagtgacaattaaaagggtcatgccaaaaaaatccccagccatcctaggagagcacaccagaactctacatcattaacagcgagaagacggggaggactcataaggtcccaacactcaagggccagggtatgctcgcagctctatgcttatgagcctctttgggaaaagttgtaaatgtcaatgaatatgttaacaggagtgaggtaataaaccctgtagttagaatatgaggaaccaatatttaatagcagattttacatagatgatcaaaacaaaaagtctataggtacaaaacagattattttaaattttatagtgcaaatacatgattcaggtggtgaagctttcttttttacctctttggtccaatttcagaaaaggtgtcttaacaccacatcaaattggcaactctcaggctttcattcacacccagcatggtgttagacttgctcttaacaatttgcagcctgtcataccacatggcttaatttaacatgattatctaaagttacaacacaactaacccatcttggtcactccctgtccccagaaagacatccttttaactcaaggaaatataaacaatatatgttcactgctttagtacagttaacctacttccagtgtgttactttttctaatgattagatctaacatttcaatcttggcataaaaatacagcagtcctcccactccagactagcttccatggtctaaagataaatgtgtgccctttggtgctccacagaaaaacccgccctgctataacacctgtcagaaatgctgacatatatagcccaaacctgttatactggcaacacaggaaacattctggtttctctagagagaatggagggggctttcttgtgttttagttggttttaatatttattttaaaagactttaatctggatactacatgagaacatgtttatctaaacgagaggaatgactgacccagagggtcaacacatttgggaaaacattgatgcacttcatcccattcacttctatctccttccacttgactgtgaacaacgaaggagtcttcaccttcccaactccaagatctatcacagagtagacactccacgtctatggaataaatgaacatggttttacaacctgcatagtgagacaaaggaatctgctgcatacacagtgccacacactcttgtcatcctagcttatattaccttcctaaaaaggtgacaggtatagcattgtggatctttcacgcatgataatttgggaatgtgaagttacaaatgaccttagtgaactgtttccagtcagttaaaatgacatgaggctgcctgctaatgtacatgatcttacatttctggctccttttagagatcaccaaaatagcacttttaaagtgtattttttaatgtgctgtggataattttttaaccctactcttaagatataatgctataattttgaagctgcaataagagacattttcctcatttgcactaatagaaaaaggcacactacagatattttatgtatttttatttattattatttttgagacagagtctcgctctgtcatccaggctgaaatgcagtggcacaaccgcggctcactgcaaccctctgcctcccaggttcaagcaattctcctgcctcccaagtagctggcattacaggcacaagccaccaaacccagctaatttttgtattttgtattagtagagatggggtttcaccatgttggccaggctggtctcaaactcctaacctcaaatgatccgtctgcctcagcctcccaaagtgctgggattataggtgtgagccaccatgcctggcagatattttaaataaaacagcagctatgttgaaacacaccctgtagacataaaagtacagacaggaatatatttcactgacatttttctaccaaaagaaaagtgctatgctaaggtaaacatcttagaatcataggagaagctctcttctgtctggggcagcgttgagctttattcctggacaggatgatgtgctttcttggtttaagggaagaatcattggggataatttcaaaacaaaaatcctgtttttccccaattattctattgtaaaaatgtgtccaagtaggagttagatgcattaaatacatctactgattcattcattcaacaattcaacaaatatttactaagtacatactttgtgccaaaaactattctagatactgaagatacactggagaacaagagtcataaacccagactgagtgcagtggctcaagcctgtaatcccagcactttgggaggctgaggcgggtggatcacttgaggttaggagtttgagaccaacctggccaacatggcaaaactccgtctctattaaaaatacaaaaattagccaggtgtggtggtgcacccctgtaatccaaggtactcgggaggctgaggcacaagaatcgcttgaacccaggaggcggaagttgcagtgagccaaaatcgcaccactgcactccagcctgggcaacagagcaatactgtctccaaaaaaaaacagtcaaaagcccagtgttcgaggagcttacagttttagtgtagacaggcacacacacacacacaaagtaaatattataaaagatgagactagaactaagaaacaaagaatcaagacactgaattacagcataatgaggataacctagtcggacctagaatactgcttatatgatccctatctggttccttgctttgtgattaatgttcagtttcagagagcctcaaagagtcaagccttttatttgtatgaaattccaaaagcaagtgataagctgtgtttttaattggccacctgcatccacaatttaaaatctgcatgagaaaaggaaggatgccctttggaaaaaatgtttctccatatgttcacacaaaatgagtcttagaaataatttttaaaattaagaatcttacgtaatgttactttttgaagctagagacttaatttgaaagtgaaagtcattaatcctggcagaaatgtactgtgttaataatgcgtttctttctacaaacaggagaaccctgcctatgaggaatatataagaccacttttacaaagttggagatccaagctatgaaataaccaacagtattcaagaagcaaccagcaccatcatgtgataatggtactatggcatatatgcaacattaaaattttaaattaga

SEQ ID NO: 10509 - DNA, 1072 bp, Homo sapiens
ggcatgagtagatgctcagtaagtggtgcacagggttggtccctatggtggaggccccctaacaccgcccaacccccctccatgttctcacagctccacgcactgagcacgggcatgaaggccatgatgtcagaattctgcacccagggagctgagatgtgccgcagggcctgtggcggacatggctactcaaagctgagtggcctgccatcactggtcaccaaattgtcggcctcctgtacctacgagggtgagaacacagtgctctacctgcaggtggccaggttcctggtgaagagctacctgcagactcagatgtcccctggctccacgccacagagatctctctctccatctgtcgcatatctcaccgcacctgacctggccaggtgtccagcccagagggcagccgacttcctctgcccggagctctacaccacggcctgggcacatgtggcagtaaggctcataaaggactcagtgcagcatttacagaccctgacgcaatccggagctgaccagcacgaggcttggaaccagaccactgtcatacacctccaggctgctaaggtgcactgctactatgtcactgtgaagggttttacagaagctctggagaaactagaaaatgaaccagcgattcagcaggtgctcaagcgcctctgtgacctccatgccatacatggaatcttgactaactcgggtgactttctccatgacgccttcctgtctggtgcccaagtggacatggcaagaacagcctacctggacctgctccgcctgatccggaaggatgccatcctgttaactgatgcttttgacttcaccgatcagtgtttaaattcagcacttggctgttatgatggaaacgtctacgaacgcctgttccagtgggctcagaagtcaccaaccaatactcaggagaaccctgcctatgaggaatatataagaccacttttacaaagttggagatccaagctatgaaataaccaacagtattcaagaagcaaccagcaccatcatgtgataatggtactatggcatatatgcaacattaaaattttaaattaga

SEQ ID NO: 10510 - DNA, 3665 bp, Homo sapiens
ctacagccggggagaggccagcccggcctacagtgcggacacaggacagaggggagccaggtgagccaggtttttgggcagggagggactgggagaccccagaggagagggctgcccccatgatgaccctgtccgcagctccgagagaccctgagcaaggctttcttcactgggcacctcctgcaaatcaggccctgcactaagtgttagggtcacggcatgacagtgacaaagatcccggccctcttgcagtttctgtgttagtagcagggagatggaagtaaacaaaaacatatgaaatgagtaaatgatctcaaatgtcagaaggggataagtgaaaagagaaaaaggagagcagagtgaggaggacagggaatgccgggggagggggcttggggttttaaagagggtggcctctttaaggttaaatgaggttcaatgcaaaaagccctagtgacatttgaagaaagggtgttctgggcagatggagatgccctagcaaatgctggcagtggcagggaggcctggagcattcagaacagcaaggaggcagtggcagcagagcaaggaaaagaggtaaggcaggacgagaggagccgcactaggggcacttgcaggactccggggggcagaggatggggccccttgccagcacccccacagccctgctgggggtattggtttgaaagcctcatatgaatcatttgctacatgtggttgcatgacccttataaagtctcctccctttccaaggcccacatcctctccataaaatggtaataacagcagtgcatctgtcaggttgaggtcaggaaggaaggggatcaaaagcatggcagcctgccggagagatttacaacatacctgctgcaagctaggaaatgcagagctggcctcccaggccttgtgggaggaacatgtaagcaaataagaacttgtccctaaccctagagcacccagggaacgagggagctgaactttgttcagagagaacagcaggggcaaagggtaggaagagaatgagtggaggccagggatgagggcagtaagttgacataggagagaggtgagtggagtagggttgggtagacacagcaaggactccattccacaaacagtgggccccaaggagcagattccaagcaggagaggaaaacaatgtgatttgcagttcaagagttcacctggcagctgggagaacaaataagaggaacactgaggccaagtaagagataacagtggcctggatgctagccaaagagatagcaaggagcagatggactcaagagacttgtgaaataggatggactgcacctcatggttgcctcactgtggaggaataggggcttctcagaggccaagcacttgccatgaaggagacagggtccaacctgggtatgaaagacactcaggggctccaggggaacacttcacaggcaggaagaaggcttcctcccttcagttccacaatatacctgcagggctcatagaaatggagctgagtgatcctagaacttatgagcagtttaatgagaccaaggtgcccccagcaatcctccacagtggagctgtagtatggacaagtcatgtgctttgtggtcagaccccatccaactcctggccatctccagctgtgtggctaggggccactcaacctctccaggattattttcttcaggtgtaagcttcactgacttttttgtgaagatttccctaggcaattcatgtaactcaaactgcagtggatagagcccaatctttggggtcaggccctgtccaattttggctaacaagtattgaacaaacatgtaccaagcaatggctgcataccatgcctaccatgcacacagtgcctggtccacagccagtgtccacagggggagtggggaggtggagtggcattcaggtacttagggatgtctttcttctaccaaccagccctggctgacacccagccctaggcagttcctcttgcacacaggttctttgcactgaccaatgctgagagcagaccctcggagcagccgggttggaagtgtctctccatagtcaccagacagatccaggataggatgggcagcccagtgcaccgagtgtcattgggggatacctggagcaggcaaatgcaccccgacatagagagcgagaggtatatgcagtcctttgacgtggaacggctcaccaacatccttgatggaggtgcccagaacactgcactccgcaggaaagttggtaaggggaagctggggaatgggacatctgttttatgccccatgcttctcttgtaagaagagtccttcattagcagttctgcttccaaataacaaactttgcccttgaaattccactgttagagattcattccttcgaactgtaaagacaatcttcacatgtcaatattgcctgagcccacctaggggatagaagagtcctaggcagcagaagacctggattctggtcctaaaattctgccactgcatagctttgtaaccttgggcaattcactttcccaccttggtcctcagttttgtcatctgtaaaataacaataatgtctgacttcctttccagatccatgaagcaagtgggtgagaagatttcaaggtgccagaaacctcacccaggtccctaagccctctgttctctgtcctctgcagagagcatcatccacagttacccggagtttagctgtaaggacaattatttcatgacccagaatgagcgttataaggctgccatgcggagggcattccacatccggttgatagctcggcgcctgggttggttagaagatggtcgtgaattaggctacgcttacaggtgctcactcctcgagcagccccactagagagggatctacctgggatcacctggaaaccccctagccccatgagccatttcccccaacaaagggaagacttgttgggaaaccaggatgctaggtgccctttatctcctgtactctgctcaggcagggggtacctgggcccctgtctccaataagctactcaactacagcatctctccccaacagagccctttctggagacgtggccttaaatatacacagagtcttcgtgagagccctcaggagcctgggctcagaggagcagattgccaaatgggacccactctgcaaaaacatccagatcatcgcaacgtatgcacagacagagttgggacatggtgagctaggactgctgcgtgtggtgtttaggttgtgcactgcaaaactccagagggcccatttacatctaggtagtcataggttcatatgctccgagggacatatgtttaataagaaaacattccagcagctggcagtcaagggtcctgaggaaggggtgccaccttctaatttgcacgtattgtatgagctcccagtggggcaagtcattccttctggaaacatcagcagccaccccttctcatggactggctataggggactgtgtgtcccacacacagcccacagatgaaaggggagaactgcctgcaagtacagctgggagctgggccccactccatactgcgctgatgcctaagagttcagacccacctagaagcagcttcacaggtaagaaccccacctcaggccaatgtctaacacctctccttgatcctaagggacatatcttcagggcctggagactgaagccacctatg

SEQ ID NO: 10511 - DNA, 708 bp, Homo sapiens
ctacagccggggagaggccagcccggcctacagtgcggacacaggacagaggggagccagccctggctgacacccagccctaggcagttcctcttgcacacaggttctttgcactgaccaatgctgagagcagaccctcggagcagccgggttggaagtgtctctccatagtcaccagacagatccaggataggatgggcagcccagtgcaccgagtgtcattgggggatacctggagcaggcaaatgcaccccgacatagagagcgagaggtatatgcagtcctttgacgtggaacggctcaccaacatccttgatggaggtgcccagaacactgcactccgcaggaaagttgagagcatcatccacagttacccggagtttagctgtaaggacaattatttcatgacccagaatgagcgttataaggctgccatgcggagggcattccacatccggttgatagctcggcgcctgggttggttagaagatggtcgtgaattaggctacgcttacagagccctttctggagacgtggccttaaatatacacagagtcttcgtgagagccctcaggagcctgggctcagaggagcagattgccaaatgggacccactctgcaaaaacatccagatcatcgcaacgtatgcacagacagagttgggacatgggacatatcttcagggcctggagactgaagccacctatg

SEQ ID NO: 10512 - DNA, 3115 bp, Homo sapiens
ccggggagaggccagcccggcctacagtgcggacacaggacagaggggagccaggtgagccaggtttttgggcagggagggactgggagaccccagaggagagggctgcccccatgatgaccctgtccgcagctccgagagaccctgagcaaggctttcttcactgggcacctcctgcaaatcaggccctgcactaagtgttagggtcacggcatgacagtgacaaagatcccggccctcttgcagtttctgtgttagtagcagggagatggaagtaaacaaaaacatatgaaatgagtaaatgatctcaaatgtcagaaggggataagtgaaaagagaaaaaggagagcagagtgaggaggacagggaatgccgggggagggggcttggggttttaaagagggtggcctctttaaggttaaatgaggttcaatgcaaaaagccctagtgacatttgaagaaagggtgttctgggcagatggagatgccctagcaaatgctggcagtggcagggaggcctggagcattcagaacagcaaggaggcagtggcagcagagcaaggaaaagaggtaaggcaggacgagaggagccgcactaggggcacttgcaggactccggggggcagaggatggggccccttgccagcacccccacagccctgctgggggtattggtttgaaagcctcatatgaatcatttgctacatgtggttgcatgacccttataaagtctcctccctttccaaggcccacatcctctccataaaatggtaataacagcagtgcatctgtcaggttgaggtcaggaaggaaggggatcaaaagcatggcagcctgccggagagatttacaacatacctgctgcaagctaggaaatgcagagctggcctcccaggccttgtgggaggaacatgtaagcaaataagaacttgtccctaaccctagagcacccagggaacgagggagctgaactttgttcagagagaacagcaggggcaaagggtaggaagagaatgagtggaggccagggatgagggcagtaagttgacataggagagaggtgagtggagtagggttgggtagacacagcaaggactccattccacaaacagtgggccccaaggagcagattccaagcaggagaggaaaacaatgtgatttgcagttcaagagttcacctggcagctgggagaacaaataagaggaacactgaggccaagtaagagataacagtggcctggatgctagccaaagagatagcaaggagcagatggactcaagagacttgtgaaataggatggactgcacctcatggttgcctcactgtggaggaataggggcttctcagaggccaagcacttgccatgaaggagacagggtccaacctgggtatgaaagacactcaggggctccaggggaacacttcacaggcaggaagaaggcttcctcccttcagttccacaatatacctgcagggctcatagaaatggagctgagtgatcctagaacttatgagcagtttaatgagaccaaggtgcccccagcaatcctccacagtggagctgtagtatggacaagtcatgtgctttgtggtcagaccccatccaactcctggccatctccagctgtgtggctaggggccactcaacctctccaggattattttcttcaggtgtaagcttcactgacttttttgtgaagatttccctaggcaattcatgtaactcaaactgcagtggatagagcccaatctttggggtcaggccctgtccaattttggctaacaagtattgaacaaacatgtaccaagcaatggctgcataccatgcctaccatgcacacagtgcctggtccacagccagtgtccacagggggagtggggaggtggagtggcattcaggtacttagggatgtctttcttctaccaaccagccctggctgacacccagccctaggcagttcctcttgcacacaggttctttgcactgaccaatgctgagagcagaccctcggagcagccgggttggaagtgtctctccatagtcaccagacagatccaggataggatgggcagcccagtgcaccgagtgtcattgggggatacctggagcaggcaaatgcaccccgacatagagagcgagaggtatatgcagtcctttgacgtggaacggctcaccaacatccttgatggaggtgcccagaacactgcactccgcaggaaagttggtaaggggaagctggggaatgggacatctgttttatgccccatgcttctcttgtaagaagagtccttcattagcagttctgcttccaaataacaaactttgcccttgaaattccactgttagagattcattccttcgaactgtaaagacaatcttcacatgtcaatattgcctgagcccacctaggggatagaagagtcctaggcagcagaagacctggattctggtcctaaaattctgccactgcatagctttgtaaccttgggcaattcactttcccaccttggtcctcagttttgtcatctgtaaaataacaataatgtctgacttcctttccagatccatgaagcaagtgggtgagaagatttcaaggtgccagaaacctcacccaggtccctaagccctctgttctctgtcctctgcagagagcatcatccacagttacccggagtttagctgtaaggacaattatttcatgacccagaatgagcgttataaggctgccatgcggagggcattccacatccggttgatagctcggcgcctgggttggttagaagatggtcgtgaattaggctacgcttacaggtgctcactcctcgagcagccccactagagagggatctacctgggatcacctggaaaccccctagccccatgagccatttcccccaacaaagggaagacttgttgggaaaccaggatgctaggtgccctttatctcctgtactctgctcaggcagggggtacctgggcccctgtctccaataagctactcaactacagcatctctccccaacagagccctttctggagacgtggccttaaatatacacagagtcttcgtgagagccctcaggagcctgggctcagaggagcagattgccaaa

SEQ ID NO: 10513 - DNA, 426 bp, Homo sapiens
ccggggagaggccagcccggcctacagtgcggacacaggacagaggggagccaggttctttgcactgaccaatgctgagagcagaccctcggagcagccgggttggaagtgtctctccatagtcaccagacagatccaggataggatgggcagcccagtgcaccgagtgtcattgggggatacctggagcaggcaaatgcaccccgacatagagagcgagaggtatatgcagtcctttgacgtggaacggctcaccaacatccttgatggaggtgcccagaacactgcactccgcaggaaagttgatccatgaagcaagtgggtgagaagatttcaagagccctttctggagacgtggccttaaatatacacagagtcttcgtgagagccctcaggagcctgggctcagaggagcagattgccaaa

SEQ ID NO: 10514 - DNA, 2571 bp, Homo sapiens
agtgcggacacaggacagaggggagccaggtgagccaggtttttgggcagggagggactgggagaccccagaggagagggctgcccccatgatgaccctgtccgcagctccgagagaccctgagcaaggctttcttcactgggcacctcctgcaaatcaggccctgcactaagtgttagggtcacggcatgacagtgacaaagatcccggccctcttgcagtttctgtgttagtagcagggagatggaagtaaacaaaaacatatgaaatgagtaaatgatctcaaatgtcagaaggggataagtgaaaagagaaaaaggagagcagagtgaggaggacagggaatgccgggggagggggcttggggttttaaagagggtggcctctttaaggttaaatgaggttcaatgcaaaaagccctagtgacatttgaagaaagggtgttctgggcagatggagatgccctagcaaatgctggcagtggcagggaggcctggagcattcagaacagcaaggaggcagtggcagcagagcaaggaaaagaggtaaggcaggacgagaggagccgcactaggggcacttgcaggactccggggggcagaggatggggccccttgccagcacccccacagccctgctgggggtattggtttgaaagcctcatatgaatcatttgctacatgtggttgcatgacccttataaagtctcctccctttccaaggcccacatcctctccataaaatggtaataacagcagtgcatctgtcaggttgaggtcaggaaggaaggggatcaaaagcatggcagcctgccggagagatttacaacatacctgctgcaagctaggaaatgcagagctggcctcccaggccttgtgggaggaacatgtaagcaaataagaacttgtccctaaccctagagcacccagggaacgagggagctgaactttgttcagagagaacagcaggggcaaagggtaggaagagaatgagtggaggccagggatgagggcagtaagttgacataggagagaggtgagtggagtagggttgggtagacacagcaaggactccattccacaaacagtgggccccaaggagcagattccaagcaggagaggaaaacaatgtgatttgcagttcaagagttcacctggcagctgggagaacaaataagaggaacactgaggccaagtaagagataacagtggcctggatgctagccaaagagatagcaaggagcagatggactcaagagacttgtgaaataggatggactgcacctcatggttgcctcactgtggaggaataggggcttctcagaggccaagcacttgccatgaaggagacagggtccaacctgggtatgaaagacactcaggggctccaggggaacacttcacaggcaggaagaaggcttcctcccttcagttccacaatatacctgcagggctcatagaaatggagctgagtgatcctagaacttatgagcagtttaatgagaccaaggtgcccccagcaatcctccacagtggagctgtagtatggacaagtcatgtgctttgtggtcagaccccatccaactcctggccatctccagctgtgtggctaggggccactcaacctctccaggattattttcttcaggtgtaagcttcactgacttttttgtgaagatttccctaggcaattcatgtaactcaaactgcagtggatagagcccaatctttggggtcaggccctgtccaattttggctaacaagtattgaacaaacatgtaccaagcaatggctgcataccatgcctaccatgcacacagtgcctggtccacagccagtgtccacagggggagtggggaggtggagtggcattcaggtacttagggatgtctttcttctaccaaccagccctggctgacacccagccctaggcagttcctcttgcacacaggttctttgcactgaccaatgctgagagcagaccctcggagcagccgggttggaagtgtctctccatagtcaccagacagatccaggataggatgggcagcccagtgcaccgagtgtcattgggggatacctggagcaggcaaatgcaccccgacatagagagcgagaggtatatgcagtcctttgacgtggaacggctcaccaacatccttgatggaggtgcccagaacactgcactccgcaggaaagttggtaaggggaagctggggaatgggacatctgttttatgccccatgcttctcttgtaagaagagtccttcattagcagttctgcttccaaataacaaactttgcccttgaaattccactgttagagattcattccttcgaactgtaaagacaatcttcacatgtcaatattgcctgagcccacctaggggatagaagagtcctaggcagcagaagacctggattctggtcctaaaattctgccactgcatagctttgtaaccttgggcaattcactttcccaccttggtcctcagttttgtcatctgtaaaataacaataatgtctgacttcctttccagatccatgaagcaagtgggtgagaagatttcaa

SEQ ID NO: 10515 - DNA, 693 bp, Homo sapiens
agtgcggacacaggacagaggggagccagccctggctgacacccagccctaggcagttcctcttgcacacaggttctttgcactgaccaatgctgagagcagaccctcggagcagccgggttggaagtgtctctccatagtcaccagacagatccaggataggatgggcagcccagtgcaccgagtgtcattgggggatacctggagcaggcaaatgcaccccgacatagagagcgagaggtatatgcagtcctttgacgtggaacggctcaccaacatccttgatggaggtgcccagaacactgcactccgcaggaaagttggtaaggggaagctggggaatgggacatctgttttatgccccatgcttctcttgtaagaagagtccttcattagcagttctgcttccaaataacaaactttgcccttgaaattccactgttagagattcattccttcgaactgtaaagacaatcttcacatgtcaatattgcctgagcccacctaggggatagaagagtcctaggcagcagaagacctggattctggtcctaaaattctgccactgcatagctttgtaaccttgggcaattcactttcccaccttggtcctcagttttgtcatctgtaaaataacaataatgtctgacttcctttccagatccatgaagcaagtgggtgagaagatttcaa

SEQ ID NO: 10516 - DNA, 17852 bp, Homo sapiens
ggacgtcagtcaacaaaaaggcctgaacatactggtgtgaggctggaatctgcattagaaataggggacagctcctggcctgtggccctgaggctttataacatggcgattaacaacaagtcaaaatcctggctccactccttactagctgtgtgaccctggacaaattggttaacctctctgggactcagttttccccattgcaaactggggggtgcctgcccttaaaagagttaaaaagataataaatatcaatcatttagctttatggcacataagtggtcaataaacaggcattatttctacttctgagggaccacaggaagcccatcagttgtcttttccactcagtcaggaagctgaaccttttttgctttggctttcaggctcataaaggactcagtgcagcatttacagaccctgacgcaatccggagctgaccagcacgaggcttggaaccagaccactgtcatacacctccaggctgctaaggtgagcgcctgccagctgaagctgaaagggatccattttgcttcccaggcaggctaccctgctgggaaaatccgggctctgccattattccccaactctgcttcagtggcggctgccctcatttcacttccaaggctttagtccagggtattttaattaaaggacttaactccaaagcaatcttgctggcagctcttaggggaaaaggtaatgaggcagtgttattggatttgcttcaggttgttcaaatatttcctcccagatagaaaagcaggtcaagtctccccttagccccacaggcaatccttggatgtctgattccatttccactcgttttgtgtttctgcataattcacagtcggtcggcaaatatttgagcacccactctgccctgggcactgacctgggtgctcaacagtgaagccactgcccatgcacggctacaatcaaggaagcaccatgacagggaaatacaggctgctatggaatcccagagcaggtacacttctgcccacctggaggagtcagaaaggcttcccaaaagaagtggcatatcagctaagacttcaaggataagctgaaattagccagctaaagggtggggtggcagctttggagagaaaagtttccaggcaaagggagctgcgcgtgcaaaaggaagcagcaagaaggatcctggtgtgcttgggaggaagtgcaaatctcccaaggaggacctaaggagaaggactgagactaggggagaaggagagacaggcaaggcctctgaccttttgcaccactgtgaaaagttggggttttgttttcattgcaatgcctttgctgagtttgtttggaggtggggtaaagtgatcagtttcattctagaagaatcatgcaggttgcccaggatggaatgaaagggagcaagttagaaaggagcaagtctgaaccgggactgagggtggtcctgaccatgagcatggcagaaggcctggagacaagtgggtagatcagagatgctaagggggaagaaggcagggacaggcctcagagtgctggggtgggaaagaggtaagaacaactcctgagttctagcttaggcagctgggactctggcaccgccaataactggaaaactaaagtgatcacgccaatcctcaggcctcagacccagaaaatggcagccttggaacaggagagccctgaagggctgcagaggccctcgtgggacagggctggtcaggcaggctggacgttgagcaccaccacgtgacccaccacctccaccacaccacacgtgatgggattacctctgcagccctcagttctgctcagcctacagcaggggcaccccctgctgtgctaactgtcctgtcaacacagagggtgagccaaggcttcctgctttcactggatcaccaaaacagaaaccacagccacccattatccactcattcattttccaaacctatggcctgccttcaaatggaccagatgctgcttgccagggttacttcatttaatccacacagccctgggagggagactgacattatttccacttcaagggtgaggaaagagaactcaggacttaggtcccagaggtaggaaatagctgagtccagatgctttcccttcccacaccactgagggtgtgatgagtgactgaggtgagcaacaaattctggggggatggagggtgacagccagccagcctgcgggggaagaacacgtccctgacagcttcctggggaggtggtgccccagctgagtctccaaggtcataatggatagggctttctgtactctctgtgctttgtggggttatttagtctacagaaagcttcagcacccaactgggccccatctagaaaccataaatgtgcaggtagagataactgcaacttgagggaagaggggatgatactgccagaagagtagacaagggggagccacgggctaaattctggtcccagctctgtgtgacctcaagcagccccttccctctctgggctttaacttccctgtctgtagacaaaggggcatggaagagccctttaggctctgtcaggccgtggtcctataattcagactctgaccagaagagatgtcagtctccaggaccatgggaacaaatgctggcctcattataatccagcctcagtctcctgtggctttggccacacagggttaggaatacagccctggtgtggatctcactgctaccacttcctagccatgaccttgggcaaaaaacttaatctttcagagcctcagtctcttcgtctgcaagatagagctaataacagtacctactttgtaggattctaataaagattaaataagtaaaacttagagaggcagctagcacccccacccccaaattagacaggaggcaagatttaaaccaacacacacaatgtaaataatgttcactgtgctcagagcgtggggccaaggttcagctcagcccttccccaaagtgtagaggtcacctctgtctctgatcctcatcctgctttttaaggcccaggcccctgggcagctctccatcactccactcctcaactcagagccttgagcatttgaggatgtggctctcagattaggacaggaaaaggagtgcgggtccgcagttctgccaagctggacccagtctgagcaacaaaggctactggagccagcagaggcaacacagcacatctgctcaccttccacagccaaatgctgcaagcccagcatggctgtgagcacaccatgtctgaatggcaaagtggagttgtcagcacctgtgtgagggccccctaggaaacacaagttctttccaagtgagaaagcggatcgggtcactgcccagctgaagactcccagtcccacagagcaaattctgaccatgttattcacagcccttcactgacctgggccccaggtatgagtccaccctaacctccatggttccccatcatcacctcattataccaccacacttcagcctcattaaattgcctgcagcttcctgaaagtacagccttttgcacataaagctccccctgcctggaatgacctttcccccaactcatgtccgcctgggtgaactcctttgaacccccaaggcactctttttttttctatgatagagtctcactccaccacccaggctggagtgcagtggcacggtctcagctcactgcaacctccacctcccaggttcaagcaattcttgtgcctcagccttccgagtagccagaattacaggtgtgcaccaccacacctggctaatttttgtattttttgtagagacagggttttgccatgttggccaggctggtctcgaactcctgacctcaagtggtccgcccacctcaacttcccaaagtgctgggatataggtgtgagccaccgcgcccagccgaacccccaagacactctaagtcttgctactgaaaatcactacagcagcatgggcatcacaggggaccttgttagaaatgcacagtctcaggccctgccctggaatctgcattttgacaagatccccaggtgatctatatgcacataaaaaactgagaggcagggcggggtccagaggctcacgcctgtaatcccagcactttgggaagccaaggaaggaggatcacttgagctcaggagttcgagaccagtgtaggcaacatagcaagaccctcgtctctactaaaaatacaaaaaaaaaaaaaagccgggcatggtggtgtgtgcctgtggtcccaactactcaggaggctgaggtgggagaatcacttgagcccagtgggacagaggttgcagcaaggcaagattgcaacactgctcttcagcctgggtgacagagtgagattctatctcagaaaaaacaattaagaagcactgctttatactttctctcttccttgctctcccttatagaactcatatatcctacctgacaaaataattgtgtgtgcttgtcttgacgagatgcggactgttcaaaatatgttacaaccagtaggacaaggcaccaaccaatcaaaatggactttagccctaggggaagcaaggtcctgaaggcctcctgctgagtcaaacattaatcctttagttgctgggctgtggagagaaggagggggtcttcgggaaggagtccatctggcagaaggggctctcacagggttgatggcagtggacagttgccagctggtattaaagtattatttttacaactgccacagccagaccataacatatgggctaaataacagcactgcttaccttaaggagtttatactctagctggaataaatttcatatatatcttgaaactttctcaccccatggtgcacacatgtgcacgcacacacacacaccactgacttgaacacagcagacaacaaatagctattttcttttcttttctttttttttttttttttttttttttgagatggagttttgctcttattgcccaggctggagtgcaatggcatgattttggctcactgcaacctccgcctcctgggttcaaatgattctcctgcctcagcctcccaagtagctgggattacaggcatgcaccaccatgcctggctaatttttgcatttttagtagagacagggtttcaccatgttggtcatactggtctcaaactcctgacctcaggtgatccacccaccttggcctcccaaagtgctgggattacaggcgtgagccaccgcgcccagccttaaaatagctaatttcttaagaacagtggtgctgtcctccaccttccccaggccagcctccaatatgcctgtattctttccttctactttccaacctacttgaaaccgctccaagcaaaagaaaacaagggccatgtttcaaagcccaccagtcccccccgtccccgctcccccccccaacacacacatatacacaacatcaaaacgccttgatcagacccagagctaggagaaaaggcagctgctcatcagcctgctgggaagcacatcatgcctcaagtttattccagccatcttgccatgcttccagggtgacttctggagtagaaaaccagaaatcaggagaacatatctttgtgtctttgtaggtgcactgctactatgtcactgtgaagggttttacagaagctctggagaaactagaaaatgaaccagcgattcagcaggtgctcaagcgcctctgtgacctccatgccatacatggaatcttgactaactcgggtgactttctccatgacgccttcctgtctggtgcccaagtggacatggcaagaacagcctacctggacctgctccgcctgatccggtgagtggcagagacttcaaaccatgttagtcttcagagaataaccctaccccttgttcacaggtcacttccaactccaaaaccttgctaatgggcagagcagcaacagccctggagaggtctacaccctattatcattacaccagcataaagcattatgaattaatgaaagaaaaaaatgggaaaaaatgggaaaaatactgaagaataaatgagctacctcagttgaactctttacattgtcaaggaaataggaatagtatctaaggaaaatcaataaaatgaagcatgctacatatgaatgatatgtgctaatgtgctaataatagtctcaaccatagctaactttttttttcttttctttttttttagacagggactggctctgtcacccaggctaaagtgcagtagtacaatcttgtctcattgcaacctctgcctctgggttcaagtgattctcctgcttcagcctcccaagtagctgggattacaggtgcccacccccatgcccagctaatttttgtatttttagtagagatggggtttcgccatgttgaccaggctggtctccaactcctgacctcaagtgatccacctgccttggcctcccaaagtgctgggattacaggtgtgaaccaacgtgcccaggcatagccaacctttaaagagcacttatgtgacaggccctgtgccaaaagcttttacatacatctcatttaatccttacagccctttgaaatgggtactattaatctcctcattttattggaaaggaaattcaggctgatgggagttgcccagtatcacacaatcagccagaggaggggctgggtacaatctcaggtctggcccctgggcatgagctcttaacctgtatgttaaggttaaggttgaggtattatatactttgaacacatcctagtctttgttgaatgtgcttaagcaaattcttaccaagtttagtaaacttaccttaatcttccctcagcttcaagatgaaaaattttttttaactctgtaattcatatattgatttataaaataataacacaaagttttttaatgcagcattaatgcagtgccatgtatggtgaatgaaatactaatgcagtgctttcacactattattctataatctaaacgattgctttaaaaacatatcaaaaccaaagcccaacctgatcagagtcctagaaaaaaatagaaataaaaacaataaagaaaaaaaaaagcctgggcaacatggcaaaaccccacctctacaaaaaatgaatcaggcacacacctgtagtctcagctactcgggaggctgaggtaggaggattgattgatcccaggaggttgaggttgcagtaagctatgatcacaccactgcactccagcctgggcaacaaagtgagaccttgtctcaaaaaaaggaaagaaaagaaaacattgcaaattatttaccattgtccataagattaaaaaaaatggactaatttgagaatataatctttttgagacctcactgggcagaaaatatgatacctattgcatggggttagaggcgactcctagaatctccaacaattcttatatcaacaagactaataaaaagaaaaaaagaggctgggagcagtggctcacacctgtaatcccagcactttgggaggccaaggtgggaggatcacttgaggcaaagagtttaagactagcttgggcaacatagtgagaccctgtctctaaaagatttgtaattttttaaaaataagattttaagacaggtttttaaaaaactagaccaaattccttttatttctcacaatatgcaatatgttacatgccctttatgactactcatagcatgtaacagatagctggtggtcaaaaaaatgtttgttcaggccaggcgcggtggctaatacctgcaatcccagcactttgggaggccaaggtgggtggatcacctgaggtcaggagttcgaggccagcctggccaacatggtgaaacccggtctctactaaaaatacaaaaattagctgggtgtgatggcacatgcctgtaatcccagttacttgggaggctgaggcagaatcgcttgaacccgggaggcagaggctgccgtgagccaagatcgtaccactgcactccagccttggcgacaagagtgagactccatctcaagaaaaaaaaaaaagtttgttcagttaaatcatcaaaaactgtcaaaaatacgtttgacacaattatgtcccaggtataaaactttccctaatacagggaatccagtggtgaaaactattaagagcataattaagtactgcacagttcaagcccaagggtgtccatctttttgaaactctcagaatttaaaagcacttgaaaataatgttctagccccggttgtcagtgatgataaaatacaaaagattaccttaacaccctataagcatgttttttaaatttgcaaacagcatttctaagtgcttgccttggctccagaaacttacaattcaagacaagacagacagcccagatgcaatctgccaacttactcatgcgtcaaacccagaaattgatttacttccatgatggttcctaagtagccttactactgcagggtaattaggcacataacagattctatgcatatcactgtttggtgtcacagttccctgccttgattagtcactatctccctaagatttctgagatgaaaactgaagggcggcatagtatgctatggatgccaagaacaagctctctgcaatgttaactgacccaaacagtttttagttgtttaagcggtcataaaacctcagctggggggacttccaggtaaagatgacagattaaactatgcatttacttctgttctttcccgaaaccctactaaaacatcagtgaatggactgaaattttttaaaaggcataaacccacaaagagaaagagatgttgtctctgtgttgtccaggctgctcttgaactcctgggctcaagggatcctcctaccttagcctcccaaagtgctgggattacatgcatgagctaacacacctagcctctgtgagtaattttaagactttccttgactctgccctggcagaagggtaaatagaggatctgtggactagggagcatcaggtatagttgataataaggctacccttcagaaaacacagggttctttataggccaaatactgacacctccctcccccagaccttttttcccactggttcctaaaaaactggcagccagactagtaccctgcaagaagatggtaagatgatccttctctggagaatctgaccagcccaaggagaaggagctaaagacactgacatcagagtcccccaatggtccacccaattcactccatagtgaaccccatactagcaagcatagccacaagtttgtaatcagctagttaaggctttgcttttagctatgatcagacactcagggatcaccaaacacctgaagaatgcccctaacataaaagatggagaccaaaacaagcaagaacaaggcaattcagaggacataagagaatccacagggagaagaaaacttaaaaaaaaaaaacagtgatatctcagagttaagagacggtattgcaaccacaaaataaaaacctgaatgccattatttaaaactaatattcagagaacctaaaaaaagagctccttgaagttaaaaaatgataatggaaatgaaaaactcaatgtaaggactggaagataaagttgcagaaatctcacagcaagaaagcaaaaagacaaaaaaaaggaggacttttaaaaagtaagaggaccaatcttagctgttcatcatctgaagaacaggtctagaaagaagacagagaaaacagaaggaagcgaatcattaataaaataattcaagaaaacattcctcaaatgaaggatacgagtttcagatgaaaaagggtcacagatgcctacagactagaggagaggagacaggcacacacatgcacaaaataagtcacactgtataccatgtgaaatggtaatacctaccatgaaagaaaggatagcaggaagtggaggaaagaatgctgggggtcagtagggaggagggggagctacaattttaagtaggccagagaaggcctccctgggagggtgacatttaaggaaagacctgaggagaaggtagggagaagctgttgtggctgctagggaaagagcattacaggcagaacataagtacagtcatgcatcacttaatgactggaggatccgttctgagaaatgtgtcttcaggtgagtctgtcatcatgtgaacatcacagagtgtacttacacaagcctaaatggtatagcctattgctcgtacagtcacacctgcaaagcatgttgctgttctgaatactgcagccaattctaacatcaatcactaagcaataggaatttttcagctctatcataatgtcatgggaccgccatcatatacatggtccatcattgaccaaaacatcattatgcagtgcatgacagtacaaatgttggagaccagagtgtgcttggcatatccatccagagaacacagaagaggccacaggggcaggaatggcatgactgcggtggaaaatgacggcagagggcagagagttaagggagtacagtagggggtgggaagagacggtaaggtagatcattgcaaagacttaagagaatgcgagggttttgagcatgggatagaatgggagggttttgagcattggatagacacaacctaaaagaatctgatgtgtatttttaaaggcttgctccagctgccatattaagaactaagagtgaaaagcagggagatcagctggatcgctaatgcaatcatccaagtgagtgatgatagtggattggagcagtgacagtgctggaggtggtgggaatggttgaagtttgaatatatcttgaaggcagaacaggatttgctgacagattagatgtatggtgagaaagaagagaagaatcaaggtttttggtcagaagggcagagctgccatttactataaatgcggaagactacaggaggcccaggtttgggcagggtggacgggaaggagtttgggttcagatacattacttttgaagagcctatcagaaatccaagtacagatgttggtaagcaggggacactggagggataagtttggaagtcattggcgtatggttgatatttaaagccttgagaagaacatcacaaggagtgcatgaagagaagaggtccaagtactcagtcttgagaccctcgcaagataataaggaagtaaccgtggcaagagctatttctgtggagtggtgggagtaaaaacatgaacagatccagttcaggagagaatgtgaaaattggaaatcataagcataaacacacataacactttcagggagttttgtcctaaacgggagccaaggtgatggagaaggaaatagagtcaaaagcttgtgtttaagatgggagaaatgattgtctgtttgtatactgatggaaatgatccagtagagaggggatttttttttcttgtacctttctttgaacttgatcttggcctcccatcacgccttgtgtttaagagcaaggtctttgaggagatccttgttgatgacagtttgtccaagaggatatctacagagtaccttgtgggcatgaggtgattgcagttataagcttttgcaaaagacttgatccttgacctcttggagatcttcttgcctatggcagctgtcactttgtgaggatagcagtcaattccagctaccaaagcatgactgtaagaatggactgaggtgccatcatcaatgtccttcatgataatggctttgcgtccagagtagcatccagccaggaccagcaccactttcccactttttcatgaacttgcccattttgacagcaaccagccaggcctacagtaaaaagaaagaagggcatttccactaactttttacccctgaggggaattttgatgttgttggagaaaggcaggagaatgttgttctccagtatgcaagaggaaaagacatctagtagacaaggagggactgaggcctgagctgagagcctgaagagagaaagcattgtatgtataaatgcaagggtgggaacttacacagattctcttactgcttccacttcattagtgaaatacgatgtaaagccatccaggcaaaagagatgggaaaggtggatagtgtcaatctgaggatcaaagagatggtaagaaataactgcctaagaaaaagaaacagtaaatgaacaatgagtaaatatagcaatgtaatacgattgctgagctgcaatcagggcccacttgagcccttattacaccagttatgattgttttttccagccatgtatagttacaaaggtggtggcacaaagtgggtggaaaactaaagacaaagaggtatgcgttttgctaaacaggtatgacaaagcaagaaaaatcgttgagtgtgtgtgtgtgtgtgtgtgtgtgtgtgtgtatatatatatatatatatatatatatatatatatatatatatatattttttttttttttttttttttttttttttttgagcgggagtcttgctctgttgcccaagctggagtgcagcggcacgatctcagctcactgcaacctctgactcccaggttcaagcgattctcccacctcagccttcccagtagctgagactacaggcacacaccaccacacctggctaatttttgtatttttagtagagacagggttccgccatgttggccaggctggtctcgaactcctgacctcagctgatccatctgcctcggtctcccaaattgctgggattacaggtgtgagccatcgcgcccggcctgttgaatgtatttttgagagagtaatagaacatggaatttcagctggataaggaatgaagtgagaccacaagggggcagggggacattaaattggcggtagggctcatatgatgttggggatcatcaagaaacgattacattggatacagtatcccagttaccaccaatgctttaatgacacacaatcatcataatgtcaatactaaatattggtctggccaaaattataactatattgggaggcccgaaggccaggaggaagaagaatgggaacaaggggaggtaggagtgaagagagggggtgataaatataaatctttaccttttgaatgaagattcaacagataatatctcaaactgaaccatcaacaagcagcaatataaacaagatattttgacattcagataaatactgaaatatcaactaaaagattgaaattgccagccgggcatggtggctcatgcttgtaatctcagcactttgggaggccgaggtgggcagatcacctgaggtcaggaattcgagaccaacctggccaacatggtgaaaccccatctctactaaaaatacaaaaatcagccaggcatggtggcaggcgcctgtaatcccaactactcgggaggttgaggcaggagaatggcttgagcccgggaggtagaggttgcagtgagctgagattgtgccactgcactccagcctgggcaactgagactctgtatcaaaaaaaaaaaaaaaaacagattgaaattgcttctgaggaaaaagaagtggaaatcagacaggtatatgctcgttatttatttatttatttatttattttgggacaggagtctcactctgtcgcccaggctggagtgcagtggcataatctccactcactgcaacctccgcctcctaggttcaagtgattctcctgcctcagcctcccaagtagttgggactacaggcatgtgccaccatacctggctaattttttgtatttttagtagagacggggtttcaccatgttacccaggatggtcttgatctcctgacctcatgatccacctacttcggcctcccaaagtgccgggattacaggcgtgagccaccacgcatggccggatatgctgtttttttaaacaagccttacggaaccctttgactcattatactatgcacatataactgattaaaaaataaaaactaaaaaaaaatgctgaattgtttgaaaagcgaataatcatgcaacctctaattaggtattgttattcaccatccaagactagtttgattcataagagcaatctaaaatacttacaaactcttgtttcctatcccaggaaggatgccatcctgttaactgatgcttttgacttcaccgatcagtgtttaaattcagcacttggctgttatgatggaaacgtctacgaacgcctgttccagtgggctcagaagtcaccaaccaatactcaggtagttgagtggaacacattataaattatgtaagaaagcagagaacaggcagtgaatacaccttcatgttctcccattttaattgattcccgttaggttggcaatcacttggcgtagcacgtctgtttaaaatattcttagagaacacataaaagaaacaaggagtggcagtatggcctggcaggaactctgagcctggattgtaatcagcaaaatgcactgctcggaacttagtaaagggaattaagaggaaggcccaagctctaaatcatggcttgacagacccaagtgcatacacacagagtggtaaaccggcttttaagtaacaaaaagaaggagataaatcactgcggtaattgaaccaccttattttcagccttttaactttcagttttgtgtagataaaagtaggtattcagaagtggtaggaagcttgagggatgtctctcttagacctgattgcctgctagagatgataccctctcctcttcactctaaggaatacaatccaaggagcaaagaaagctgctgcactgccattagtagcccaggaaagccatatgagtgacaattaaaagggtcatgccaaaaaaatccccagccatcctaggagagcacaccagaactctacatcattaacagcgagaagacggggaggactcataaggtcccaacactcaagggccagggtatgctcgcagctctatgcttatgagcctctttgggaaaagttgtaaatgtcaatgaatatgttaacaggagtgaggtaataaaccctgtagttagaatatgaggaaccaatatttaatagcagattttacatagatgatcaaaacaaaaagtctataggtacaaaacagattattttaaattttatagtgcaaatacatgattcaggtggtgaagctttcttttttacctctttggtccaatttcagaaaaggtgtcttaacaccacatcaaattggcaactctcaggctttcattcacacccagcatggtgttagacttgctcttaacaatttgcagcctgtcataccacatggcttaatttaacatgattatctaaagttacaacacaactaacccatcttggtcactccctgtccccagaaagacatccttttaactcaaggaaatataaacaatatatgttcactgctttagtacagttaacctacttccagtgtgttactttttctaatgattagatctaacatttcaatcttggcataaaaatacagcagtcctcccactccagactagcttccatggtctaaagataaatgtgtgccctttggtgctccacagaaaaacccgccctgctataacacctgtcagaaatgctgacatatatagcccaaacctgttatactggcaacacaggaaacattctggtttctctagagagaatggagggggctttcttgtgttttagttggttttaatatttattttaaaagactttaatctggatactacatgagaacatgtttatctaaacgagaggaatgactgacccagagggtcaacacatttgggaaaacattgatgcacttcatcccattcacttctatctccttccacttgactgtgaacaacgaaggagtcttcaccttcccaactccaagatctatcacagagtagacactccacgtctatggaataaatgaacatggttttacaacctgcatagtgagacaaaggaatctgctgcatacacagtgccacacactcttgtcatcctagcttatattaccttcctaaaaaggtgacaggtatagcattgtggatctttcacgcatgataatttgggaatgtgaagttacaaatgaccttagtgaactgtttccagtcagttaaaatgacatgaggctgcctgctaatgtacatgatcttacatttctggctccttttagagatcaccaaaatagcacttttaaagtgtattttttaatgtgctgtggataattttttaaccctactcttaagatataatgctataattttgaagctgcaataagagacattttcctcatttgcactaatagaaaaaggcacactacagatattttatgtatttttatttattattatttttgagacagagtctcgctctgtcatccaggctgaaatgcagtggcacaaccgcggctcactgcaaccctctgcctcccaggttcaagcaattctcctgcctcccaagtagctggcattacaggcacaagccaccaaacccagctaatttttgtattttgtattagtagagatggggtttcaccatgttggccaggctggtctcaaactcctaacctcaaatgatccgtctgcctcagcctcccaaagtgctgggattataggtgtgagccaccatgcctggcagatattttaaataaaacagcagctatgttgaaacacaccctgtagacataaaagtacagacaggaatatatttcactgacatttttctaccaaaagaaaagtgctatgctaaggtaaacatcttagaatcataggagaagctctcttctgtctggggcagcgttgagctttattcctggacaggatgatgtgctttcttggtttaagggaagaatcattggggataatttcaaaacaaaaatcctgtttttccccaattattctattgtaaaaatgtgtccaagtaggagttagatgcattaaatacatctactgattcattcattcaacaattcaacaaatatttactaagtacatactttgtgccaaaaactattctagatactgaagatacactggagaacaagagtcataaacccagactgagtgcagtggctcaagcctgtaatcccagcactttgggaggctgaggcgggtggatcacttgaggttaggagtttgagaccaacctggccaacatggcaaaactccgtctctattaaaaatacaaaaattagccaggtgtggtggtgcacccctgtaatccaaggtactcgggaggctgaggcacaagaatcgcttgaacccaggaggcggaagttgcagtgagccaaaatcgcaccactgcactccagcctgggcaacagagcaatactgtctccaaaaaaaaacagtcaaaagcccagtgttcgaggagcttacagttttagtgtagacaggcacacacacacacacaaagtaaatattataaaagatgagactagaactaagaaacaaagaatcaagacactgaattacagcataatgaggataacctagtcggacctagaatactgcttatatgatccctatctggttccttgctttgtgattaatgttcagtttcagagagcctcaaagagtcaagccttttatttgtatgaaattccaaaagcaagtgataagctgtgtttttaattggccacctgcatccacaatttaaaatctgcatgagaaaaggaaggatgccctttggaaaaaatgtttctccatatgttcacacaaaatgagtcttagaaataatttttaaaattaagaatcttacgtaatgttactttttgaagctagagacttaatttgaaagtgaaagtcattaatcctggcagaaatgtactgtgttaataatgcgtttctttctacaaacaggagaaccctgcctatgaggaatatataagaccacttttacaaagttggagatccaagctatgaaataaccaacagtattcaagaagcaaccagcaccatcatgtgataatggtactatggcatatatgcaacattaaaattttaaattaga

SEQ ID NO: 10517 - DNA, 642 bp, Homo sapiens
ggacgtcagtcaacaaaaaggcctgaacatactggctcataaaggactcagtgcagcatttacagaccctgacgcaatccggagctgaccagcacgaggcttggaaccagaccactgtcatacacctccaggctgctaaggtgcactgctactatgtcactgtgaagggttttacagaagctctggagaaactagaaaatgaaccagcgattcagcaggtgctcaagcgcctctgtgacctccatgccatacatggaatcttgactaactcgggtgactttctccatgacgccttcctgtctggtgcccaagtggacatggcaagaacagcctacctggacctgctccgcctgatccggaaggatgccatcctgttaactgatgcttttgacttcaccgatcagtgtttaaattcagcacttggctgttatgatggaaacgtctacgaacgcctgttccagtgggctcagaagtcaccaaccaatactcaggagaaccctgcctatgaggaatatataagaccacttttacaaagttggagatccaagctatgaaataaccaacagtattcaagaagcaaccagcaccatcatgtgataatggtactatggcatatatgcaacattaaaattttaaattaga

SEQ ID NO: 10518 - DNA, 9092 bp, Homo sapiens
gggacatatcttcagggcctggagactgaagccacctatgacgcagccacccaggagtttgtgatacacagccccacgctgactgccaccaaatggtggcctggagactgtgagtatacatccaccccccttccttaactctccccaagtagaagaatgttggagggcagagtagcactggctttgaggtccaacagacctcagattgattttctgttctaggctgctgaccttgggcaagtcagttcaccaacctgagcctcaggttcttactctgtaaaataggtgggatattaaacatttcattagtgagtggctggaaagtccccaaaggaactttgaagtagaggagacaatcgatccatgagagacaaggcctcactcacacacacacgcacaaacacacacacttggtctagtcctaggcactcctcacaaccccggttcctctcatctcccgagttagtggcagagcttgccaccagccagagcacaggccctgtgatgacacagtggaaagaatacgcctgcctgcccctgctgcagacacccaggaaggctcacgcccatcaccagcccccatcaggccaccaacgccgtacctcctgctgtggccaccaggtggcggccacatcaagcgtccctgaggcttggtgatttaccaagccccaacgagggatttccccttcctcaaacttgagaatttcacctccaaggacacatctgtggcacttggggacccacaccttgtgtggaaaaaattaaaacaaatatgctgagcccaactaaagcaggagagtgacagagatgagagacacatagagagagggagacacaggcagagaccagagacataagagagagacatgagccgggtgcggtggctcatgcctataatcccagcactttgggatgccgaggtgagtggatcacctgaggtcaggagtttgaaccagcctgaccaatatcattaaacctcatctctactaaaaatacaaaaattagtcgtgtgtggtggcgggcatctgtagtcccacctactcgggaggctgagacaggagaattgcttgaacctgggaggcagaggctgcaatgagccgagctcaggccattgcactccagcctggcgaaagagtgagactctgtctcaaaaacaaaagaaagaaagaaagaagaaaaagaaaaaaaaagagagagagagatgagagagtgatgacagaaagagagagagaaaataaatgaccactgtcaaaaatgaagacaaaagaaaccagccttttagatcagacagaccagggtacagatgaatcctagctctgcccctccaggccaatgaccttcagtgtgtcactctactctctgagcctgtttccttaactggaaaatgggactcatcatcctctctcccctgcaagaactggaaagcatctatcacagggtctagcgccacctagattttgataaatgataattatctgtattcattattataaggttgatgacagagtaattcattaatagttggggggggcaaaaaaaaagctggatcatttcacagtgcctttgccaacgctgctaggtttgcttggttctttgggggcaatcccctctctctttgatcagtgacttttcagggccccagaggtacccatccaaaaccccagccccaggaggctgggttggttgggaaaagcaatgcacaggtcttcctgtgacgggccgctactctctctgccctcagtgggacggtcagccacccatgccctggtccaggcccagctgatctgctcaggagccaggcggggcatgcacgcttttattgtgccaatccggagtcttcaggaccacaccccactgccaggtaagcccataatgctccctcaaggaaccctgccaggaggagagcccaggtggcctccctgacctggggccccagagggccacaggagtagctaagacatgtctcccttgggcagggagcggtccagttggacagacttggtgctaactggctaggtgaacttgagcaagatttagcatctttctgacctcagcttgttcacctgcaaaataggtacaataatcccagtgtcacaggctgctgtgacctggaatgtgtgtatgatacctgccacatagcaagcactctctcaactgataggtgtcctcatctccatctccttcaaggaatcatcattggggacatcggacccaagatggactttgatcaaacagacaatggcttcctgcagctgaaccatgtgcgggtccccagggagaacatgctgagtcgctttgcacaggttacagatctggggaggccggggacttgtacttcctggagaggggacctgcgctttgtgcaggctgggcctgggtcctccatagagcttagtttgggccacataacctcctcccccaagagaggctctgatatcccacagattggggtgaaacccctgcttaggagcagtatgatcttgggcacagagcctcagacctctcatgcagaaatgctcgtcacataggctgacagagcaatcgtggggtggggtggcagccccaggagaggatagggctgaggtgacctgcataatatttacccacagtgaggcctgacacagccaatcgcccaacagataccagccagaatgccagcaggagttctgaaggtcccaattctgccaggcatcacccctttagttatgggtcgtggggaggtccggggtgtcccaggagaggcactgtgaagcagggcacttggggaaatggcctggtattttaacactccaactccagatgcgccggttgaggggcgaggtgccctccatgtgtggagccccacagctctggagaagcgagggcatcctgggaagccttggcccagaacttgtgcccgtccttgttccacacaggtcttgccagatggcacctacgtcaaactcggtacagcacagagcaactaccttcccatggtggtggtgcgggtggagctgctgtcaggggagatcctccctatactgcagaaggcctgtgtcatcgccatgcgctactcggtcatccgccgccaatcccggctccggcccaggcaaggggtgcccagtgactgactaccgcagatatgctgcctcttggtcccacagtgcctccccctgacaccacccttctgccagagccagagtgctgggagcaggcaatgccccccaccacatacacacacacaaacacaaaatctacccagcctggccccatctgggcatgtcagaggagtctctctggctgcctctaacagggctgaccagccggcctaacctgcatcctcagtgcctggcccccatcgggctctatgtgatagtgtctttggccctgtagcaccaggtctgtctgactctgtgtctgtccgagtccagccgtgttctgtgcggctgtgacgggttggacgggtctgggtcagccagttgccagctgcatcagactatggctggctgagttgattctgtcaggccgagcctagcaaaatccaatatcatatcgactgtgtgtggctgagctcgttctgtccagctgtgctgtcagcatcccactggtatgtctagtctggatcccttttgttgtaattggttgtgttgctaccactccctccaccccacagcacagaatagcaagggctgcctgaaccctctgtgaacactcagctcggccatttcacttcatccctcagcttcctcagctacaaaatgggtgtggcagaagtggcctttcagtgtggtgtggagggtgaaatgcagtaaggcacattaagtcctcagcccagggtcctttcctctggcaagctcacagcgccctcgcctggcctgggcttcagaatctgggctgcaagagttctctggaggacagggccactgggaagaaggggcttctgctgctgtcctgcccgaggcccatttatctgggctgcagaagtgtccccagggtggttataagaaagatgcgccaggtaagcagctgctgtctgtagaggaggcttcttgtaatcacatcctctttcaatccagttactgcgagctcctaaatgccggacatagccttgggcactgaggacatagcagcggataaggcagacacagtcccttccttggggttccatcagacctgagtttacatcctaagagttattgtttaggcttgacatattcctcagcgcgcggcaagtgcacacgggcagtggaaggtcacaggttcaaatcatcacaggtgcagggccacaactcttcacctgaaatcttgggaccagacgtgttggagtctcagaacttttcaggttttaggataatactgtgtatatgctggaattctataagcctcccttaacaaggggcagtacccaccaacaaatgtgtcagtattcctgcagtgaaatgtgtggatgttcatgttagatgggatttttaaaggattatcaatggcctcatgtcagttcaagttttgcaatgagttctaaggaactgtctgtttttaaggtttttatggtgtcggggataggggaaggtggacacaacaggtagtgatctaaatcttctggttcttttcccttcagtgacccagaggcaaaggtcctggactaccagacacaacagcagaaactctttcctcagctggccatcagttatgccttccatttcctggcagtcagcctcttggagttcttccagcactcctacactgccattctgaaccaagacttcagcttcctgcctgaggtacctgctgtctgcggaggggcaggcgctggcaggcgctgggagctaagattgttccactcactggggagcagccacagccccatccccatgggcactccccacccccacctctcccagctttcagcatcccagggcgtctgggtgaacggcaccctggtatataaatttacccacaaccagcccccagagagctacaaacatactaagagaaaacaatcacacctagcgtagagaacacaggtccacaacccctgatgtgtatttgaaacctgaaaagctccgaaaaacagttgtttggaactcatttggtggcatagtttgacctgaactgacctgatttatccctctgagtgtgaatacattttgcagtaaaattattaatgtgtttaatcactaaagctgccccaaaccccactggggctattatataaaatgcactttaaatgccacttggcctctctataatccaaaagttactctgattcctaaacacatctggctcacaggtctcaggtaaagcattgtggacttacatatatagtaaaattcagtctgtccaggctaccatgctttataagcactgctcattaacccttccaactgcaatgaggcacagagagatcaagggacataactttcctcccaaggacttgaaagctccaaagataggcagggtcttcaagaaccaaaatctgaaagcagtcctgctgcccagcagcctctgtcctgttggggccactgtaacaaaataccataaagcagtggtttataaacaacagaaattggcctggcatggtgacttacacctgtaatctcagcactttgggaggccagggcaggaggattgcttgagcccaggagttcaagacaagaccagcctgagcaagatggtgagacccccgtctccacaaaaaaaaaaaaaaatgaaaaattagtcaggtgtggtagcacacacctgtagtcccaactactactttggaggctgaggtgggaggattccttgagcccaggagtgcaaggatgcagtgagctgtgattgtgccactgcactccagtccagcctgagcagcagagtgagacgctgtctcaaaaaagaaaaacaaacaaatttattgctcacagttctggaggctgggaagtccaaggtcaaggcactagtgcatttggtgtcaggtgagggcctgcttcctgaacggctttttgctgtgtcctcaaatggtagaagcagcctctttctttcttttttttttttttcctgagacagtctcactctgtcacccaggctggagtgcagtggtacaatcttggctcactgcaacctccgcctcccaggttcaagagattctcctgcctcagcctcctgtgtagctgggactacaagtgcacgccaccacgcccagctaatttttgtatttttagtagagacggggtttcactatgttggccaggatggcctcgatctcctgacctcgtgatccacctgccttggcctcccaaagtgctgggattgcaggtgtgagccaccacacccagccagaagcagcctctttcatgagggcactgatcccattcatgaggcctccaccctcatgacttaattacctcctgaaggccccaactcctactaccatcataatacctcctaatcctagtcctaatcatcaatacctcctaatcctagccctaacccttgagggttaggatttctacataagaattttaggtggacacattcagaccctgtcaccctcctacaacccagtaagtgggcttacagtggacacccatcctcataagctagctttctaaaacccaggccagcaaaatccgtaactcctggaggtttgtgggcccaatccaggcagcaccctcttcccaatcctggagacactggccaggccaggttttccttcactcttatgcccctacagctacattgcctaattgtgtgcctctgggtgagtcacataagctgagtacccgccttctcattcataaagttgtgagcagaggaaacacttcttacctcagagctgagctgggcatgagtagatgctcagtaagtggtgcacagggttggtccctatggtggaggccccctaacaccgcccaacccccctccatgttctcacagctccacgcactgagcacgggcatgaaggccatgatgtcagaattctgcacccagggagctgagatgtgccgcagggcctgtggcggacatggctactcaaagctgagtggcctgccatcactggtcaccaaattgtcggcctcctgtacctacgagggtgagaacacagtgctctacctgcaggtggccaggtaaggtccaggctgacccaggcctttgcccaagcccttggggacccaccaagcttctgttgggtggagggttccgtctgaggcccataaaaagagcaggctttgcgaagtgctatttgggagctgtccaattccccagtatgactaacctatccacttctaggccaccatcctctctcacctccaccacagcctcagacccctccctggtctcttgcttctatcctgtcctgcttctccacaggcagccggagggatctgttcagagcctagggaggatcacatctttctctggtttgaaattcttcaacggcttcccagtgctcataggaaaatgacatattctatgctgtggcctgcaaggtccatgtgacctgacccctgcctccccgtccatcctgctctcaccacctcctgcctctgctcacttcttcttcttctttttttttttgagatggagtctcactgtcacccaggctggagtgcagtggtgcaatctcggctcactgcaacctctgcccgccgggttcaagcaattctcctgccttagcctccgcagtagctgggattacacaccaccatgcccatctaatttttgtatttttagtagagatggggtttcaccatgttggccaggctgctctccaactcctgacctcaggtgatccacctgccttagcctcccaaagtgctgggattacaggcacaagccaccgcacccagccacctctgctcacttctgccggccacacacttctttctgtccaggaggcctttgcatttgatcccctcccacccaacatggccttgtttcctttggagcagtttcacaatctatcattgtctcatttttttgttcacctttttagctctactctccaactagattaggagctccctgagggcagggactacccctaccttgctcgctttagcatcgcctaagcttggtgcagagcctgcacacagaggctccaagcaatggccaagtcagcttcctccacacaggcgatttcttttcatccctcttaggtctgtgggccctggaggccgacagagcctcatcctcacctattctcaggtgaacaaacagggcaaatgcttccctatgcaaggagaaagaagttcactggcaaatatgaaaaacaacatttattatatttttaaaaatatataacatcccttggtttttttccaaattagaaaaggagtacaatagcacatattatgtactctgcactgtgccaagcactctacaaatatcatctcattccatttcacaaaccctcaatcagatgagaactgtcctccccacctagagctagagaaacagagacttgggaggtgaagcttctttcatcacacaggtctcggcgaggctgtatgggaatccagggctgtctaagcccagaacctgtaaccactggattatcctaaagcagcagttgagagtcacctataatcctcctactcctgttagcattcttgcctctatccttcttttttcagctaagaaaatttaatttccacccagtcactgtacaagtcattataaatcccaaaatcacagtgttctgatggaaaattctgtttgctcagatcacagaagggtttatgttcaggatcagagagtgtctggcccagctccacaggtcctgggatatgcctgactgagggcctcgaggcaggacggcccgagggggaaccctcaggagggaggccaggcagaggcctggtgacctggctctcccacgggaaggctggaacctagcatgagcttgcctgtctctgggagtgaggggtgctgggctgtctcacagagtctctgccctctcacctgcctcctcttccaacccccaggttcctggtgaagagctacctgcagactcagatgtcccctggctccacgccacagagatctctctctccatctgtcgcatatctcaccgcacctgacctggccaggtgtccagcccagagggcagccgacttcctctgcccgga

SEQ ID NO: 10519 - DNA, 869 bp, Homo sapiens
gggacatatcttcagggcctggagactgaagccacctatgacgcagccacccaggagtttgtgatacacagccccacgctgactgccaccaaatggtggcctggagacttgggacggtcagccacccatgccctggtccaggcccagctgatctgctcaggagccaggcggggcatgcacgcttttattgtgccaatccggagtcttcaggaccacaccccactgccaggtgtcctcatctccatctccttcaaggaatcatcattggggacatcggacccaagatggactttgatcaaacagacaatggcttcctgcagctgaaccatgtgcgggtccccagggagaacatgctgagtcgctttgcacagtgacccagaggcaaaggtcctggactaccagacacaacagcagaaactctttcctcagctggccatcagttatgccttccatttcctggcagtcagcctcttggagttcttccagcactcctacactgccattctgaaccaagacttcagcttcctgcctgagctccacgcactgagcacgggcatgaaggccatgatgtcagaattctgcacccagggagctgagatgtgccgcagggcctgtggcggacatggctactcaaagctgagtggcctgccatcactggtcaccaaattgtcggcctcctgtacctacgagggtgagaacacagtgctctacctgcaggtggccaggttcctggtgaagagctacctgcagactcagatgtcccctggctccacgccacagagatctctctctccatctgtcgcatatctcaccgcacctgacctggccaggtgtccagcccagagggcagccgacttcctctgcccgga

SEQ ID NO: 10520 - DNA, 3659 bp, Homo sapiens
gtgcccagaacactgcactccgcaggaaagttggtaaggggaagctggggaatgggacatctgttttatgccccatgcttctcttgtaagaagagtccttcattagcagttctgcttccaaataacaaactttgcccttgaaattccactgttagagattcattccttcgaactgtaaagacaatcttcacatgtcaatattgcctgagcccacctaggggatagaagagtcctaggcagcagaagacctggattctggtcctaaaattctgccactgcatagctttgtaaccttgggcaattcactttcccaccttggtcctcagttttgtcatctgtaaaataacaataatgtctgacttcctttccagatccatgaagcaagtgggtgagaagatttcaaggtgccagaaacctcacccaggtccctaagccctctgttctctgtcctctgcagagagcatcatccacagttacccggagtttagctgtaaggacaattatttcatgacccagaatgagcgttataaggctgccatgcggagggcattccacatccggttgatagctcggcgcctgggttggttagaagatggtcgtgaattaggctacgcttacaggtgctcactcctcgagcagccccactagagagggatctacctgggatcacctggaaaccccctagccccatgagccatttcccccaacaaagggaagacttgttgggaaaccaggatgctaggtgccctttatctcctgtactctgctcaggcagggggtacctgggcccctgtctccaataagctactcaactacagcatctctccccaacagagccctttctggagacgtggccttaaatatacacagagtcttcgtgagagccctcaggagcctgggctcagaggagcagattgccaaatgggacccactctgcaaaaacatccagatcatcgcaacgtatgcacagacagagttgggacatggtgagctaggactgctgcgtgtggtgtttaggttgtgcactgcaaaactccagagggcccatttacatctaggtagtcataggttcatatgctccgagggacatatgtttaataagaaaacattccagcagctggcagtcaagggtcctgaggaaggggtgccaccttctaatttgcacgtattgtatgagctcccagtggggcaagtcattccttctggaaacatcagcagccaccccttctcatggactggctataggggactgtgtgtcccacacacagcccacagatgaaaggggagaactgcctgcaagtacagctgggagctgggccccactccatactgcgctgatgcctaagagttcagacccacctagaagcagcttcacaggtaagaaccccacctcaggccaatgtctaacacctctccttgatcctaagggacatatcttcagggcctggagactgaagccacctatgacgcagccacccaggagtttgtgatacacagccccacgctgactgccaccaaatggtggcctggagactgtgagtatacatccaccccccttccttaactctccccaagtagaagaatgttggagggcagagtagcactggctttgaggtccaacagacctcagattgattttctgttctaggctgctgaccttgggcaagtcagttcaccaacctgagcctcaggttcttactctgtaaaataggtgggatattaaacatttcattagtgagtggctggaaagtccccaaaggaactttgaagtagaggagacaatcgatccatgagagacaaggcctcactcacacacacacgcacaaacacacacacttggtctagtcctaggcactcctcacaaccccggttcctctcatctcccgagttagtggcagagcttgccaccagccagagcacaggccctgtgatgacacagtggaaagaatacgcctgcctgcccctgctgcagacacccaggaaggctcacgcccatcaccagcccccatcaggccaccaacgccgtacctcctgctgtggccaccaggtggcggccacatcaagcgtccctgaggcttggtgatttaccaagccccaacgagggatttccccttcctcaaacttgagaatttcacctccaaggacacatctgtggcacttggggacccacaccttgtgtggaaaaaattaaaacaaatatgctgagcccaactaaagcaggagagtgacagagatgagagacacatagagagagggagacacaggcagagaccagagacataagagagagacatgagccgggtgcggtggctcatgcctataatcccagcactttgggatgccgaggtgagtggatcacctgaggtcaggagtttgaaccagcctgaccaatatcattaaacctcatctctactaaaaatacaaaaattagtcgtgtgtggtggcgggcatctgtagtcccacctactcgggaggctgagacaggagaattgcttgaacctgggaggcagaggctgcaatgagccgagctcaggccattgcactccagcctggcgaaagagtgagactctgtctcaaaaacaaaagaaagaaagaaagaagaaaaagaaaaaaaaagagagagagagatgagagagtgatgacagaaagagagagagaaaataaatgaccactgtcaaaaatgaagacaaaagaaaccagccttttagatcagacagaccagggtacagatgaatcctagctctgcccctccaggccaatgaccttcagtgtgtcactctactctctgagcctgtttccttaactggaaaatgggactcatcatcctctctcccctgcaagaactggaaagcatctatcacagggtctagcgccacctagattttgataaatgataattatctgtattcattattataaggttgatgacagagtaattcattaatagttggggggggcaaaaaaaaagctggatcatttcacagtgcctttgccaacgctgctaggtttgcttggttctttgggggcaatcccctctctctttgatcagtgacttttcagggccccagaggtacccatccaaaaccccagccccaggaggctgggttggttgggaaaagcaatgcacaggtcttcctgtgacgggccgctactctctctgccctcagtgggacggtcagccacccatgccctggtccaggcccagctgatctgctcaggagccaggcggggcatgcacgcttttattgtgccaatccggagtcttcaggaccacaccccactgccaggtaagcccataatgctccctcaaggaaccctgccaggaggagagcccaggtggcctccctgacctggggccccagagggccacaggagtagctaagacatgtctcccttgggcagggagcggtccagttggacagacttggtgctaactggctaggtgaacttgagcaagatttagcatctttctgacctcagcttgttcacctgcaaaataggtacaataatcccagtgtcacaggctgctgtgacctggaatgtgtgtatgatacctgccacatagcaagcactctctcaactgataggtgtcctcatctccatctccttcaaggaatcatcattggggacatcggacccaagatggactttgatcaaac

SEQ ID NO: 10521 - DNA, 578 bp, Homo sapiens
gtgcccagaacactgcactccgcaggaaagttgatccatgaagcaagtgggtgagaagatttcaaggtgccagaaacctcacccaggtccctaagccctctgttctctgtcctctgcagagagcatcatccacagttacccggagtttagctagccctttctggagacgtggccttaaatatacacagagtcttcgtgagagccctcaggagcctgggctcagaggagcagattgccaaatgggacccactctgcaaaaacatccagatcatcgcaacgtatgcacagacagagttgggacatgggacatatcttcagggcctggagactgaagccacctatgacgcagccacccaggagtttgtgatacacagccccacgctgactgccaccaaatggtggcctggagacttgggacggtcagccacccatgccctggtccaggcccagctgatctgctcaggagccaggcggggcatgcacgcttttattgtgccaatccggagtcttcaggaccacaccccactgccaggaatcatcattggggacatcggacccaagatggactttgatcaaac

SEQ ID NO: 10522 - DNA, 4091 bp, Homo sapiens
gttgggcgccggaactggtccggcccgactcacgaccccgcgggacccggccggaacccggcccgaccccggcgcgcgcgcggcggaggacgaggaagagttgtggcgaggcagatcctgccccgtggccgcggccgtctcgtgtcccaccggccttccgggttccagcgccaggcctggtgcctgccccaggaggatgagcatttgcattgcctgcaccttatcgtgcccttccacctgctgaagcagctgtgcctgccgctcttgtgaactgcgaacttccccttacctcctctctctggctcgggagctggctcggccgcctgtcagtgcaatgctgccccatgtggtgctcaccttccggcgcctgggctgcgccttggcgtcctgccggctggcgcctgcgagacacagaggaagtggtcttctgcacacagccccagtggcccgctcggacaggagcgccccggtgttcacccgtgccctggcctttggggacagaatcgccctggttgaccagcacggccgccacacgtacagggagctttattcccgcagccttcgcctgtcccaggagatctgcaggctctgcgggtgtgtcggcggggacctccgggaggagagggtctccttcctatgcgctaacgatgcctcctacgtcgtggcccagtgggcgtcatggatgagtggcggtgtggcagtccccctctacaggaagcatcccgcggcccagctggagtatgtcatctgcgactcccagagctctgtggtccttgccagccaggagtacctggagctcctgagcccggtggtcaggaagctgggggtcccgctgctgccgctcacaccagccatctacactggagcagtagaggaaccggcagaggtcccggtcccagagcagggatggaggaacaagggcgccatgatcatctacaccagtgggaccacggggaggcccaagggcgtgctgagcacgcaccaaaacatcagggctgtggtgaccgggctggtccacaagtgggcatggaccaaagacgacgtgatcctccacgtgctcccgctgcaccacgtccatggtgtggtcaacgcgctgctctgtcctctctgggtgggagccacctgtgtgatgatgcctgagttcagccctcagcaggtttgggaaaagttcttaagttctgaaacgccgcggatcaatgtctttatggcagtgcctacaatatacaccaagctgatggagtactacgacaggcattttacccagccgcacgcccaggatttcttgcgtgcagtttgtgaagaaaaaattaggctgatggtctcaggctcagctgccctgcccctcccagtgctggagaagtggaagaacatcacgggccacaccctgctggagcggtatggcatgaccgagatcggcatggctctgtccgggcccctgaccactgccgtgcgcctgccaggttccgtggggaccccactgcctggagtacaggtgcgcattgtctcagaaaacccacagagggaagcctgctcctacaccatccacgcagagggagacgagagggggaccaaggtgaccccagggtttgaagaaaaggagggggagctgctggtgaggggaccctccgtgtttcgagaatactggaataaaccagaagaaactaagagtgcattcaccctggatggctggtttaagacaggggacaccgtggtgtttaaggatggccagtactggatccgaggccggacctcagtggacatcatcaagactggaggctacaaggtcagcgccctggaggtggagtggcacctgctggcccaccccagcatcacagatgtggctgtgattggagttccggatatgacatggggccagcgggtcactgctgtggtgaccctccgagaaggacactcactgtcccacagggagctcaaagagtgggccagaaatgtcctggccccgtacgcggtgccctcggagctggtgctggtggaggagatcccgcggaaccagatgggcaagattgacaagaaggcgctcatcaggcacttccacccctcatgacccggcagactgggactgcgggtctggtggggagcagcagacgtccccttcacaccgagaaccacgggggcccgtccaagacctggcctcccttaaacctgaaccccccaaatcaggtcacgtagaatcaagaactgtttgggatgaaatcaccatgtggggtccccagcctcgggccagttgttgcagctcaaggagaccgtccctggtgtcacctctgcctggtcaccgccgacctcatctgtgcagcgcggtgcagccagcccctggccccacgtgctgaggcacctcccgccccacagtgccctgcagttgccaggctctccagggcaggtcccagaggtttcccacaaaaaacaaagactccactggaggaaacaagcccctgtcccacgccgtctgcacgtgcctgtgcctcacccagagccagtgtctcccggcccacataggaggtctgggcagccacccagggggccctcctgggaggagctgagggttcacaagcctcccagaaccagccctgtcccatgggttccgtgcatttcctggtgctgctcttggaggagagcagctcccactgtggggacacctgccaccctgcacactactgtgtgtccatcagcatgtgtcacagaaagtgcgtggacggatggccccggagctgctctgccgtgaccctgcctcaccccccagcgcagggactttccaggtcatctccacaccagcccctcagccggtgaaccctctctcccatcaccgtctccacccagacccccacctgccccatggcccccatttcatgtctgtggctcaccagcttttccccagacccagctccggagcccacaggcgtggccgatgcagaaacctcaggaaggtgtgttgtgaatgttgggtgcacccacgttgcatttacttagcggggccaattcagatgcacaggggccacatgcagaatccagaagtttctggacaattttcagaagaataggctgcctcctccccacagcctgggggaagtaacagtcatcgcccagcagtgtctggcctgaacttacccagaacattctgcccccggaatgcacgtctgaaagagtggccagaaacgagtgtgccgggcaggaggccagccccatctcaggctcacgtgcctctgacaggagaccagccccatctcaggctcacatgcctcgcggacagttggacgtggcctggggcccctgctcacttgagcatgtcgcccaccaagcttgtctgaggccacagagcagcgtcccagccctgttttccaggactggtgggtgccccagtccacggccctgccccacccgaactcctgcctcacggtgtggccttgtgcatccccatggcctgaccccgggaacagtcagaggaaggggtcccgccctcccgccagaggcctggacccaagggaacggcagtcagagactacagtccagacgtttgtgtctaggccttgctggtagctaaggaaatgccttctgttgggaaaaggtcaaatttaacatagcaaaatttttacttaattccactaattttacatttgcatctctctcctttaatcctgaaacttttgattcctaaaaagcttacataatcatttgctttatccgatagtatacatcagtatatcatgctttcgaaataatgagtgtaactttctgctgacaatactacaaactacagaaagcctggagctcattgaccagaaactgcagagagcctggagctcgttgaccacaaactacagaaagcctggagctcgttgaccagccggttgaccagaatacggtgctccaaggacatgcggttgaatgccgtgttctaaagtcacgagtgactctccagctggtccctgtgccaggctggtcggccttcgtgcacacagtccgccagtgcccagccaggcccctggttcccctctgctccaccagccgagaacaagcccgtcctggagggaactcatcctctcctccctccccattaaagcccagtttattcccca

SEQ ID NO: 10523 - DNA, 1541 bp, Homo sapiens
ccggccggaacccggcccgaccccggcgcgcgcgcggcggaggacgaggaagagttgtggcgaggcagatcctgccccgtggccgcggccgtctcgtgaccgggctggtccacaagtgggcatggaccaaagacgacgtgatcctccacgtgctcccgctgcaccacgtccatggtgtggtcaacgcgctgctctgtcctctctgggtgggagccacctgtgtgatgatgcctgagttcagccctcagcaggtttgggaaaagttcttaagttctgaaacgccgcggatcaatgtctttatggcagtgcctacaatatacaccaagctgatggagtactacgacaggcattttacccagccgcacgcccaggatttcttgcgtgcagtttgtgaagaaaaaattaggctgatggtctcaggctcagctgccctgcccctcccagtgctggagaagtggaagaacatcacgggccacaccctgctggagcggtatggcatgaccgagatcggcatggctctgtccgggcccctgaccactgccgtgcgcctgccaggttccgtggggaccccactgcctggagtacaggtgcgcattgtctcagaaaacccacagagggaagcctgctcctacaccatccacgcagagggagacgagagggggaccaaggtgaccccagggtttgaagaaaaggagggggagctgctggtgaggggaccctccgtgtttcgagaatactggaataaaccagaagaaactaagagtgcattcaccctggatggctggtttaagacaggggacaccgtggtgtttaaggatggccagtactggatccgaggccggacctcagtggacatcatcaagactggaggctacaaggtcagcgccctggaggtggagtggcacctgctggcccaccccagcatcacagatgtggctgtgattggagttccggatatgacatggggccagcgggtcactgctgtggtgaccctccgagaaggacactcactgtcccacagggagctcaaagagtgggccagaaatgtcctggccccgtacgcggtgccctcggagctggtgctggtggaggagatcccgcggaaccagatgggcaagattgacaagaaggcgctcatcaggcacttccacccctcatgacccggcagactgggactgcgggtctggtggggagcagcagacgtccccttcacaccgagaaccacgggggcccgtccaagacctggcctcccttaaacctgaaccccccaaatcaggtcacgtagaatcaagaactgtttgggatgaaatcaccatgtggggtccccagcctcgggccagttgttgcagctcaaggagaccgtccctggtgtcacctctgcctggtcaccgccgacctcatctgtgcagcgcggtgcagccagcccctggccccacgtgctgaggcacctcccgccccacagtgccctgcagttgccaggctctccagggcaggtcccagaggtttcccacaaaaaacaaagactccactggaggaaacaa

SEQ ID NO: 10524 - DNA, 7020 bp, Homo sapiens
gagccacagagcgatgggagagggaggtgccacgcactctcaaacatgcaggtcttgtgagaactcactcactagcacgagaacagcaaggggaaaatccacccctgtgatgcagtcacctcccaccaggtcgctcctccaacagcggggatcacaattcaacatgagatttgggtggggacacagatccaaaccatatcgttcctccctggcccctcccaaatcttacgtcctttttacattgcaaaatacaatcctacttcccaacagtcccccaagtcttcactcatttcagcattaattcagaagtccacagtccaaagtctcgtctgagacaaggcaagtccttttcacctatgagcctgtaaaatcaaagacaagttacttcccagatacagtgggggtgcaggcattgggtaaatacaccagtgccaaaagagagccgccagccaaaacaaaggggctgcgagccccaggcaggtccaaaacctagcaaggcagtcactgaattgttttttggtttcttcttttttggtttttttttttttttttttttgagacggggtcttgctctgatgcccaggctggagtgcagtggcatgatctcagcttactatagcctctgcctgcaagcaattctcctacctcagcctccctaagtagctgggactataggcatgcaccaccacacccagctaatttttgtattttttagtagagatggggttttgccatgttgtccaggctggtctcgaactcctgacctcaagtgatccacctgcctcagattcccaaaatgctggaattacaggcgtgagcaaccccacccagcccaataaatcttaaagccccaaaataatctcctaagacccatgtctcacatccaggctacactgatgcatggaggtggctcccaaggccatgggtatctctgctcctgtggctctgtagggtacagcccccatgctgctttcataggctgctgttgtgtgcctgcaacttttctaggtgcaccacacagtgcaagctgtcggtgggttattctggggtctggagaacggtggccctcttctcacagctgcagtagccagggccccactggggactctgtgtgggggctccaaccccatctttctcctcttcactgccctggagcagtggcctgagctctatctggagcccttttagccccagagcaacagggatgcaggggccagtgtccctcagggcagtggcccacaaaaccattcttccctccgaggcctccaggcctatgatgagaggcacttccatgaaggtctctgacacgcctagagacattttcctcattgtcttggcgattaatattcagctcctctttacttacgcacatttctgcagccagcttgaattcctccccagaaaattgtttgtttgtttgttttctaccatgtgatcaggctgcaaattttccaaattttatgctctgcttaccttttaaatctaagttccggtttcaggtcatctctttgctcatgcttaacaaaagcaatctttgctccagttcccaataagttcctcatctccctccgagtctacctcagcctggacttcattgtccatatcgctattagcattttagtcacaacaatttaacaagtctttaggaagttccaaactttccctcatcttcctgtcttcttccgagctctccaaatcgttccagcctctgcctgttacccagttccaaagctgcttccacatttccagatgtcttaacagcagtgccccacttccctgtaccagttttctgtgttagtccagtcttgcattgctataaatgaagccagatttttctcagccactttgccaaccggggacctccgtggctggtgacacccccaacccaggcctgccacagaaggcacccacacactcgacccactgggccatgcttggcttatgcactggctcagcccacctgtgttatagcttatacctgcattcatcggttcccaagttcttgtcccgcgtccaagaagaatgaggttacactgacaattcaaagggtgaggagagtggagaagaattttattgagcaatgaaacagctctcagcggagagggtatgcgagggtgctgaaccgcccagagttgggtgtggctgggtctagggcttttctgggcacagaatggggaggggcaggctgtaggtagcactggaaaaggtaacctttggttggttaaaaagcattattcagaaagaaccagtgggaaagagtgggcaaacaggaatagaagttctcactccaggctgcaggtttcaggctgtttttggcttgaaggtggggtttcaccagggacccacccctgtctatctgggcatttgactgcttcctgttgctttcataaggaactacccaagatggtaatttataaagaaaagaggtttaagtggctcacagttccacaggctataaggaagcatggctggggaggcctcaggaaacttacagtcatgacagaaggggaggcaggcatgtcccacatggtggagcaggaggaagagctcacctacagcaaattatttaagaccgagcatttgtctctgttctgttccctctctggacgcaccctcctgcctccaccctgacttgccgtctcctgagcactgaagatatttttggcttgtccgatgtgactccacagacagcagaaacgcttgcttgatcagggcagcatcagggcaccacacatgcctgggcttgcacaacacagcgggagcactgccactcagcagcagctgctgctttcattaaacagttaccttgagaagaaaagataggtgtcgagggctgagagctgtgctagagtttcagggtccgagttggcaggaactgaagtcccgatgctcctcagcccttggctgtcctcagggctgccctctgcgtggggacaccaggccgcccctgcccagggacaccaggccgcctgctcctgctctgtgcatctctcacatcaggctcctcacccagcattgtttgggctatgacagtggctgtgacaagaccctaagacgggaagctgcgtgcagggcacttgagggcccgctgaggagaagccgcctgtgagggacaggactgggcagggaaggccaccagccatgcggtcacagcccaggactccgccagtcctgcaggagccctggagccaggcccttgctgtccaggccacttgctgtacctggcccacagctacctcccctgcagccctgagtcctgcttgctgtgcccggctcaggctgagactgcagtgcttgtccattcaccatgaaagaaagaagaacaggaagggaggcaggaggaagtaagttagaggattaatccaaatgttccaactgtctaatgggagttccaacaagaagatatccagggaggaaattcacagtcaaatttccccaaaccaaaggtcatgagttttcaggttgaaagaacacccaaccaagaggagagaaaacagcattctaaatatcggaaggaaacgaaacctcgcctcaggcatgcgggctctgacgggcaggatggcggcacggagggctgctgtatccagtgaagtcagcagttcagatgaaacagataactcccttaaaagacacaaattgccaagactgacgcaaacactgaaacagactgaacagttctgagttaccaatttaaaactgcaaagcaaatagcaggcccaaaaggcttcactgataaattatctcaaacattgaaggcaaaaaataaaaccagacacagcaaagtaagtctctgatgaaacagagtggggaggaacacttcctaactccccgtatgggaccagcactaccctgaaatcaaaaccagacaagaaaacgagaggacagtgttcccaatgggcagacacacaaaatcctaaacaaaacgttagcaaattaaatccagttaatgcacaaaaagacaacacgtcatgatcaagcagcatttaagccaggaatagagggttactttcatattcaaaaatcagtctgtgtaattcaccatatattttttttttttttggatggagtctcgctctgtcgcccaggctggagtgcagtggcacgatctccgctcactgcaacctccagctcccaggttcaagtgattctcctgcctcagcctcctgagtagctgggattacaggtgcgcaccaccatgcacagctaatttttgtatttttattagagacggggtttcaccgtgttggccaagctggtctcgaactcctgacttcaagtaatcctcccgcctcggcctcccgaagtcctggaattacaagcgtgagccactggtaattcaccatatttacagaatgaagaagaaagatcatatcatttcaatagatacagaaaaagcatttgcaaatgtcaaaacccttttataacaagcactcttagcaaactaggagaagaaggaaaatccttgaacctgatgagggagtctctcaaaagctaccagatgacatcctgctcgatggggagctgctgggcgttttcctcctgtgaccaggaaggggcgcctgccctcaccactgccacccagtctcattcaacacagagtttgtcccctgttagaaaccgagacgttggttacacgtggaggttgggagtggctcaggcaggcagaggggcttctgggaacctggccatgttccctttcagtctgggcgctacttagagcagggggcagttgcttcaataaaactttagattcccacacaggccaggcgtggtgctcacacctgtaatcccagcactttgggaggccgaggtgggcagatcacctgacgtcaggagttggagaccatcctggccaacatggtgaaaccccgtctctattaaaaatacaaaaattagccaggcatggtggtatgcgcctgtagtcccagctagttaggaggctgaggcaggagaatcgcttgaacccgggaggcggaggttgcggcaagccgagactgcaccactgcaatccagcctgggcgacagggcaagcctctgtctcaaaagaaaaaaaaatctacacatccctcaccacactgtacataggacagctgggtgtaaattacatctccatttaaatgcctgtcatagttttatacaactataaaatatatacgtgccaaaataaatttgataggaacattggaaccaggtaaggtgacgcatacctgtagcacttcgggaggatcctttgagcccaggaagtcgaggcttcagtgagccatgactgcaccactgcactctggcccaggcaacagtgagatcctgtcctagaaagaaaagagaaaaaaagaaaaatgcgatttggaaatgtggaggtcgaggttgacagcgacaccgaggtcgaagccagttgcccctggagagcgagagactgggctgggccgactcccacctctgtcgcgagaggcctacgggcaggggcaggtgggcagggggactgtgctgggtctctggccgcgtctggacggcaggcgacactttctccacaaaaagcgtcaagaaaccacgacacttggtttctggacttttccgcggaacagtaaccagaacaatcgccatgaaggttcgtttctgtcatggctcagtgcagcctggacgccctggaccagcccctcctgcgcctgggccacggccgctgccttcagggcatcactggtgggcggcacaaccatcctccctttggggggttaatttcatttctttcctcccttctttaatggtgaatggaggagcaccgagcaccactgcagtctcagtttcagatcccagcgcctcgtccctgcccactgccctcggccccgcccgcctgcattggcagtgccctggccccacccacccgtgtcagcaccgcccaccgccctggcaccacccaccgagttctcgcccatgaggaagggggaccctgagtggaggtttcaaaccttaggggccgtccctgccgtgcagggctctgtgaggcctcttgccacataggcttgtgtctgcaggactgtgcggcatttactcccatctcaaataccccatacagggcagactgcccctgccccacctgcccacccactccccagcctcttccgcacgcctcctctggaaggggaacgggccacagagtgaaatggggccttccagctccagtgcggggacttggaaggcctggcccggtgtgggggcccctctgccctgcaggccactctgtgcaggcctatcctcaggtgtgccctcgcccaaggcctgcacgcaccatggcttctgtggtaccagtgataacaccatgccgggcacctcctgcagtcaccacccctgggctgctagggcagagacagctgcggtggcccggtgcacctgcctggcctcaggatggccgaggcgcctggcaaggctgcagggtcccaggggcacctgtccgtactgctgggcgcctgagttcctcctgctgggcactgtcagggcagtgcgcctcaggctgtgcttgtctctgcagaaatgtcctggccccgtacgcggtgccctcggagctggtgctggtggaggagatcccgcggaaccagatgggcaagattgacaagaaggcgctcatcaggcacttccacccctcatgacccggcagactgggactgcgggtctggtggggagcagcagacgtccccttcacaccgagaaccacgggggcccgtccaagacctggcctcccttaaacctgaaccccccaaatcaggtcacgtagaatcaagaactgtttgggatgaaatcaccatgtggggtccccagcctcgggccagttgttgcagctcaaggagaccgtccctggtgtcacctctgcctggtcaccgccgacctcatctgtgcagcgcggtgcagccagcccctggccccacgtgctgaggcacctcccgccccacagtgccctgcagttgccaggctctccagggcaggtcccagaggtttcccacaaaaaacaaagactccactggaggaaac

SEQ ID NO: 10525 - DNA, 7020 bp, Homo sapiens; identical to SEQ ID NO: 10524

SEQ ID NO: 10526 - DNA, 2247 bp, Homo sapiens
acgaccccgcgggacccggccggaacccggcccgaccccggcgcgcgcgcggcggaggacgaggaagagttgtggcgaggcagatcctgccccgtggccgcggccgtctcgtagctcggccgcctgtcagtgcaatgctgccccatgtggtgctcaccttccggcgcctgggctgcgccttggcgtcctgccggctggcgcctgcgagacacagaggaagtggtcttctgcacacagccccagtggcccgctcggacaggagcgccccggtgttcacccgtgccctggcctttggggacagaatcgccctggttgaccagcacggccgccacacgtacagggagctttattcccgcagccttcgcctgtcccaggagatctgcaggctctgcgggtgtgtcggcggggacctccgggaggagagggtctccttcctatgcgctaacgatgcctcctacgtcgtggcccagtgggcgtcatggatgagtggcggtgtggcagtccccctctacaggaagcatcccgcggcccagctggagtatgtcatctgcgactcccagagctctgtggtccttgccagccaggagtacctggagctcctgagcccggtggtcaggaagctgggggtcccgctgctgccgctcacaccagccatctacactggagcagtagaggaaccggcagaggtcccggtcccagagcagggatggaggaacaagggcgccatgatcatctacaccagtgggaccacggggaggcccaagggcgtgctgagcacgcaccaaaacatcagggctgtggtgaccgggctggtccacaagtgggcatggaccaaagacgacgtgatcctccacgtgctcccgctgcaccacgtccatggtgtggtcaacgcgctgctctgtcctctctgggtgggagccacctgtgtgatgatgcctgagttcagccctcagcaggtttgggaaaagttcttaagttctgaaacgccgcggatcaatgtctttatggcagtgcctacaatatacaccaagctgatggagtactacgacaggcattttacccagccgcacgcccaggatttcttgcgtgcagtttgtgaagaaaaaattaggctgatggtctcaggctcagctgccctgcccctcccagtgctggagaagtggaagaacatcacgggccacaccctgctggagcggtatggcatgaccgagatcggcatggctctgtccgggcccctgaccactgccgtgcgcctgccaggttccgtggggaccccactgcctggagtacaggtgcgcattgtctcagaaaacccacagagggaagcctgctcctacaccatccacgcagagggagacgagagggggaccaaggtgaccccagggtttgaagaaaaggagggggagctgctggtgaggggaccctccgtgtttcgagaatactggaataaaccagaagaaactaagagtgcattcaccctggatggctggtttaagacaggggacaccgtggtgtttaaggatggccagtactggatccgaggccggacctcagtggacatcatcaagactggaggctacaaggtcagcgccctggaggtggagtggcacctgctggcccaccccagcatcacagatgtggctgtgattggagttccggatatgacatggggccagcgggtcactgctgtggtgaccctccgagaaggacactcactgtcccacagggagctcaaagagtgggccagaaatgtcctggccccgtacgcggtgccctcggagctggtgctggtggaggagatcccgcggaaccagatgggcaagattgacaagaaggcgctcatcaggcacttccacccctcatgacccggcagactgggactgcgggtctggtggggagcagcagacgtccccttcacaccgagaaccacgggggcccgtccaagacctggcctcccttaaacctgaaccccccaaatcaggtcacgtagaatcaagaactgtttgggatgaaatcaccatgtggggtccccagcctcgggccagttgttgcagctcaaggagaccgtccctggtgtcacctctgcctggtcaccgccgacctcatctgtgcagcgcggtgcagccagcccctggccccacgtgctgaggcacctcccgccccacagtgccctgcagttgccaggctctccagggcaggtcccagaggtttcccacaaaaaacaaagactccactggaggaaacaag

SEQ ID NO: 10527 - DNA, 5399 bp, Homo sapiens
ttggagttccggatatgacatggggccagcgggtcactgctgtggtgaccctccgagaaggacactcactgtcccacagggagctcaaagagtgggccaggtagggctgggtggggcgggcagggagcactcatggggtcttgggggtccagtcttgagggccaccctaggtattggcatcgtccgtcttagaggtggagatgagggatcaagaaagaccagcagtgagggtccttagagacctgaaggccgcacacagcaggtagagacgagggcagggggcaggagccgtgctcagatttgacttggtggcaatattccgagggggcagaaactcacattcctgggacagggccctgtacggcctgtggtgggttccgtcctggtcccaggagagatcccggatgagccaggccaggcccatgcaggaggtgcatggagctgagatccagggttgacaccagctggccgcacgcgctgggcccttccccgccaggccacaggcagcctgtccacctgccgccccaaagccagtgctgggccccagcagaactgcaaggcccacccattctccgtcggcacctgcacggcctctccctctcctgccctgggggtgggtcctgaaggtgcctcacacacctccagtcagttccacggagaccccagcaccatcaccatcccctcagtcatttcactttcccctccatgtccagggcagggcctgttcctcagcggtggccaccacccagtccttaaactcacctgcattttttgttttgcctttaccttacccagaacctttccccaaggactttctcccacctgtctcacccccagtggtttctgatgcatgggatccacagaccctccacttttgccagcagtggtggtggtcacgcccagggctgaacctgagctatggccttgtcaaaggccgtcaggacggaagggtatcccataggaccgtcagggcagagccaggctgagctcagaaaggaagcttttagtttcacctacagtaatttcttttgtttttttaatttataaagaaacggggtataattggctcatggttccacaggctatacaggaagcgtggctggggaggcctcaggaaacttacagtcatggcagaaggcaaaggggaaacaggcacatcctacatggccggagcaggagggaggagggaggagccacagagtgagtgagggaggagggagggtccacagagggagggagggtccacagagtgagtgagagaggagggagggtccacagagtgagtgagggaggagggaggggtcacagagtgagtgagggaggagggaggggccacagtgtgagtgagggaggagggaggggtcacagagtgagcaagggggggaggggccacagagtgagcgggggaggggccacagagtgagtgagggaggagggaggggtcacagagtgagtgagggaggagggaggggtcacagagtgagtgagggaggagggaggggtcacagagtgagtgagggaggagggagggtccacagagtgagtgagggaggagggaggggtcacagagtgagcggggggggggggaggggccacagagcgaggagggggtgggaggagccacagagcgatgggagagggaggtgccacgcactctcaaacatgcaggtcttgtgagaactcactcactagcacgagaacagcaaggggaaaatccacccctgtgatgcagtcacctcccaccaggtcgctcctccaacagcggggatcacaattcaacatgagatttgggtggggacacagatccaaaccatatcgttcctccctggcccctcccaaatcttacgtcctttttacattgcaaaatacaatcctacttcccaacagtcccccaagtcttcactcatttcagcattaattcagaagtccacagtccaaagtctcgtctgagacaaggcaagtccttttcacctatgagcctgtaaaatcaaagacaagttacttcccagatacagtgggggtgcaggcattgggtaaatacaccagtgccaaaagagagccgccagccaaaacaaaggggctgcgagccccaggcaggtccaaaacctagcaaggcagtcactgaattgttttttggtttcttcttttttggtttttttttttttttttttttgagacggggtcttgctctgatgcccaggctggagtgcagtggcatgatctcagcttactatagcctctgcctgcaagcaattctcctacctcagcctccctaagtagctgggactataggcatgcaccaccacacccagctaatttttgtattttttagtagagatggggttttgccatgttgtccaggctggtctcgaactcctgacctcaagtgatccacctgcctcagattcccaaaatgctggaattacaggcgtgagcaaccccacccagcccaataaatcttaaagccccaaaataatctcctaagacccatgtctcacatccaggctacactgatgcatggaggtggctcccaaggccatgggtatctctgctcctgtggctctgtagggtacagcccccatgctgctttcataggctgctgttgtgtgcctgcaacttttctaggtgcaccacacagtgcaagctgtcggtgggttattctggggtctggagaacggtggccctcttctcacagctgcagtagccagggccccactggggactctgtgtgggggctccaaccccatctttctcctcttcactgccctggagcagtggcctgagctctatctggagcccttttagccccagagcaacagggatgcaggggccagtgtccctcagggcagtggcccacaaaaccattcttccctccgaggcctccaggcctatgatgagaggcacttccatgaaggtctctgacacgcctagagacattttcctcattgtcttggcgattaatattcagctcctctttacttacgcacatttctgcagccagcttgaattcctccccagaaaattgtttgtttgtttgttttctaccatgtgatcaggctgcaaattttccaaattttatgctctgcttaccttttaaatctaagttccggtttcaggtcatctctttgctcatgcttaacaaaagcaatctttgctccagttcccaataagttcctcatctccctccgagtctacctcagcctggacttcattgtccatatcgctattagcattttagtcacaacaatttaacaagtctttaggaagttccaaactttccctcatcttcctgtcttcttccgagctctccaaatcgttccagcctctgcctgttacccagttccaaagctgcttccacatttccagatgtcttaacagcagtgccccacttccctgtaccagttttctgtgttagtccagtcttgcattgctataaatgaagccagatttttctcagccactttgccaaccggggacctccgtggctggtgacacccccaacccaggcctgccacagaaggcacccacacactcgacccactgggccatgcttggcttatgcactggctcagcccacctgtgttatagcttatacctgcattcatcggttcccaagttcttgtcccgcgtccaagaagaatgaggttacactgacaattcaaagggtgaggagagtggagaagaattttattgagcaatgaaacagctctcagcggagagggtatgcgagggtgctgaaccgcccagagttgggtgtggctgggtctagggcttttctgggcacagaatggggaggggcaggctgtaggtagcactggaaaaggtaacctttggttggttaaaaagcattattcagaaagaaccagtgggaaagagtgggcaaacaggaatagaagttctcactccaggctgcaggtttcaggctgtttttggcttgaaggtggggtttcaccagggacccacccctgtctatctgggcatttgactgcttcctgttgctttcataaggaactacccaagatggtaatttataaagaaaagaggtttaagtggctcacagttccacaggctataaggaagcatggctggggaggcctcaggaaacttacagtcatgacagaaggggaggcaggcatgtcccacatggtggagcaggaggaagagctcacctacagcaaattatttaagaccgagcatttgtctctgttctgttccctctctggacgcaccctcctgcctccaccctgacttgccgtctcctgagcactgaagatatttttggcttgtccgatgtgactccacagacagcagaaacgcttgcttgatcagggcagcatcagggcaccacacatgcctgggcttgcacaacacagcgggagcactgccactcagcagcagctgctgctttcattaaacagttaccttgagaagaaaagataggtgtcgagggctgagagctgtgctagagtttcagggtccgagttggcaggaactgaagtcccgatgctcctcagcccttggctgtcctcagggctgccctctgcgtggggacaccaggccgcccctgcccagggacaccaggccgcctgctcctgctctgtgcatctctcacatcaggctcctcacccagcattgtttgggctatgacagtggctgtgacaagaccctaagacgggaagctgcgtgcagggcacttgagggcccgctgaggagaagccgcctgtgagggacaggactgggcagggaaggccaccagccatgcggtcacagcccaggactccgccagtcctgcaggagccctggagccaggcccttgctgtccaggccacttgctgtacctggcccacagctacctcccctgcagccctgagtcctgcttgctgtgcccggctcaggctgagactgcagtgcttgtccattcaccatgaaagaaagaagaacaggaagggaggcaggaggaagtaagttagaggattaatccaaatgttccaactgtctaatgggagttccaacaagaagatatccagggaggaaattcacagtcaaatttccccaaaccaaaggtcatgagttttcaggttgaaagaacacccaaccaagaggagagaaaacagcattctaaatatcggaaggaaacgaaacctcgcctcaggcatgcgggctctgacgggcaggatggcggcacggagggctgctgtatccagtgaagtcagcagttcagatgaaacagataactcccttaaaagacacaaattgccaagactgacgcaaacactgaaacagactgaacagttctgagttaccaatttaaaactgcaaagcaaatagcaggcccaaaaggcttcactgataaattatctcaaacattgaaggcaaaaaataaaaccagacacagcaaa

SEQ ID NO: 10528 - DNA, 421 bp, Homo sapiens
ttggagttccggatatgacatggggccagcgggtcactgctgtggtgaccctccgagaaggacactcactgtcccacagggagctcaaagagtgggccaggttgaaagaacacccaaccaagaggagagaaaacagcattctaaatatcggaaggaaacgaaacctcgcctcaggcatgcgggctctgacgggcaggatggcggcacggagggctgctgtatccagtgaagtcagcagttcagatgaaacagataactcccttaaaagacacaaattgccaagactgacgcaaacactgaaacagactgaacagttctgagttaccaatttaaaactgcaaagcaaatagcaggcccaaaaggcttcactgataaattatctcaaacattgaaggcaaaaaataaaaccagacacagcaaa

SEQ ID NO: 10529 - DNA, 19299 bp, Homo sapiens
agcccctcctgccacacggattctggcataagccggcgggcacaggggacagccagggatggctggacacagctgaggatggccgaggccggcctgcagctccccaacggcctcctccgggtcaggatgagaggagaggttgccagctttgatgccagccgctcctgcctcccccacctgcctctgtgcctacagcccgcttctgcctcaagatcacacagcgggcttgtgaggccaggggtctccgctgctgctcaaggagatggcaaaggtctgtttcaggtaactcctctgacggccacaacgatgtcttcagacgtcaaaggtctgtctcaggtaactcctctgacggccacaacgatgtcttcagacgtcaaaggtctgtctcaggtaactcctctgacggccacaatgatctctgcagatgctctgactccacgtgccctcgctcagagacacacgcgcacatttgccacctggggcgagtggaaggtgacgtggaggtgggcacctctgccgggcagatgcgggagcagcagcagcagcagcccctcctgggggcatccaggggtcaggagaggggcggtagggcagggcggcatccctgcaggggtgaatggcgtcttaggctccagccgggtgaggaaacctgataaccgaactccttagagaagagccagggatcccgggaggaccaccaggagcttgtggggaaggactgaggggaagagccccaggtctcgggaggaccaccaggagctcacggggaaggattgaggggaagagccccgggtctcgggaggaccaccaggagctcacggggaaggattgaggggaagagccccaggtcccgggaggaccaccaggagctcacggggaaggattgaggggaagagccccaggtctcgggaggaccaccaggagctcacggggaaagattgaggggaagagccccaggtctcgggaggaccaccaggagctcacggggaaagattgaggggaagagccccaggtctcgggaggaccaccaggagctcgtggggaaggattgaggggaagagccccaggtcccgggaggaccaccaggagctcacggggaaggactgaggggaagagccccaggtcccaggaggaccaccaggagctcacagggaaggatggggagaggggagtggggggctggagaacccccagactgagaaattctgctcggagcgagaagggagctgggcccaggtggccccatcccccaaggttgaacatcagcccagcctcccaggccctccacgtgctcatgggcaccactgccgggcactagcttacttgtcaccctgtctgaggcgtgttggggtaggagcaagagtccgctgcttccagggcccagctggggctccatgtgtccctgggcaccccagaaccctctgggtctcagccgttgggttcttacatctgggccagtggcaaagggttaaagggaccttgtgacttagttgggactcactggcctcaagaagcgaaaatcagagggacagcagccccagccgccggggattccctgtggcgccagagctccccggcaggcactgtggaggccaagtggggaccggcagtgtcgtggtcccggcccacagcctctcagcctcccacagcctctccctgtggtaacgaggtggacgctgagccccaggcctgatggcacatttgaggtcaggtgggggcacctgggctgttcctgtagctgtcccctcgtccaggggagggaccttttcagaagccctggggcctttgtctcattgaccaaaaccctcctggccatgctgccttcacaggacactgggcatctctgtggggcaagggaaggaacacaggcctcctggtggggccccaagacccaaccaaggctcgtctggctggtgccagcctctgcgccaagggtgccgaccaaggtcagagccgatcgcggggatgacaggtgccgaaatggccatgcttgccccagcccctttcatccggcagagggacctcgctgggcctgccacgctcagccaggctgtgctgtgaagcccctctcttcccttctcagagccatatgtccacgctgacagctcctgagagggaccatgttttgctgcctgcaggtgccaagctgactgatgggccatgctgaggagggtgccccagccctcctgcaagatgcccttctgtgcagcctgcagggccaccaggcccacgaggcggccatggtcttcagatgtgtcttagcctgggttccctagaaaacacatgaggactctgggcagaggctgagtgtttttacatttttatttttaagccaaagttacacacctgtggcttaaacacccaagtagttgtagcagtttgagaagaagaatcacagccgtgccccttccccagactcgccggctgctgcttctgtgcggtccccgcatcccgagggccgccagcaccgccacctccaggctcctttttgctgccatggcttgagtcccgcagaggaggcccctcctcaggcacggcccggctcagtcccgtatggcatctgcactattgagactatggagtcgccgctgagaactgagcccaggagacactgaggtttttcctctttctttgttttccagagtcgggaaagtcttggttttcttggtctcctggtgccaattcctcgtgggctgggctggtctccccatggcgcctccttccccatcaccaccaccccttccctcctaccgggtcaggacgtcggctcccagcccacagcatcctcgtcttccctcttccgcccccagctgtggggactgctttcccctggggcttcctgaggcgggtgtgtagggtccgtacttggagacttgcgtgtctctccgggtcttcgttctgccctcagccttgcttgtcggtttggctgcgtatagggttcagggttagaagtcgcttctctatcattttctggccttcagatttgctgctgccacagccgtgctgaatcctggcacttggtgaccccctcctttttttttctgtttttttttttttttttttcgagacagagtcttgctctgtcgccagactggagtgcagtggcgccatctcggctcagtgcaacctccgccttccgggttcaagcaattctcctgcttcagcctcccgagagtagctgggattacaggcgcccaccaccacacctggctgatttttgtatttttagtagagacggggtttcaccatgttggccaggatggtctcgatctcctgacctcgtgatctccccacctcagcgtcccaaagtgctggaattacaggcatgagccaccgcacccaaccatgaccccctctttttaacgtacagggtgtcctctgtccccagacccctgagcccaggttgaggagccaccagctgaggacggagccaaggtcacggagctgccgggtgagcgctgagcccaggtcagggagttgggtctcaggccgtcactgggactccctctgccttcaagaagcctctttcacccttggcccacagaggagacctggatggcactggggtccaggtgcagaagcctccagtgtccacgggcacctgagcttccagcaccttccctcctgctgggcggtggcctgtgcctggccgcaatggaggccgccttccccactgcccctctgagcctcagtctgtcctccctgcagccacctcccctggccaggtgccccggggtaactggtggaggctttcacgtaacttggtttccagctgcctctgtacacacacaggcacctgttccaggcttggcctctctgtacacacacacgggcacctgttccaggcttggaggctgagaacttgggggcagagatctcagggcatcggcttgggcggggtccttgggcagggccttgggcttccctcggcactttcctcaaggactggggccaagcttcacattctgttgctggcatcagtgccatttgggagcaaaagtccgacaggctgggtctgggcctctcttcaccttgtttcctgggatcgcgctttgggtgctggtgtcactccagatccaggctcgggaaccacatctgcacagcagaacaggcgctgttcttatcttgcgtgcgggtcaggacatccccccggccaggagtgcttcctccgaggcccacagacaagttctcgctgggggactggggaccacagcacctcactccacctacactctagagaattcaaatctgagtattggaagatttattttcagttacagtggaaggcagagacatgaaatagcaccaaattcaaaagcagctcataaatccaggtaataggagtttattgattgctacattgtatctgtcagaagaaaactcctttaatgaacacatcaggccgaggacatacacagcccattggcagccgactccgattccagaatcgatgcattttgataaataggttgttatggaaagtaaaggttatttaacttgtttgacttgcatttcacagtgatcgcaagttgccctggagccctctgaaccttctgagtcgccctcgctgccgcaggacctcctcccgcggggtgtccgacccgctcttgcttggctgagactttgtttaaaccctggctccgatgcctctgagcccttgatagcagcgtcccagcctggaagaacaaaaccagccacttttccccttggcaaaggcacagcaaggcgggtgaggcgggcgctgagtagtctgggaatgggcagggagatgtcgaccctcggagctgagactgctctgtgctgagaagctagaacaaagcctgacatgttccaaggggcaagctcagggctgggagggaagcagcggggccgcccctttgggtgggggtgcccaggccttgcagacaagacactggccagaggaggtggagcaggggtactggggcagaggggccatgtttgtgcagcaggatggaccctggagggccccggcctagagggggcctttgccaggaagatgccaggaacgtccaggccaaggcgtccgggcaaaggcatccaggcccgggagacgcatgtgggacttgggctttcctctgtgggcagtgggaagtctctccctacccctggaaggagctccaggcagcagtgaggatggggattctgacactggagtggggagccggccctgtggtgctggctgggctgagagcggcaccaccttctgatgcccagggtgggaaggacacacgactgccaccatgcactgagggccctgcacgccacacacgtgctctgagcactgagggtcccctcatgccacgcacaagttctgggcacagaagcacctctcagaatcatccccgagacaggcgtccatcacagagacaggtctcagtcctgcactgattggcttcgcccagtgctgctgggggagtctcagacacagcctttttccgacaggtatagctgccactttctccggcacagaagcctggggccctgggaatggcaccatgttgcgcgccgacccctacggttcttccctccgcatggctcagtggaaaccgtgcgtgcagcacagcaggcagctggggcctgtgacgaccctggggttggaggccaggcagggctatcactgagaagcagggatttggggcctggggcccagggaatggacaactccccaagctgcccccaccagtccttcctgagcactggctctggaagaagcatctcggggcagaggcagccaggcccaggcagggagagacccccaaacaaggcctacagcagggtctcagggcctgaccatgccagaaacagcccagagccagagaggatgggcagatactcagtgccaccactcctgggagatctcagcaccagggcttcgacctctggggatacacacccacacctgctgagatataacacatctgcagagacacagccacgcctgcagagacatacccacacctgcagacacacccacacctgcagacacacccacacctgcagacacacccacacctgcagagacacagccacacctgcagacacacccacacctgcagacacctacacctgcaggcacacccacacctgcagacagagccacacctgcagagacaccctcacctgcagagatacaggcacacctgcagagacacagccacacctatagacacacccacacctgcagagacacacccacacctacagagacacccacacctgcagacacacccacacctgcagacacacccacacctaaggagacggggtctcgcagtgggcggagaggttgggtcttgcatctaatcagccattgatgggcctctcctgtgaagggcactcattccttgtattcataaattaagctcatgtgagtttgttctttaacaagttattgcgcgatcataatccattgccgacgttggcgtgactcaccatgtcatgagcccactcggggctggtgctgctggagatggggaagaaaattgctccataaaccaaaaagcaacattttaaaacttataaaaaagattcgcaggaaattagaaataacacacaggggttccttgtgccgtccccccagtttctcccagcatcagcctggtgtgtaacggtggtacatcctcagtgccgtgcgtagctttggtgcagtctcagccccgtgcgtagctgtggtgcagcctcagccccgtgagtaactgtggtgcatccttggagccaggacacaggcagctcaagagggtgccggggacttgtcagccttgggggcaggcagtgatggcctctccggcaggaccagagcagggcagtggctccatgctgcgctgggtctctgggtggtgcaggccagggtggagccaggccagaagctgtatggagggccctgagcacctggcagcctccctggtgtcagcagctgtggcatccgtggggcaggagcagcctggacggggtggctcggtgcgattaagagatgctattggaagattggtggctgtctggtccagaggggacacacaagccaggctgcacagcaggagcaggagccatggcgggtcccacgggacttgggacaggctgtgtccaaccccgcccacagcccaacctgcacacccccttccagccgcccagactaccccaggggcgcagtgagaccactctcctgtcggggagcctctggtttttctgctacccatcagcacagagttccagagttccagagctccataaataagcctggagcccacctgggcacacccatccgtcttgtttaatagactgaggagcacgccatgggtctcaaggagtggtgaggtggatggatggggcctttctgcgtccaacagcatgatgtataatgaagtatttatgatttattccagctaataacccatgtggagtgcagggtatgtggaagcagacagttgaggcctcagcactgcccttacatgccctgcatgctcccacagccacggcacacatgtgtgcgtgcacatgctcacagtcacgcataccgcgccctcccagctgcacacacgctcgcaggcacgcacactatgggcccatgcgtcatgagacagcttcgggctgggagtacaggctctgaggctgcagcccgctcttcccgactccccaccctcagtggctggtggtgtctgtgttgagctactcgagaaaggaagaaaacgaaggaagcttggttcccacaggagctccaggaactgcacggggaggagcaagggccacgtcgtggctttgccttaggaaggaaaacgtggggcagccccggccattgttctaggaccagcatggtcaggtgtggagggcacaagatgggcaccagcaggaggctccaggcacccaggaaaggccctgtcctcctcagccaccagcccctccctgtggcctctgcgtgggccttggtgcctctcccatccagaggggctgggcattcactgctggagcccaccgtggtgggatgttgtaatgtgtctggttcacttcttttactgaatatttggcctggattcttttgtgggcctgagagaaatggcaggacagggcctggtgggcctcggcccctctcccagagcagcctgcctgcatgaggggcggcccctctatgctgcagtcccaggggctccgtctgggggcccttgcagcagtagcagcacagccaggaggcccagcacaccctggcacccatcctgagggagggtaaagcatcagaccctgtgcttgttgctcagaaaaggccacgcatcccacccatggccagtggttatcaatcactgtcacagaaacagggcctgagccggcttcctaatgcagggtgtctgcagaccacaggcccagcagggcttctggcacctcctgctcctggcaggctctggacccactgctgacctgcccctggaggaagtgcatacagctgagcatggggaagggaccccacaggaagggcagaccccacatcatgggcacagtcccaccttgggacgcacgtcgtgaccaccaggaatgtgggcttacctggcatagctgtttctccgttggggttgccacagggtagtaaccagagccccctttcctcagaggacaccgtggtgtttaaggacggccagttaaccagagccccttttcctcaggggacaccgtggtgtttaaggatggccagttaaccagagccccttttcctcaggggacaccgtggtgtttaaggatggccagtactggatccgaggccggacctcagtggacatcatcaagactggaggctacaaggtcagcgccctggaggtggagtggcacctgctggcccaccccagcatcacaggtgcgtggccggacttgggccagggaggccaggctagacgggtgctgccttccatgtttgagttttagacgactgcagatgagtcgacgccgtcccagctgcctgcaggggtccctgtgatgctcacctctggtccctgccctggccagggaacatggggctagtgggggtgcagcctgctcggtgttggagccactgaccccgtgcccaccagagctcccaggcctggccgggcgcagctcccatctgcatgattcccctgcaggaaggtggcagggagagtgcagagagccaaggggcgggaaggcagagcccctgtgagtgcccagtccccagatccaccgtggggagcccgtcctcactcccctccccacaggcccagccagcaccaggacgagtgattggagtggggcctgtccaaggacgggctccagggctgcggccagactgcgctcttcctgtgtgtccaggcactcttcggcctgtaagggtcactgaggcatccccatgttctcaaactgttcttctatccgcagatgtggctgtgattggagttccggatatgacatggggccagcgggtcactgctgtggtgaccctccgagaaggacactcactgtcccacagggagctcaaagagtgggccaggtagggctgggtggggcgggcagggagcactcatggggtcttgggggtccagtcttgagggccaccctaggtattggcatcgtccgtcttagaggtggagatgagggatcaagaaagaccagcagtgagggtccttagagacctgaaggccgcacacagcaggtagagacgagggcagggggcaggagccgtgctcagatttgacttggtggcaatattccgagggggcagaaactcacattcctgggacagggccctgtacggcctgtggtgggttccgtcctggtcccaggagagatcccggatgagccaggccaggcccatgcaggaggtgcatggagctgagatccagggttgacaccagctggccgcacgcgctgggcccttccccgccaggccacaggcagcctgtccacctgccgccccaaagccagtgctgggccccagcagaactgcaaggcccacccattctccgtcggcacctgcacggcctctccctctcctgccctgggggtgggtcctgaaggtgcctcacacacctccagtcagttccacggagaccccagcaccatcaccatcccctcagtcatttcactttcccctccatgtccagggcagggcctgttcctcagcggtggccaccacccagtccttaaactcacctgcattttttgttttgcctttaccttacccagaacctttccccaaggactttctcccacctgtctcacccccagtggtttctgatgcatgggatccacagaccctccacttttgccagcagtggtggtggtcacgcccagggctgaacctgagctatggccttgtcaaaggccgtcaggacggaagggtatcccataggaccgtcagggcagagccaggctgagctcagaaaggaagcttttagtttcacctacagtaatttcttttgtttttttaatttataaagaaacggggtataattggctcatggttccacaggctatacaggaagcgtggctggggaggcctcaggaaacttacagtcatggcagaaggcaaaggggaaacaggcacatcctacatggccggagcaggagggaggagggaggagccacagagtgagtgagggaggagggagggtccacagagggagggagggtccacagagtgagtgagagaggagggagggtccacagagtgagtgagggaggagggaggggtcacagagtgagtgagggaggagggaggggccacagtgtgagtgagggaggagggaggggtcacagagtgagcaagggggggaggggccacagagtgagcgggggaggggccacagagtgagtgagggaggagggaggggtcacagagtgagtgagggaggagggaggggtcacagagtgagtgagggaggagggaggggtcacagagtgagtgagggaggagggagggtccacagagtgagtgagggaggagggaggggtcacagagtgagcggggggggggggaggggccacagagcgaggagggggtgggaggagccacagagcgatgggagagggaggtgccacgcactctcaaacatgcaggtcttgtgagaactcactcactagcacgagaacagcaaggggaaaatccacccctgtgatgcagtcacctcccaccaggtcgctcctccaacagcggggatcacaattcaacatgagatttgggtggggacacagatccaaaccatatcgttcctccctggcccctcccaaatcttacgtcctttttacattgcaaaatacaatcctacttcccaacagtcccccaagtcttcactcatttcagcattaattcagaagtccacagtccaaagtctcgtctgagacaaggcaagtccttttcacctatgagcctgtaaaatcaaagacaagttacttcccagatacagtgggggtgcaggcattgggtaaatacaccagtgccaaaagagagccgccagccaaaacaaaggggctgcgagccccaggcaggtccaaaacctagcaaggcagtcactgaattgttttttggtttcttcttttttggtttttttttttttttttttttgagacggggtcttgctctgatgcccaggctggagtgcagtggcatgatctcagcttactatagcctctgcctgcaagcaattctcctacctcagcctccctaagtagctgggactataggcatgcaccaccacacccagctaatttttgtattttttagtagagatggggttttgccatgttgtccaggctggtctcgaactcctgacctcaagtgatccacctgcctcagattcccaaaatgctggaattacaggcgtgagcaaccccacccagcccaataaatcttaaagccccaaaataatctcctaagacccatgtctcacatccaggctacactgatgcatggaggtggctcccaaggccatgggtatctctgctcctgtggctctgtagggtacagcccccatgctgctttcataggctgctgttgtgtgcctgcaacttttctaggtgcaccacacagtgcaagctgtcggtgggttattctggggtctggagaacggtggccctcttctcacagctgcagtagccagggccccactggggactctgtgtgggggctccaaccccatctttctcctcttcactgccctggagcagtggcctgagctctatctggagcccttttagccccagagcaacagggatgcaggggccagtgtccctcagggcagtggcccacaaaaccattcttccctccgaggcctccaggcctatgatgagaggcacttccatgaaggtctctgacacgcctagagacattttcctcattgtcttggcgattaatattcagctcctctttacttacgcacatttctgcagccagcttgaattcctccccagaaaattgtttgtttgtttgttttctaccatgtgatcaggctgcaaattttccaaattttatgctctgcttaccttttaaatctaagttccggtttcaggtcatctctttgctcatgcttaacaaaagcaatctttgctccagttcccaataagttcctcatctccctccgagtctacctcagcctggacttcattgtccatatcgctattagcattttagtcacaacaatttaacaagtctttaggaagttccaaactttccctcatcttcctgtcttcttccgagctctccaaatcgttccagcctctgcctgttacccagttccaaagctgcttccacatttccagatgtcttaacagcagtgccccacttccctgtaccagttttctgtgttagtccagtcttgcattgctataaatgaagccagatttttctcagccactttgccaaccggggacctccgtggctggtgacacccccaacccaggcctgccacagaaggcacccacacactcgacccactgggccatgcttggcttatgcactggctcagcccacctgtgttatagcttatacctgcattcatcggttcccaagttcttgtcccgcgtccaagaagaatgaggttacactgacaattcaaagggtgaggagagtggagaagaattttattgagcaatgaaacagctctcagcggagagggtatgcgagggtgctgaaccgcccagagttgggtgtggctgggtctagggcttttctgggcacagaatggggaggggcaggctgtaggtagcactggaaaaggtaacctttggttggttaaaaagcattattcagaaagaaccagtgggaaagagtgggcaaacaggaatagaagttctcactccaggctgcaggtttcaggctgtttttggcttgaaggtggggtttcaccagggacccacccctgtctatctgggcatttgactgcttcctgttgctttcataaggaactacccaagatggtaatttataaagaaaagaggtttaagtggctcacagttccacaggctataaggaagcatggctggggaggcctcaggaaacttacagtcatgacagaaggggaggcaggcatgtcccacatggtggagcaggaggaagagctcacctacagcaaattatttaagaccgagcatttgtctctgttctgttccctctctggacgcaccctcctgcctccaccctgacttgccgtctcctgagcactgaagatatttttggcttgtccgatgtgactccacagacagcagaaacgcttgcttgatcagggcagcatcagggcaccacacatgcctgggcttgcacaacacagcgggagcactgccactcagcagcagctgctgctttcattaaacagttaccttgagaagaaaagataggtgtcgagggctgagagctgtgctagagtttcagggtccgagttggcaggaactgaagtcccgatgctcctcagcccttggctgtcctcagggctgccctctgcgtggggacaccaggccgcccctgcccagggacaccaggccgcctgctcctgctctgtgcatctctcacatcaggctcctcacccagcattgtttgggctatgacagtggctgtgacaagaccctaagacgggaagctgcgtgcagggcacttgagggcccgctgaggagaagccgcctgtgagggacaggactgggcagggaaggccaccagccatgcggtcacagcccaggactccgccagtcctgcaggagccctggagccaggcccttgctgtccaggccacttgctgtacctggcccacagctacctcccctgcagccctgagtcctgcttgctgtgcccggctcaggctgagactgcagtgcttgtccattcaccatgaaagaaagaagaacaggaagggaggcaggaggaagtaagttagaggattaatccaaatgttccaactgtctaatgggagttccaacaagaagatatccagggaggaaattcacagtcaaatttccccaaaccaaaggtcatgagttttcaggttgaaagaacacccaaccaagaggagagaaaacagcattctaaatatcggaaggaaacgaaacctcgcctcaggcatgcgggctctgacgggcaggatggcggcacggagggctgctgtatccagtgaagtcagcagttcagatgaaacagataactcccttaaaagacacaaattgccaagactgacgcaaacactgaaacagactgaacagttctgagttaccaatttaaaactgcaaagcaaatagcaggcccaaaaggcttcactgataaattatctcaaacattgaaggcaaaaaataaaaccagacacagcaaagtaagtctctgatgaaacagagtggggaggaacacttcctaactccccgtatgggaccagcactaccctgaaatcaaaaccagacaagaaaacgagaggacagtgttcccaatgggcagacacacaaaatcctaaacaaaacgttagcaaattaaatccagttaatgcacaaaaagacaacacgtcatgatcaagcagcatttaagccaggaatagagggttactttcatattcaaaaatcagtctgtgtaattcaccatatattttttttttttttggatggagtctcgctctgtcgcccaggctggagtgcagtggcacgatctccgctcactgcaacctccagctcccaggttcaagtgattctcctgcctcagcctcctgagtagctgggattacaggtgcgcaccaccatgcacagctaatttttgtatttttattagagacggggtttcaccgtgttggccaagctggtctcgaactcctgacttcaagtaatcctcccgcctcggcctcccgaagtcctggaattacaagcgtgagccactggtaattcaccatatttacagaatgaagaagaaagatcatatcatttcaatagatacagaaaaagcatttgcaaatgtcaaaacccttttataacaagcactcttagcaaactaggagaagaaggaaaatccttgaacctgatgagggagtctctcaaaagctaccagatgacatcctgctcgatggggagctgctgggcgttttcctcctgtgaccaggaaggggcgcctgccctcaccactgccacccagtctcattcaacacagagtttgtcccctgttagaaaccgagacgttggttacacgtggaggttgggagtggctcaggcaggcagaggggcttctgggaacctggccatgttccctttcagtctgggcgctacttagagcagggggcagttgcttcaataaaactttagattcccacacaggccaggcgtggtgctcacacctgtaatcccagcactttgggaggccgaggtgggcagatcacctgacgtcaggagttggagaccatcctggccaacatggtgaaaccccgtctctattaaaaatacaaaaattagccaggcatggtggtatgcgcctgtagtcccagctagttaggaggctgaggcaggagaatcgcttgaacccgggaggcggaggttgcggcaagccgagactgcaccactgcaatccagcctgggcgacagggcaagcctctgtctcaaaagaaaaaaaaatctacacatccctcaccacactgtacataggacagctgggtgtaaattacatctccatttaaatgcctgtcatagttttatacaactataaaatatatacgtgccaaaataaatttgataggaacattggaaccaggtaaggtgacgcatacctgtagcacttcgggaggatcctttgagcccaggaagtcgaggcttcagtgagccatgactgcaccactgcactctggcccaggcaacagtgagatcctgtcctagaaagaaaagagaaaaaaagaaaaatgcgatttggaaatgtggaggtcgaggttgacagcgacaccgaggtcgaagccagttgcccctggagagcgagagactgggctgggccgactcccacctctgtcgcgagaggcctacgggcaggggcaggtgggcagggggactgtgctgggtctctggccgcgtctggacggcaggcgacactttctccacaaaaagcgtcaagaaaccacgacacttggtttctggacttttccgcggaacagtaaccagaacaatcgccatgaaggttcgtttctgtcatggctcagtgcagcctggacgccctggaccagcccctcctgcgcctgggccacggccgctgccttcagggcatcactggtgggcggcacaaccatcctccctttggggggttaatttcatttctttcctcccttctttaatggtgaatggaggagcaccgagcaccactgcagtctcagtttcagatcccagcgcctcgtccctgcccactgccctcggccccgcccgcctgcattggcagtgccctggccccacccacccgtgtcagcaccgcccaccgccctggcaccacccaccgagttctcgcccatgaggaagggggaccctgagtggaggtttcaaaccttaggggccgtccctgccgtgcagggctctgtgaggcctcttgccacataggcttgtgtctgcaggactgtgcggcatttactcccatctcaaataccccatacagggcagactgcccctgccccacctgcccacccactccccagcctcttccgcacgcctcctctggaaggggaacgggccacagagtgaaatggggccttccagctccagtgcggggacttggaaggcctggcccggtgtgggggcccctctgccctgcaggccactctgtgcaggcctatcctcaggtgtgccctcgcccaaggcctgcacgcaccatggcttctgtggtaccagtgataacaccatgccgggcacctcctgcagtcaccacccctgggctgctagggcagagacagctgcggtggcccggtgcacctgcctggcctcaggatggccgaggcgcctggcaaggctgcagggtcccaggggcacctgtccgtactgctgggcgcctgagttcctcctgctgggcactgtcagggcagtgcgcctcaggctgtgcttgtctctgcagaaatgtcctggccccgtacgcggtgccctcggagctggtgctggtggaggagatcccgcggaaccagatgggcaagattgacaagaaggcgctcatcaggcacttccacccctcatgacccggcagactgggactgcgggtctggtggggagcagcagacgtccccttcacaccgagaaccacgggggcccgtccaagacctggcctcccttaaacctgaaccccccaaatcaggtcacgtagaatcaagaactgtttgggatgaaatcaccatgtggggtccccagcctcgggccagttgttgcagctcaaggagaccgtccctggtgtcacctctgcctggtcaccgccgacctcatctgtgcagcgcggtgcagccagcccctggccccacgtgctgaggcacctcccgccccacagtgccctgcagttgccaggctctccagggcaggtcccagaggtttcccacaaaaaacaaagactccactggaggaaacaagcccctgtcccacgccgtctgcacgtgcctgtgcctcacccagagccagtgtctcccggcccacataggaggtctgggcagccacccagggggccctcctgggaggagctgagggttcacaagcctcccagaaccagccctgtcccatgggttccgtgcatttcctggtgctgctcttggaggagagcagctcccactgtggggacacctgccaccctgcacactactgtgtgtccatcagcatgtgtcacagaaagtgcgtggacggatggccccggagctgctctgccgtgaccctgcctcaccccccagcgcagggactttccaggtcatctccacaccagcccctcagccggtgaaccctctctcccatcaccgtctccacccagacccccacctgccccatggcccccatttcatgtctgtggctcaccagcttttccccagacccagctccggagcccacaggcgtggccgatgcagaaacctcaggaaggtgtgttgtgaatgttgggtgcacccacgttgcatttacttagcggggccaattcagatgcacaggggccacatgcagaatccagaagtttctggacaattttcagaagaataggctgcctcctccccacagcctgggggaagtaacagtcatcgcccagcagtgtctggcctgaacttacccagaacattctgcccccggaatgcacgtctgaaagagtggccagaaacgagtgtgccgggcaggaggccagccccatctcaggctcacgtgcctctgacaggagaccagccccatctcaggctcacatgcctcgcggacagttggacgtggcctggggcccctgctcacttgagcatgtcgcccaccaagcttgtctgaggccacagagcagcgtcccagccctgttttccaggactggtgggtgccccagtccacggccctgccccacccgaactcctgcctcacggtgtggccttgtgcatccccatggcctgaccccgggaacagtcagaggaaggggtcccgccctcccgccagaggcctggacccaagggaacggcagtcagagactacagtccagacgtttgtgtctaggccttgctggtagctaaggaaatgccttctgttgggaaaaggtcaaatttaacatagcaaaatttttacttaattccactaattttacatttgcatctctctcctttaatcctgaaacttttgattcctaaaaagcttacataatcatttgctttatccgatagt

SEQ ID NO: 10530 - DNA, 2496 bp, Homo sapiens
agcccctcctgccacacggattctggcataagccggcgggcacaggggacagccagggatggctggacacagctgaggatggccgaggccggcctgcagctccccaacggcctcctccgggtcaggatgagaggagaggttgccagctttgatgccagccgctcctgcctcccccacctgcctctgtgcctacagcccgcttctgcctcaagatcacacagcgggcttgtgaggccaggggtctccgctgctgctcaaggagatggcaaaggtctgtttcagtgatcgcaagttgccctggagccctctgaaccttctgagtcgccctcgctgccgcaggacctcctcccgcggggtgtccgacccgctcttgcttggctgagactttgtttaaaccctggctccgatgcctctgagcccttgatagcagcgtcccagcctggaagaacaaaaccagccacttttccccttggcaaaggcacagcaaggcgggggacaccgtggtgtttaaggatggccagtactggatccgaggccggacctcagtggacatcatcaagactggaggctacaaggtcagcgccctggaggtggagtggcacctgctggcccaccccagcatcacagatgtggctgtgattggagttccggatatgacatggggccagcgggtcactgctgtggtgaccctccgagaaggacactcactgtcccacagggagctcaaagagtgggccagaaatgtcctggccccgtacgcggtgccctcggagctggtgctggtggaggagatcccgcggaaccagatgggcaagattgacaagaaggcgctcatcaggcacttccacccctcatgacccggcagactgggactgcgggtctggtggggagcagcagacgtccccttcacaccgagaaccacgggggcccgtccaagacctggcctcccttaaacctgaaccccccaaatcaggtcacgtagaatcaagaactgtttgggatgaaatcaccatgtggggtccccagcctcgggccagttgttgcagctcaaggagaccgtccctggtgtcacctctgcctggtcaccgccgacctcatctgtgcagcgcggtgcagccagcccctggccccacgtgctgaggcacctcccgccccacagtgccctgcagttgccaggctctccagggcaggtcccagaggtttcccacaaaaaacaaagactccactggaggaaacaagcccctgtcccacgccgtctgcacgtgcctgtgcctcacccagagccagtgtctcccggcccacataggaggtctgggcagccacccagggggccctcctgggaggagctgagggttcacaagcctcccagaaccagccctgtcccatgggttccgtgcatttcctggtgctgctcttggaggagagcagctcccactgtggggacacctgccaccctgcacactactgtgtgtccatcagcatgtgtcacagaaagtgcgtggacggatggccccggagctgctctgccgtgaccctgcctcaccccccagcgcagggactttccaggtcatctccacaccagcccctcagccggtgaaccctctctcccatcaccgtctccacccagacccccacctgccccatggcccccatttcatgtctgtggctcaccagcttttccccagacccagctccggagcccacaggcgtggccgatgcagaaacctcaggaaggtgtgttgtgaatgttgggtgcacccacgttgcatttacttagcggggccaattcagatgcacaggggccacatgcagaatccagaagtttctggacaattttcagaagaataggctgcctcctccccacagcctgggggaagtaacagtcatcgcccagcagtgtctggcctgaacttacccagaacattctgcccccggaatgcacgtctgaaagagtggccagaaacgagtgtgccgggcaggaggccagccccatctcaggctcacgtgcctctgacaggagaccagccccatctcaggctcacatgcctcgcggacagttggacgtggcctggggcccctgctcacttgagcatgtcgcccaccaagcttgtctgaggccacagagcagcgtcccagccctgttttccaggactggtgggtgccccagtccacggccctgccccacccgaactcctgcctcacggtgtggccttgtgcatccccatggcctgaccccgggaacagtcagaggaaggggtcccgccctcccgccagaggcctggacccaagggaacggcagtcagagactacagtccagacgtttgtgtctaggccttgctggtagctaaggaaatgccttctgttgggaaaaggtcaaatttaacatagcaaaatttttacttaattccactaattttacatttgcatctctctcctttaatcctgaaacttttgattcctaaaaagcttacataatcatttgctttatccgatagt

SEQ ID NO: 10531 - DNA, 9424 bp, Homo sapiens
aggacaccgtggtgtttaaggacggccagttaaccagagccccttttcctcaggggacaccgtggtgtttaaggatggccagttaaccagagccccttttcctcaggggacaccgtggtgtttaaggatggccagtactggatccgaggccggacctcagtggacatcatcaagactggaggctacaaggtcagcgccctggaggtggagtggcacctgctggcccaccccagcatcacaggtgcgtggccggacttgggccagggaggccaggctagacgggtgctgccttccatgtttgagttttagacgactgcagatgagtcgacgccgtcccagctgcctgcaggggtccctgtgatgctcacctctggtccctgccctggccagggaacatggggctagtgggggtgcagcctgctcggtgttggagccactgaccccgtgcccaccagagctcccaggcctggccgggcgcagctcccatctgcatgattcccctgcaggaaggtggcagggagagtgcagagagccaaggggcgggaaggcagagcccctgtgagtgcccagtccccagatccaccgtggggagcccgtcctcactcccctccccacaggcccagccagcaccaggacgagtgattggagtggggcctgtccaaggacgggctccagggctgcggccagactgcgctcttcctgtgtgtccaggcactcttcggcctgtaagggtcactgaggcatccccatgttctcaaactgttcttctatccgcagatgtggctgtgattggagttccggatatgacatggggccagcgggtcactgctgtggtgaccctccgagaaggacactcactgtcccacagggagctcaaagagtgggccaggtagggctgggtggggcgggcagggagcactcatggggtcttgggggtccagtcttgagggccaccctaggtattggcatcgtccgtcttagaggtggagatgagggatcaagaaagaccagcagtgagggtccttagagacctgaaggccgcacacagcaggtagagacgagggcagggggcaggagccgtgctcagatttgacttggtggcaatattccgagggggcagaaactcacattcctgggacagggccctgtacggcctgtggtgggttccgtcctggtcccaggagagatcccggatgagccaggccaggcccatgcaggaggtgcatggagctgagatccagggttgacaccagctggccgcacgcgctgggcccttccccgccaggccacaggcagcctgtccacctgccgccccaaagccagtgctgggccccagcagaactgcaaggcccacccattctccgtcggcacctgcacggcctctccctctcctgccctgggggtgggtcctgaaggtgcctcacacacctccagtcagttccacggagaccccagcaccatcaccatcccctcagtcatttcactttcccctccatgtccagggcagggcctgttcctcagcggtggccaccacccagtccttaaactcacctgcattttttgttttgcctttaccttacccagaacctttccccaaggactttctcccacctgtctcacccccagtggtttctgatgcatgggatccacagaccctccacttttgccagcagtggtggtggtcacgcccagggctgaacctgagctatggccttgtcaaaggccgtcaggacggaagggtatcccataggaccgtcagggcagagccaggctgagctcagaaaggaagcttttagtttcacctacagtaatttcttttgtttttttaatttataaagaaacggggtataattggctcatggttccacaggctatacaggaagcgtggctggggaggcctcaggaaacttacagtcatggcagaaggcaaaggggaaacaggcacatcctacatggccggagcaggagggaggagggaggagccacagagtgagtgagggaggagggagggtccacagagggagggagggtccacagagtgagtgagagaggagggagggtccacagagtgagtgagggaggagggaggggtcacagagtgagtgagggaggagggaggggccacagtgtgagtgagggaggagggaggggtcacagagtgagcaagggggggaggggccacagagtgagcgggggaggggccacagagtgagtgagggaggagggaggggtcacagagtgagtgagggaggagggaggggtcacagagtgagtgagggaggagggaggggtcacagagtgagtgagggaggagggagggtccacagagtgagtgagggaggagggaggggtcacagagtgagcggggggggggggaggggccacagagcgaggagggggtgggaggagccacagagcgatgggagagggaggtgccacgcactctcaaacatgcaggtcttgtgagaactcactcactagcacgagaacagcaaggggaaaatccacccctgtgatgcagtcacctcccaccaggtcgctcctccaacagcggggatcacaattcaacatgagatttgggtggggacacagatccaaaccatatcgttcctccctggcccctcccaaatcttacgtcctttttacattgcaaaatacaatcctacttcccaacagtcccccaagtcttcactcatttcagcattaattcagaagtccacagtccaaagtctcgtctgagacaaggcaagtccttttcacctatgagcctgtaaaatcaaagacaagttacttcccagatacagtgggggtgcaggcattgggtaaatacaccagtgccaaaagagagccgccagccaaaacaaaggggctgcgagccccaggcaggtccaaaacctagcaaggcagtcactgaattgttttttggtttcttcttttttggtttttttttttttttttttttgagacggggtcttgctctgatgcccaggctggagtgcagtggcatgatctcagcttactatagcctctgcctgcaagcaattctcctacctcagcctccctaagtagctgggactataggcatgcaccaccacacccagctaatttttgtattttttagtagagatggggttttgccatgttgtccaggctggtctcgaactcctgacctcaagtgatccacctgcctcagattcccaaaatgctggaattacaggcgtgagcaaccccacccagcccaataaatcttaaagccccaaaataatctcctaagacccatgtctcacatccaggctacactgatgcatggaggtggctcccaaggccatgggtatctctgctcctgtggctctgtagggtacagcccccatgctgctttcataggctgctgttgtgtgcctgcaacttttctaggtgcaccacacagtgcaagctgtcggtgggttattctggggtctggagaacggtggccctcttctcacagctgcagtagccagggccccactggggactctgtgtgggggctccaaccccatctttctcctcttcactgccctggagcagtggcctgagctctatctggagcccttttagccccagagcaacagggatgcaggggccagtgtccctcagggcagtggcccacaaaaccattcttccctccgaggcctccaggcctatgatgagaggcacttccatgaaggtctctgacacgcctagagacattttcctcattgtcttggcgattaatattcagctcctctttacttacgcacatttctgcagccagcttgaattcctccccagaaaattgtttgtttgtttgttttctaccatgtgatcaggctgcaaattttccaaattttatgctctgcttaccttttaaatctaagttccggtttcaggtcatctctttgctcatgcttaacaaaagcaatctttgctccagttcccaataagttcctcatctccctccgagtctacctcagcctggacttcattgtccatatcgctattagcattttagtcacaacaatttaacaagtctttaggaagttccaaactttccctcatcttcctgtcttcttccgagctctccaaatcgttccagcctctgcctgttacccagttccaaagctgcttccacatttccagatgtcttaacagcagtgccccacttccctgtaccagttttctgtgttagtccagtcttgcattgctataaatgaagccagatttttctcagccactttgccaaccggggacctccgtggctggtgacacccccaacccaggcctgccacagaaggcacccacacactcgacccactgggccatgcttggcttatgcactggctcagcccacctgtgttatagcttatacctgcattcatcggttcccaagttcttgtcccgcgtccaagaagaatgaggttacactgacaattcaaagggtgaggagagtggagaagaattttattgagcaatgaaacagctctcagcggagagggtatgcgagggtgctgaaccgcccagagttgggtgtggctgggtctagggcttttctgggcacagaatggggaggggcaggctgtaggtagcactggaaaaggtaacctttggttggttaaaaagcattattcagaaagaaccagtgggaaagagtgggcaaacaggaatagaagttctcactccaggctgcaggtttcaggctgtttttggcttgaaggtggggtttcaccagggacccacccctgtctatctgggcatttgactgcttcctgttgctttcataaggaactacccaagatggtaatttataaagaaaagaggtttaagtggctcacagttccacaggctataaggaagcatggctggggaggcctcaggaaacttacagtcatgacagaaggggaggcaggcatgtcccacatggtggagcaggaggaagagctcacctacagcaaattatttaagaccgagcatttgtctctgttctgttccctctctggacgcaccctcctgcctccaccctgacttgccgtctcctgagcactgaagatatttttggcttgtccgatgtgactccacagacagcagaaacgcttgcttgatcagggcagcatcagggcaccacacatgcctgggcttgcacaacacagcgggagcactgccactcagcagcagctgctgctttcattaaacagttaccttgagaagaaaagataggtgtcgagggctgagagctgtgctagagtttcagggtccgagttggcaggaactgaagtcccgatgctcctcagcccttggctgtcctcagggctgccctctgcgtggggacaccaggccgcccctgcccagggacaccaggccgcctgctcctgctctgtgcatctctcacatcaggctcctcacccagcattgtttgggctatgacagtggctgtgacaagaccctaagacgggaagctgcgtgcagggcacttgagggcccgctgaggagaagccgcctgtgagggacaggactgggcagggaaggccaccagccatgcggtcacagcccaggactccgccagtcctgcaggagccctggagccaggcccttgctgtccaggccacttgctgtacctggcccacagctacctcccctgcagccctgagtcctgcttgctgtgcccggctcaggctgagactgcagtgcttgtccattcaccatgaaagaaagaagaacaggaagggaggcaggaggaagtaagttagaggattaatccaaatgttccaactgtctaatgggagttccaacaagaagatatccagggaggaaattcacagtcaaatttccccaaaccaaaggtcatgagttttcaggttgaaagaacacccaaccaagaggagagaaaacagcattctaaatatcggaaggaaacgaaacctcgcctcaggcatgcgggctctgacgggcaggatggcggcacggagggctgctgtatccagtgaagtcagcagttcagatgaaacagataactcccttaaaagacacaaattgccaagactgacgcaaacactgaaacagactgaacagttctgagttaccaatttaaaactgcaaagcaaatagcaggcccaaaaggcttcactgataaattatctcaaacattgaaggcaaaaaataaaaccagacacagcaaagtaagtctctgatgaaacagagtggggaggaacacttcctaactccccgtatgggaccagcactaccctgaaatcaaaaccagacaagaaaacgagaggacagtgttcccaatgggcagacacacaaaatcctaaacaaaacgttagcaaattaaatccagttaatgcacaaaaagacaacacgtcatgatcaagcagcatttaagccaggaatagagggttactttcatattcaaaaatcagtctgtgtaattcaccatatattttttttttttttggatggagtctcgctctgtcgcccaggctggagtgcagtggcacgatctccgctcactgcaacctccagctcccaggttcaagtgattctcctgcctcagcctcctgagtagctgggattacaggtgcgcaccaccatgcacagctaatttttgtatttttattagagacggggtttcaccgtgttggccaagctggtctcgaactcctgacttcaagtaatcctcccgcctcggcctcccgaagtcctggaattacaagcgtgagccactggtaattcaccatatttacagaatgaagaagaaagatcatatcatttcaatagatacagaaaaagcatttgcaaatgtcaaaacccttttataacaagcactcttagcaaactaggagaagaaggaaaatccttgaacctgatgagggagtctctcaaaagctaccagatgacatcctgctcgatggggagctgctgggcgttttcctcctgtgaccaggaaggggcgcctgccctcaccactgccacccagtctcattcaacacagagtttgtcccctgttagaaaccgagacgttggttacacgtggaggttgggagtggctcaggcaggcagaggggcttctgggaacctggccatgttccctttcagtctgggcgctacttagagcagggggcagttgcttcaataaaactttagattcccacacaggccaggcgtggtgctcacacctgtaatcccagcactttgggaggccgaggtgggcagatcacctgacgtcaggagttggagaccatcctggccaacatggtgaaaccccgtctctattaaaaatacaaaaattagccaggcatggtggtatgcgcctgtagtcccagctagttaggaggctgaggcaggagaatcgcttgaacccgggaggcggaggttgcggcaagccgagactgcaccactgcaatccagcctgggcgacagggcaagcctctgtctcaaaagaaaaaaaaatctacacatccctcaccacactgtacataggacagctgggtgtaaattacatctccatttaaatgcctgtcatagttttatacaactataaaatatatacgtgccaaaataaatttgataggaacattggaaccaggtaaggtgacgcatacctgtagcacttcgggaggatcctttgagcccaggaagtcgaggcttcagtgagccatgactgcaccactgcactctggcccaggcaacagtgagatcctgtcctagaaagaaaagagaaaaaaagaaaaatgcgatttggaaatgtggaggtcgaggttgacagcgacaccgaggtcgaagccagttgcccctggagagcgagagactgggctgggccgactcccacctctgtcgcgagaggcctacgggcaggggcaggtgggcagggggactgtgctgggtctctggccgcgtctggacggcaggcgacactttctccacaaaaagcgtcaagaaaccacgacacttggtttctggacttttccgcggaacagtaaccagaacaatcgccatgaaggttcgtttctgtcatggctcagtgcagcctggacgccctggaccagcccctcctgcgcctgggccacggccgctgccttcagggcatcactggtgggcggcacaaccatcctccctttggggggttaatttcatttctttcctcccttctttaatggtgaatggaggagcaccgagcaccactgcagtctcagtttcagatcccagcgcctcgtccctgcccactgccctcggccccgcccgcctgcattggcagtgccctggccccacccacccgtgtcagcaccgcccaccgccctggcaccacccaccgagttctcgcccatgaggaagggggaccctgagtggaggtttcaaaccttaggggccgtccctgccgtgcagggctctgtgaggcctcttgccacataggcttgtgtctgcaggactgtgcggcatttactcccatctcaaataccccatacagggcagactgcccctgccccacctgcccacccactccccagcctcttccgcacgcctcctctggaaggggaacgggccacagagtgaaatggggccttccagctccagtgcggggacttggaaggcctggcccggtgtgggggcccctctgccctgcaggccactctgtgcaggcctatcctcaggtgtgccctcgcccaaggcctgcacgcaccatggcttctgtggtaccagtgataacaccatgccgggcacctcctgcagtcaccacccctgggctgctagggcagagacagctgcggtggcccggtgcacctgcctggcctcaggatggccgaggcgcctggcaaggctgcagggtcccaggggcacctgtccgtactgctgggcgcctgagttcctcctgctgggcactgtcagggcagtgcgcctcaggctgtgcttgtctctgcagaaatgtcctggccccgtacgcggtgccctcggagctggtgctggtggaggagatcccgcggaaccagatgggcaagattgacaagaaggcgctcatcaggcacttccacccctcatgacccggcagactgggactgcgggtctggtggggagcagcagacgtccccttcacaccgagaaccacgggggcccgtccaagacctggcctcccttaaacctgaaccccccaaatcaggtcacgtagaatcaagaactgtttgggatgaaatcaccatgtggggtccccagcctcgggccagttgttgcagctcaaggagaccgtccctggtgtcacctctgcctggtcaccgccgacctcatctgtgcagcgcggtgcagccagcccctggccccacgtgctgaggcacctcccgccccacagtgccctgcagttgccaggctctccagggcaggtcccagaggtttcccacaaaaaacaaagactccactggaggaa

SEQ ID NO: 10532 - DNA, 848 bp, Homo sapiens
aggacaccgtggtgtttaaggacggccagttaaccagagccccttttcctcaggggacaccgtggtgtttaaggatggccagttaaccagagccccttttcctcaggggacaccgtggtgtttaaggatggccagtactggatccgaggccggacctcagtggacatcatcaagactggaggctacaaggtcagcgccctggaggtggagtggcacctgctggcccaccccagcatcacagatgtggctgtgattggagttccggatatgacatggggccagcgggtcactgctgtggtgaccctccgagaaggacactcactgtcccacagggagctcaaagagtgggccagaaatgtcctggccccgtacgcggtgccctcggagctggtgctggtggaggagatcccgcggaaccagatgggcaagattgacaagaaggcgctcatcaggcacttccacccctcatgacccggcagactgggactgcgggtctggtggggagcagcagacgtccccttcacaccgagaaccacgggggcccgtccaagacctggcctcccttaaacctgaaccccccaaatcaggtcacgtagaatcaagaactgtttgggatgaaatcaccatgtggggtccccagcctcgggccagttgttgcagctcaaggagaccgtccctggtgtcacctctgcctggtcaccgccgacctcatctgtgcagcgcggtgcagccagcccctggccccacgtgctgaggcacctcccgccccacagtgccctgcagttgccaggctctccagggcaggtcccagaggtttcccacaaaaaacaaagactccactggaggaa

SEQ ID NO: 10533 - DNA, 8794 bp, Homo sapiens
gggcgccggaactggtccggcccgactcacgaccccgcgggacccggccggaacccggcccgaccccggcgcgcgcgcggcggaggacgaggaagagttgtggcgaggcagatcctgccccgtggccgcggccgtctcgtaggtgcgggcggcggggcccacgggaccgcggcggggtcggccgggcgcagagctctcgggggcgcgggctccggcgcccgcccctgggtcgcagctgggcttgagccgtggcccgtggcgcggtcgcttccccgcgagccgcctggggccgggcgtcggccttcccgggacgccgagcctctcgtgtccggtggggagcggggcccccgcgcggggtgcggggagagaagctgtgcggacgccgggcccggtgataccgtcgagccggcggggtccgtgttcaggcatcctcagaacgaatcgtctttggttgtgtttggaataaattcacttccatttctcattgggcttcagaagtcacccttgaagtactccccgttttagttgtttgctgcgtgcaccttgctgggcgcgtggggcacaggttcacagccggcctagcccctgagggcatgtagatctatgagcaagcaatggagacgtgcggccggccgtgaagtatttggaaggtactgcaggcagcccattccctggagagagggaaggtttaaaggggtgaggcccggtgcagtcaggagttgatgttgctgtcctgagtctaaattccaccaggcaggccaggtgcagtggctcatgcctgtaatcccagcgctttgggcagcagaggcaggaggatcacttgtggccaggagttcaaagccagcctgggcaacatggtgagacccctatctctacaaaaaaatgtaaaaattagctgggtgtggtggcgtacacctgcacttccagctactggttaggctgaggcacgaggatttcttgagcccaggaatcggaggctgcagtgagccatgacagcaccattgcactccagcctaggtggcagagcaagacactgtctcaataaataataaaactgaaaaagaagaggtgatatttgaactgggcttggaagaatgattaggaatttgctagaaagggaacacgtttagagataggaacacgaattgtgtctggggcatagttgttgctttcccatcctgggaggacagacattcgtgttagggcccaaggctgagaccttgttgaggagggggttcacatggtggacccaggagcacgggtgttactaccggtggaccctggggaccctgcgagctttgtagcgtgaagcctggctcaggctggtgtcctctccgcaggtgttggaggacataagatgaggcttcccttgctcttgctcctttggctctgaaccatctcctcaaggcagacagaaatggcggattaaactgtgggcttgggatagttgtaagtgtcacctttccagatggcatttttaaaatagtatttttcttcctaaaatggatatgggtttcaagtgtatttttcctttttggttttttttatttgaatgtactgctcatgaatgcaatgtgaatgtctgttacttaaaaatgtaattttgaaaataaccctccaaaccacaggtgtgatgctgaaacgcatcctgccccgcaggccgagcacagccctcctctgccccacgctctcatcggggcagccgacaggaggaagtgccggcatccacttcaaacacaaggtctgggggggcgggggtgtcaggtgtggtggtgaacaggtcaggtgtcgttttattcatgttgaaagcagcccttcatttgaatgcgagtgtcattctcatctagtaatttttgttgcgaggctccatggggagcaccctgctgagcacggcgcggccgtttgtcttctgcctggcctgtgccgggccattcgtacattctcacgtgaagcctgtgaggcaggtcttgttactgtgccatcttagcggtgggaagtgaagggctaggccagtgaggaaatgaggacaaaggcagcagccgttcaagtcgaagcctgtggtgactaactctgccattaaccagcactccagttaggagggaaaagatgcatcccgctgcgctgcatgtgtgttcccgagaagccccagtgccttagtggtctgatctcagaacctgatggctagaacaccgagaggtcctgcctccctccccgagggctggagagccactgttttcagtggttccagtacgccttcaccaaggaggctgtcctggctcaggcacctttctcagcttctgactagagtccttgcccagccacgtggtgacgccgctgacctcgggttatcagggtgctgcgtagcaggggtatgaagctggctgagggtggaagcccctgactgaactgcatttgtctggtgggcagtgtccctccacactgtgctcctggtggtgatggggagccccacggtagaaggggtcccagtggttgaaaggtgaggttctctctgaggaagctggggtgcctctggaccgggaggtgtgcaggaagaccgcgcacagccatctgccctgagtaggctctgtctgcgtgttcgaggcagggctctgatccgatgaccgtgaagattcaacctctgtgctgaagagaactgatgactgggcacttcattgtcccaagcctgagggactgaaaagctggtttgatggggctggttccgttttccacatgcttggtgggagaataaatcagcacctcgttggaggggactttgtcagtatttctcaaaattaaagatgacccagcaatgtgacttcccggcatctgtgccctagacaccccgagtgaacacagctgtaggtgccaggactccccccttccctcggccgactctggctaggccaggcccttctcaccctccataggaagcctccccaccaggcccccgtccgttcctcctgcccgtggcctctcctcatagcgcgtgggctctctgggagctgggaccatgtcacacggggccagtcacatctgtcacctcccaggggctggtggcaggagtgcccacccacaggcagcgctctggattccgcgcaggagaacagcagtttcttctcagcctgcactttgagtttgcccagcccagctgtgcacgtcagcatcaccagctctgctgagctctgggttttgtggggaatccactcttattcttccgtggcttcgccctgcggggtgactcaggaatttgtagaaatgccaaaaggggggctgtgctctggtagtgtgtgctgtgtgtgctcagcgtgtggttagcgtgtgctcagcgtgtggttaccgtgtgcacagcacgagcttgaactcgctttgtcagaactcggttctttgtggtctgcagaaaccttttctgagcagcagctttagttagagggaagccgtcatcccccttttatgtgcttctgtcatattgagaaacagctacacacaatgacaggcaccttctatattgagtgagtgtcgccggccgtcctagtgctccgctccttagcaccccagaaagcaccgtcccctgctccgagcacccaaggcactccctgtggctctcagcagcggaagtctggcctcggggccgtaacccagagcacccagtgcccagtcggttttctgtgtgtggattctccttgtttctgtgccctcacacctgtaaagcagtgcaggatcggttggaagtgaggaaggaagcgtggtggggccgccctggtttgctgctttctgaagctggcacagcccacgtgccgatctcgtgtcttgtgtctggtgaagcccagttgttttcttgccattctctgggtttctctatggtagcagagtccaggtgtgtgggcggaccagccactgccctgcctctgaacagctgtggagggcttctagaacatgggtgcctcgcgtcaggagatgatgtggcctgcaggactgaccgtttggtaggattcagagaagactcacacaggacgtccaagcagcccgcggagctgtgctgaggttcagggccctgcgtggctcgttttcctcctgcctgggccagaggcaggagatccctcagctggctgggacaggggacttcattaagagccccaggctacctgggaggcggagcttgcagtgagccgagatcgtgccactgcactccagcctgggtgacagagcgagactccgtctcaaaaaaaaaacaaaagagccccaggctagtggggaaaccagacacccaaatcaaacaagcaaaaaccaaggccagtagttgagggtctcaagcacaaaacatactttggctctgacaattttcattgtcatgaagtttgttttgttagacaactatgaagtgttgtgacggtttcaaactaagagcagaaaacaaaactgtttagtacaaaccacagacaataacacagtagctttcccctcacaagttaatgaaagagatgtgctggagagagagaacctgctgaacatgggcacagatcccacagagggggcgtggtgtgtgggaggagactcgacagggtcatggggtcactgctgcccgttgtcgggagataaggctcacagctttatttgataatgttgtctttagcttgtaaatgaacatgcttcccttcccccattgagtgttgagtgttgtgcctgtgggaagcgttatacacacagcctgggacctcagcacagatgcccgttgacaggtgtcccaccggccttccgggttccagcgccaggcctggtgcctgccccaggaggatgagcatttgcattgcctgcaccttatcgtgcccttccacctgctgaagcagctgtgcctgccgctcttgtgaactgcgaacttccccttacctcctctctctggctcgggagctgggtgagtttgaacttggcctcctttgcttttctgtgtgcgaacaagtggttgccttgtttgtttactgaacagagtgtggttgaggcaaaatgctgagatgaaacctaacctaatatgtgtgtattagacggtagcatcattgtcaaaataatacttgttcaaagtccctgaaaaccaaacggacaacttgactacgcttcggccacaggcctgggacgctgtcagaccgagggccgctgagtgcccagtggcagcagagcccagagggtgcttcccccaggaagggaggcagaccagcctattcttactgtgagtcgagcaaagctttgattataaagggccagggatgcaggagcctcgtggagagtgccaccccttcttctcgctctggaatgcgggggctgtgcccctggcctgtgtccgcatcctggggcggtgtcccgtgggcagtgtcctctggctgcagaatgcatgttgcagaattggaccagccctcacgcgtcaggagcgttgggcccacaggcggaggcaccctggcttcttctcggtctcctttctctgaatgaagaattccagtggacggcgggcccgcgcgacccctcccagggagccctcgcttcctgctgatttatttgttatttagtagttaagtttttggggggaaaggagagaattatagttcaacctaaaacacgttttctagctctgtgaattgcctgatttaaagcttggcttggctgggtgcagtggctcacacctgtaatttcaacactttgggaggccaaggtgagtggatcaccggaggtcaggagttggagaccagtctggtcaacatggtgaacccctcgtctctactaacaatacaaaaattagccaggcatggtggtgcgcacctataatcccagctagtcaggaggctgaggcaggagaatcacttgaacccaggaggcggaggttacagtgagcccagatcacactactgtactccagcctgggtgacagaccaagactgcatcttagatagatagatagatagacagagcgggtgagactccatcccagatagataataaagagagagagagaaaggaaaaaaaggtgagagagaggagagagagaaagaaaagaaaagaaggaaaaaagcatggcttacacctgccataaccccaggactttggaccagcctgggcaatacagtgagaccttgtctctaccaaaaaaaaaaaaaaaagctgggtgtggtatcacatgcttgtgggcccagctactcgggaggctgaggccacaggatggcatgagcccaggaagtcgaggctgcagtgagccatgattgcatcactacactccagcctgggcgacacagcaagaccctgtctcaaaaaaacgaaccttggcacctcaccacatttccactgcgcaccagtgtgggaagggtctgagagaggcagcgccgtgtctgccccgggggcggggtctccaggccatgcctgttgtgagcgggggctgtgctgagctcttctctgcacttccccctctcacgggtggttttccaggctcaggattctaaaacccattattcagatgtaccttaagtgtgttgaattttatatgcttctccttggttttacctagtttatttcattgtttagaattttgtgtggtttgggaatccttaaactcatgaagtgaaatagaaagctgagatgctgggcacgtacggaacgttccagcagtgtgggtgagaaaggctggacgtggcctgtctggtgcgctgcctcatgactgaaggtgcagcaggcgtacctggctgggtactggggaggtgttttaaatcctgtcttggccacgtttggatgggacagttgggcactcacgtcctgtgccttgcctttctccagctcggccgcctgtcagtgcaatgctgccccatgtggtgctcaccttccggcgcctgggctgcgccttggcgtcctgccggctggcgcctgcgagacacagaggaagtggtcttctgcacacagccccagtggcccgctcggacaggagcgccccggtgttcacccgtgccctggcctttggggacagaatcgccctggttgaccagcacggccgccacacgtacagggagctttattcccgcagccttcgcctgtcccaggagatctgcaggctctgcgggtgtgtcggcggggacctccgggaggagagggtctccttcctatgcgctaacgatgcctcctacgtcgtggcccagtgggcgtcatggatgagtggcggtgtggcagtccccctctacaggaagcatcccgcggcccagctggagtatgtcatctgcgactcccagagctctgtggtccttgccagccaggagtacctggagctcctgagcccggtggtcaggaagctgggggtcccgctgctgccgctcacaccagccatctacactggagcagtagaggaaccggcagaggtcccggtcccagagcagggatggaggaacaagggcgccatgatcatctacaccagtgggaccacggggaggcccaagggcgtgctgagcacgcaccaaaacatcagggctgtggtgagtgccgcctggcgccgtgatggtttcggtgaccgcacagcactccgggtgggctccgggccagaagcacatcttttcattcgcttttctgtggagtcattcacagttgtcaccatcctgcagacccgtgtgagatacagggacgcaggccctcggggtgtggccgctggcctcactggccacgcaggacggctctgggagcgtccaggtgtagagggattgaggggccgccgagtgaccctgccaggaccatgcggcatgaggtcagaagggaccactcactgcctgtgatgctgaggggcttttcggaggccagccacgtgttaggatgcgtggtcaggaccccacatacacccgggtcttactcgttttttgtgtgtcctgtgacctcagtcacatcttcacagaactctccaaccacatcacttacctggcatttgtacagtgtcataacgtctcctatgcacttgaagcaatcaagtaaaaatgaaaaccaaaagccaggaaggggaaggcaggaagtgtaccccacggagtcgtgggctgacgaggcgccatgagcacacagcaggctgggccctgggtggcctgcgccgtcactcctggaagcggcgcgcctgtcgggagggacgggctctggactcctctgtccttgctgaggggagtgacatgcacatgtgcttctccctggagcctgtgcaggcagcaggcagtgtcctccgtgagattggacagaggattcagtgggccgtgcctcacgctgcttctcagtaagagctgagggtgtgctctggagcctggcctgggttctgtcccggctgagcaggtgacgataattcacgaatcggcagagctctgtgtgggcagtgctgtcacctgagccagtggttgggctgggagtcgattccagcctgaatggcgctgggtccctgagtcccaggcttgggcaggggcggagctctgtcgacctggtgtctgcagagccactccccgaccttctaaattccctaaagcctctggctgtgtgtggcgctgtcctctgtccccagggtaagtgagtgacccagcagatctgctgtggttttgtcgtcatcttgagaggctgctaaaggggagcaacaaagagccagccttctccttccccttcctcagtggggaggcccagagctcctttccgtgagcccgaggtctgtgtgtgctgttgcgggccacagtcttgctcttgctctcagctgtgctctcgtcccctgcaggtgaccgggctggtccacaagtgggcatggaccaaagacgacgtg

SEQ ID NO: 10534 - DNA, 869 bp, Homo sapiens
gggcgccggaactggtccggcccgactcacgaccccgcgggacccggccggaacccggcccgaccccggcgcgcgcgcggcggaggacgaggaagagttgtggcgaggcagatcctgccccgtggccgcggccgtctcctcggccgcctgtcagtgcaatgctgccccatgtggtgctcaccttccggcgcctgggctgcgccttggcgtcctgccggctggcgcctgcgagacacagaggaagtggtcttctgcacacagccccagtggcccgctcggacaggagcgccccggtgttcacccgtgccctggcctttggggacagaatcgccctggttgaccagcacggccgccacacgtacagggagctttattcccgcagccttcgcctgtcccaggagatctgcaggctctgcgggtgtgtcggcggggacctccgggaggagagggtctccttcctatgcgctaacgatgcctcctacgtcgtggcccagtgggcgtcatggatgagtggcggtgtggcagtccccctctacaggaagcatcccgcggcccagctggagtatgtcatctgcgactcccagagctctgtggtccttgccagccaggagtacctggagctcctgagcccggtggtcaggaagctgggggtcccgctgctgccgctcacaccagccatctacactggagcagtagaggaaccggcagaggtcccggtcccagagcagggatggaggaacaagggcgccatgatcatctacaccagtgggaccacggggaggcccaagggcgtgctgagcacgcaccaaaacatcagggctgtggtgaccgggctggtccacaagtgggcatggaccaaagacgacgtg

SEQ ID NO: 10535 - DNA, 26099 bp, Homo sapiens
agtttccagggggctcattaagggagatgtggacagaatccgtggcggggtggtgattcccacccagcctctgccagtttccagggagctccattaggccagaggtgtgaacggaatcaaggaaggagggtgattgagtcagggagcgggggagattggatcggggaggggatgattgaatcggggaagggagtggtgattgggtcagggaggagggtggtgattcccacccaacctatgccagtttccagggggccccattaagccggaggtgtgaacggaatcagggtgggagtgactgaatcagtgaggggggttggatcagggagggggtgactgaatcagggaggggggttggatcagggagggggtgactgaacaaggaggggggttggatcagggagggggtgactgaatctgggagggggtttggatcagggagggggtgattgaatcagggagggggtttggatcagagagtggggctactgaatcagggaggggtggtgtttgcatcagggagctgggggtttgtgattcccacctggcctctgccagtttccaggggcctccagctgggaggatttcctccgggaaaggctgggggtggacgggggcaccttggggcaggctgagctatgcccacattgtcaggcaaggaggtatggctggctcctggaagggtccacggaaaccacgcacctcttgcagaggctgcagtggctgcagacgctgtctgctcaccggcgaaacatccattccctgagcatctgcttcaggggctggggatggagatgctaaaaatgacaggagcgagaaagagtagcagttaatattcaccgacagcctcattggcctggctctcgactcctcaccgcactcctgaggtgggagctgttactaccccctcgtagttgcaggggaggggcaaccgggaggaggaacacagggagctcccggctggaagcaggagcgggctgagcagtcaggaccaagacatgcagcatctcacccattcgggggcccccccgcccaaggcccctccccagggcacctctcctctgaggatcggatcctgaactcaaagaacaggcgagagggccacagagagccccaggagcagtgagtccctggggctcctagacctccctagctcaaagccctttcacgtgggggccagctccccgccaagccaaggcccggaggctgcagtgggcagtgccacaaggctgagctgggagccaggcaagagttctctttggaggcagctgcatccccttccatggggtcctgcagaccttctttccgcagagttggggatcccagtgcacagataacttcgtgtgctgatttttaagtttgaggttctcattcaacattagaccgtcatacacaattcccacgtttctatttggcgtcatgattaatggctgcagagccgctcttatttggccatctcctgattcactaaagtctgtgctgggatatccaggctgtttcctgatttgtggctgctgtaaaccaccctggcacaaacatcattgaggatccagctttgcagatcatttgttctttatgaaggagttggtctggtgttgcatgcagaaaagtttggttttcagcagaggggggtgtcatttgttcattgaatctcacagcgatgcaaagagaggcatgtctgggggcaggggtgggggtaaaggatgccaaattctggtttcaaatcccagctcggccgctttctaggtacgtaagcatggacaagtgacatcaattccccgagcctcagtttcctcattcgtaaaacggcacaatgcaatcctttgcccgagagtcattgtcactgccctcagagcccagctccatgcaccgcagagaggggccctggcactcgtgtctgaagtcctggccgtgtgctcctgcagcactcttgtgcttatcaccacacggcacgtatttctcctcccacctgcaccctcgtgctgggaacgtgcctgagggcacatttgcacctgcacagacactcctgccagcgagtctcctgaaaggcaggaggccaggagaggccgtgggggtgttccgtgtctggtattagacagtagcagctggtggcacgatgataaggcttggcccatggagagtcatcttgttcctctccatgacatgcacctgctggaaggcgacttcccggaatcctcttggtttatttagggaacaggggcaagaatccagctgaaagtggccgagttcacgtggtcacctggagtgtttcctttcctcttcctctaaaaactatttcatagtgtagtttaacttttatacttatcagttgtacgtccacaaagtttaaagaactaccctccccttcctgctcaccagaggtgaacctttgttctgattctcttggtgtttaccccctggaggttcctgtggtctcctgccaggcctgcccaggccacaccacacaccttccaccccgggtccctcccgtcgtctgcgataaactcgttcgatcagcggcagttttgcatgctgatggttacactgtagatgttgaaatgatcgtagtttagtaaatgctatggacagcggagcctcctacagcaacatgatcacgtgccctttgctggcaaacacatcttcctgtgttcccagtgtttaatctctgccttatttttcttgattagttttctatgtattgatcatctatccctaaactttgcttgcattgttcaagtctcctctcaacatggtaaacacacaggacactctgtccaccatcttcccgcggggggattgcccctgcctgccaggccaggactcccgggagtcacaggaaacaaggccagaggggaggagggcggggctcggggacctggtggccacaacagggcttgggcaggaccccctgtgggttctgagcaggatcccactcaggttttaatggggctactccagccactgttgggttcttcatgaatccagtgaggactcctttaggaaacaaggctttcctggtctgggtggttacagcagcgctggtgggacagtctctgacagaatttgcaggagaaaccagtaggactcaatgtggtgtgggagggaagcagggagccatagactgaaccccaggatcgagggtgagatgcaaagtgtgagggtgggggcgctgctgcgggggagacctgagctcctctggggccacatcggggtctgatgtctcttggatgtcccagtgagatgccaggtgggcacttaggaccctccctgtccacatgttctaaactacattgacgtcgtctgcctggttggtgcggccactttcactccctgcgctggatgttctgcagcccttcgtctgctaatgtccacgagtttacctgacagctgacttctctctgttttctctgccctcccttcctgaaactaccgtatttagcatattggatgcctgcctgagcccactgatttttttatctttcctctcctgtttttcatctctcggtctttctgttctatttctaggagacgtcctttagcccttcccttagggtttttactcaggctgttgtattctgacccctccagcccccctttatgttactggaacgctctttctcggggcatctcgctctggactcatgggggctgtcgcttcccttgtctccctgagggtattaacagggggtggttttgggggtctcttcactctgcacagcctggctgcctgcagttgttctgctggttgtttcagcccacgtctctctggctagaggctgtcctccaatgtctgctaatccctgactgctcctgcttcccacctgccactatgatgctgaccagagccgaggcacagatgggacccctgctcataggatgactgggccatttctcggagactgcaccctccccccactgccaccctcacagagccatggccaaggaccacgggagctgtcaccctgtcccaagtcctgtctctaggtgggtgacgcagcctgagctcttcaacttcccagggatagaaatttgcgcacacacgtcctggggctgaatcctgatgttagacgccctccttactcttcctactgccctcgtcggaaacaccattcagcctgctgagtcctggaagcagacagaattctgacaccagatcaagcctgtcccagtggcagagggttggacttgctttttctgcatgatacctagcagggtggcaaccagaggcactagaagtttgggtttgttctcccacgctctgtgttacaaacttcccccagatccagctccttcctcccaggaaaaccatcctcgggctcctgaagtgccctttcctgagctttccaaggacacaactgctgccccagcaatcatcacaagagaggaagatgggcatggaaaataatacacttacaaaaaaactgtgcaaggttctgcagataatttttttttttttttgagacagtctcactctgctgcccaggctggagtgcagtggcgcaatctcagctcactgcagtcgccacctcccaggctcaagagattctcctgcctcagcctcccgagtaactgggattacaggcacctgccaccactcccggctaatttttgtatttttaggagagacagggtttcaccatgttggtcaggctggtcttgaactcctgacctcgtgatctgcctacctcggcctcccaaagtgctgggattacaggcgtgagccatcacaccaggacggttctgcagataatttgtactactgtttgccagtacatgtctttgtgttattagtattcattttaggggaaaaaccctcaaatttcagccaactggactttgtgtttggctttaaatgttttccgccactgtccatccaacagtctcgcttcatattcgtatcctggttcccaagtcccttcgaggagagattctcaaatgcggtccgtttaaaatcacccaagaaatacaaaaattagacaggcatgatggcgggcgcctgtagtcccagctaattgggaggttgaggcaggagaatcacttgaacccgggaggcggaggttgcggtgagccgagatcacaccactgcactctagtctgggcgacagagcgagactccatctcaaaataataataataataagaaaaagtaacaacaataataataataataaaatcacccaggagctcagcgtgcagacccccagccgcaaagcccagagagccccttttgggaggacggggcgaggcccagcaatccgcgttgggagtggtcccgcgcgccgttctgatctgggcagccctgggctagcggagaccacggcgccttgcctcggccacggctcacgagacgcccgcggccccgaccccgccacgacgggacgggcgggacaggggaacacgcgcgcccggaacccgccgccacggcgccgcgccggggggacgcgcttgggcgacggacgcgccgcgccggggaagctgttgggcgccggaactggtccggcccgactcacgaccccgcgggacccggccggaacccggcccgaccccggcgcgcgcgcggcggaggacgaggaagagttgtggcgaggcagatcctgccccgtggccgcggccgtctcgtaggtgcgggcggcggggcccacgggaccgcggcggggtcggccgggcgcagagctctcgggggcgcgggctccggcgcccgcccctgggtcgcagctgggcttgagccgtggcccgtggcgcggtcgcttccccgcgagccgcctggggccgggcgtcggccttcccgggacgccgagcctctcgtgtccggtggggagcggggcccccgcgcggggtgcggggagagaagctgtgcggacgccgggcccggtgataccgtcgagccggcggggtccgtgttcaggcatcctcagaacgaatcgtctttggttgtgtttggaataaattcacttccatttctcattgggcttcagaagtcacccttgaagtactccccgttttagttgtttgctgcgtgcaccttgctgggcgcgtggggcacaggttcacagccggcctagcccctgagggcatgtagatctatgagcaagcaatggagacgtgcggccggccgtgaagtatttggaaggtactgcaggcagcccattccctggagagagggaaggtttaaaggggtgaggcccggtgcagtcaggagttgatgttgctgtcctgagtctaaattccaccaggcaggccaggtgcagtggctcatgcctgtaatcccagcgctttgggcagcagaggcaggaggatcacttgtggccaggagttcaaagccagcctgggcaacatggtgagacccctatctctacaaaaaaatgtaaaaattagctgggtgtggtggcgtacacctgcacttccagctactggttaggctgaggcacgaggatttcttgagcccaggaatcggaggctgcagtgagccatgacagcaccattgcactccagcctaggtggcagagcaagacactgtctcaataaataataaaactgaaaaagaagaggtgatatttgaactgggcttggaagaatgattaggaatttgctagaaagggaacacgtttagagataggaacacgaattgtgtctggggcatagttgttgctttcccatcctgggaggacagacattcgtgttagggcccaaggctgagaccttgttgaggagggggttcacatggtggacccaggagcacgggtgttactaccggtggaccctggggaccctgcgagctttgtagcgtgaagcctggctcaggctggtgtcctctccgcaggtgttggaggacataagatgaggcttcccttgctcttgctcctttggctctgaaccatctcctcaaggcagacagaaatggcggattaaactgtgggcttgggatagttgtaagtgtcacctttccagatggcatttttaaaatagtatttttcttcctaaaatggatatgggtttcaagtgtatttttcctttttggttttttttatttgaatgtactgctcatgaatgcaatgtgaatgtctgttacttaaaaatgtaattttgaaaataaccctccaaaccacaggtgtgatgctgaaacgcatcctgccccgcaggccgagcacagccctcctctgccccacgctctcatcggggcagccgacaggaggaagtgccggcatccacttcaaacacaaggtctgggggggcgggggtgtcaggtgtggtggtgaacaggtcaggtgtcgttttattcatgttgaaagcagcccttcatttgaatgcgagtgtcattctcatctagtaatttttgttgcgaggctccatggggagcaccctgctgagcacggcgcggccgtttgtcttctgcctggcctgtgccgggccattcgtacattctcacgtgaagcctgtgaggcaggtcttgttactgtgccatcttagcggtgggaagtgaagggctaggccagtgaggaaatgaggacaaaggcagcagccgttcaagtcgaagcctgtggtgactaactctgccattaaccagcactccagttaggagggaaaagatgcatcccgctgcgctgcatgtgtgttcccgagaagccccagtgccttagtggtctgatctcagaacctgatggctagaacaccgagaggtcctgcctccctccccgagggctggagagccactgttttcagtggttccagtacgccttcaccaaggaggctgtcctggctcaggcacctttctcagcttctgactagagtccttgcccagccacgtggtgacgccgctgacctcgggttatcagggtgctgcgtagcaggggtatgaagctggctgagggtggaagcccctgactgaactgcatttgtctggtgggcagtgtccctccacactgtgctcctggtggtgatggggagccccacggtagaaggggtcccagtggttgaaaggtgaggttctctctgaggaagctggggtgcctctggaccgggaggtgtgcaggaagaccgcgcacagccatctgccctgagtaggctctgtctgcgtgttcgaggcagggctctgatccgatgaccgtgaagattcaacctctgtgctgaagagaactgatgactgggcacttcattgtcccaagcctgagggactgaaaagctggtttgatggggctggttccgttttccacatgcttggtgggagaataaatcagcacctcgttggaggggactttgtcagtatttctcaaaattaaagatgacccagcaatgtgacttcccggcatctgtgccctagacaccccgagtgaacacagctgtaggtgccaggactccccccttccctcggccgactctggctaggccaggcccttctcaccctccataggaagcctccccaccaggcccccgtccgttcctcctgcccgtggcctctcctcatagcgcgtgggctctctgggagctgggaccatgtcacacggggccagtcacatctgtcacctcccaggggctggtggcaggagtgcccacccacaggcagcgctctggattccgcgcaggagaacagcagtttcttctcagcctgcactttgagtttgcccagcccagctgtgcacgtcagcatcaccagctctgctgagctctgggttttgtggggaatccactcttattcttccgtggcttcgccctgcggggtgactcaggaatttgtagaaatgccaaaaggggggctgtgctctggtagtgtgtgctgtgtgtgctcagcgtgtggttagcgtgtgctcagcgtgtggttaccgtgtgcacagcacgagcttgaactcgctttgtcagaactcggttctttgtggtctgcagaaaccttttctgagcagcagctttagttagagggaagccgtcatcccccttttatgtgcttctgtcatattgagaaacagctacacacaatgacaggcaccttctatattgagtgagtgtcgccggccgtcctagtgctccgctccttagcaccccagaaagcaccgtcccctgctccgagcacccaaggcactccctgtggctctcagcagcggaagtctggcctcggggccgtaacccagagcacccagtgcccagtcggttttctgtgtgtggattctccttgtttctgtgccctcacacctgtaaagcagtgcaggatcggttggaagtgaggaaggaagcgtggtggggccgccctggtttgctgctttctgaagctggcacagcccacgtgccgatctcgtgtcttgtgtctggtgaagcccagttgttttcttgccattctctgggtttctctatggtagcagagtccaggtgtgtgggcggaccagccactgccctgcctctgaacagctgtggagggcttctagaacatgggtgcctcgcgtcaggagatgatgtggcctgcaggactgaccgtttggtaggattcagagaagactcacacaggacgtccaagcagcccgcggagctgtgctgaggttcagggccctgcgtggctcgttttcctcctgcctgggccagaggcaggagatccctcagctggctgggacaggggacttcattaagagccccaggctacctgggaggcggagcttgcagtgagccgagatcgtgccactgcactccagcctgggtgacagagcgagactccgtctcaaaaaaaaaacaaaagagccccaggctagtggggaaaccagacacccaaatcaaacaagcaaaaaccaaggccagtagttgagggtctcaagcacaaaacatactttggctctgacaattttcattgtcatgaagtttgttttgttagacaactatgaagtgttgtgacggtttcaaactaagagcagaaaacaaaactgtttagtacaaaccacagacaataacacagtagctttcccctcacaagttaatgaaagagatgtgctggagagagagaacctgctgaacatgggcacagatcccacagagggggcgtggtgtgtgggaggagactcgacagggtcatggggtcactgctgcccgttgtcgggagataaggctcacagctttatttgataatgttgtctttagcttgtaaatgaacatgcttcccttcccccattgagtgttgagtgttgtgcctgtgggaagcgttatacacacagcctgggacctcagcacagatgcccgttgacaggtgtcccaccggccttccgggttccagcgccaggcctggtgcctgccccaggaggatgagcatttgcattgcctgcaccttatcgtgcccttccacctgctgaagcagctgtgcctgccgctcttgtgaactgcgaacttccccttacctcctctctctggctcgggagctgggtgagtttgaacttggcctcctttgcttttctgtgtgcgaacaagtggttgccttgtttgtttactgaacagagtgtggttgaggcaaaatgctgagatgaaacctaacctaatatgtgtgtattagacggtagcatcattgtcaaaataatacttgttcaaagtccctgaaaaccaaacggacaacttgactacgcttcggccacaggcctgggacgctgtcagaccgagggccgctgagtgcccagtggcagcagagcccagagggtgcttcccccaggaagggaggcagaccagcctattcttactgtgagtcgagcaaagctttgattataaagggccagggatgcaggagcctcgtggagagtgccaccccttcttctcgctctggaatgcgggggctgtgcccctggcctgtgtccgcatcctggggcggtgtcccgtgggcagtgtcctctggctgcagaatgcatgttgcagaattggaccagccctcacgcgtcaggagcgttgggcccacaggcggaggcaccctggcttcttctcggtctcctttctctgaatgaagaattccagtggacggcgggcccgcgcgacccctcccagggagccctcgcttcctgctgatttatttgttatttagtagttaagtttttggggggaaaggagagaattatagttcaacctaaaacacgttttctagctctgtgaattgcctgatttaaagcttggcttggctgggtgcagtggctcacacctgtaatttcaacactttgggaggccaaggtgagtggatcaccggaggtcaggagttggagaccagtctggtcaacatggtgaacccctcgtctctactaacaatacaaaaattagccaggcatggtggtgcgcacctataatcccagctagtcaggaggctgaggcaggagaatcacttgaacccaggaggcggaggttacagtgagcccagatcacactactgtactccagcctgggtgacagaccaagactgcatcttagatagatagatagatagacagagcgggtgagactccatcccagatagataataaagagagagagagaaaggaaaaaaaggtgagagagaggagagagagaaagaaaagaaaagaaggaaaaaagcatggcttacacctgccataaccccaggactttggaccagcctgggcaatacagtgagaccttgtctctaccaaaaaaaaaaaaaaaagctgggtgtggtatcacatgcttgtgggcccagctactcgggaggctgaggccacaggatggcatgagcccaggaagtcgaggctgcagtgagccatgattgcatcactacactccagcctgggcgacacagcaagaccctgtctcaaaaaaacgaaccttggcacctcaccacatttccactgcgcaccagtgtgggaagggtctgagagaggcagcgccgtgtctgccccgggggcggggtctccaggccatgcctgttgtgagcgggggctgtgctgagctcttctctgcacttccccctctcacgggtggttttccaggctcaggattctaaaacccattattcagatgtaccttaagtgtgttgaattttatatgcttctccttggttttacctagtttatttcattgtttagaattttgtgtggtttgggaatccttaaactcatgaagtgaaatagaaagctgagatgctgggcacgtacggaacgttccagcagtgtgggtgagaaaggctggacgtggcctgtctggtgcgctgcctcatgactgaaggtgcagcaggcgtacctggctgggtactggggaggtgttttaaatcctgtcttggccacgtttggatgggacagttgggcactcacgtcctgtgccttgcctttctccagctcggccgcctgtcagtgcaatgctgccccatgtggtgctcaccttccggcgcctgggctgcgccttggcgtcctgccggctggcgcctgcgagacacagaggaagtggtcttctgcacacagccccagtggcccgctcggacaggagcgccccggtgttcacccgtgccctggcctttggggacagaatcgccctggttgaccagcacggccgccacacgtacagggagctttattcccgcagccttcgcctgtcccaggagatctgcaggctctgcgggtgtgtcggcggggacctccgggaggagagggtctccttcctatgcgctaacgatgcctcctacgtcgtggcccagtgggcgtcatggatgagtggcggtgtggcagtccccctctacaggaagcatcccgcggcccagctggagtatgtcatctgcgactcccagagctctgtggtccttgccagccaggagtacctggagctcctgagcccggtggtcaggaagctgggggtcccgctgctgccgctcacaccagccatctacactggagcagtagaggaaccggcagaggtcccggtcccagagcagggatggaggaacaagggcgccatgatcatctacaccagtgggaccacggggaggcccaagggcgtgctgagcacgcaccaaaacatcagggctgtggtgagtgccgcctggcgccgtgatggtttcggtgaccgcacagcactccgggtgggctccgggccagaagcacatcttttcattcgcttttctgtggagtcattcacagttgtcaccatcctgcagacccgtgtgagatacagggacgcaggccctcggggtgtggccgctggcctcactggccacgcaggacggctctgggagcgtccaggtgtagagggattgaggggccgccgagtgaccctgccaggaccatgcggcatgaggtcagaagggaccactcactgcctgtgatgctgaggggcttttcggaggccagccacgtgttaggatgcgtggtcaggaccccacatacacccgggtcttactcgttttttgtgtgtcctgtgacctcagtcacatcttcacagaactctccaaccacatcacttacctggcatttgtacagtgtcataacgtctcctatgcacttgaagcaatcaagtaaaaatgaaaaccaaaagccaggaaggggaaggcaggaagtgtaccccacggagtcgtgggctgacgaggcgccatgagcacacagcaggctgggccctgggtggcctgcgccgtcactcctggaagcggcgcgcctgtcgggagggacgggctctggactcctctgtccttgctgaggggagtgacatgcacatgtgcttctccctggagcctgtgcaggcagcaggcagtgtcctccgtgagattggacagaggattcagtgggccgtgcctcacgctgcttctcagtaagagctgagggtgtgctctggagcctggcctgggttctgtcccggctgagcaggtgacgataattcacgaatcggcagagctctgtgtgggcagtgctgtcacctgagccagtggttgggctgggagtcgattccagcctgaatggcgctgggtccctgagtcccaggcttgggcaggggcggagctctgtcgacctggtgtctgcagagccactccccgaccttctaaattccctaaagcctctggctgtgtgtggcgctgtcctctgtccccagggtaagtgagtgacccagcagatctgctgtggttttgtcgtcatcttgagaggctgctaaaggggagcaacaaagagccagccttctccttccccttcctcagtggggaggcccagagctcctttccgtgagcccgaggtctgtgtgtgctgttgcgggccacagtcttgctcttgctctcagctgtgctctcgtcccctgcaggtgaccgggctggtccacaagtgggcatggaccaaagacgacgtgatcctccacgtgctcccgctgcaccacgtccatggtgtggtcaacgcgctgctctgtcctctctgggtgggagccacctgtgtgatgatgcctgagttcagccctcagcaggtgagttggggtcagggctctcggttgcaccctcagactaggcgcctttcccctgtcggggccagggctctcagccgcgccctcagcctaagcgcctttcgctggttggggtcagggctctcggccgcgccctcagactaggcatcttttcctggtgtgcagtcgcccctatccacaggggacgtgccaatgccgagaccctgggtagcatggaaccctgtacctacgatgctttttgctatacatacgtacctatgataaagcttaatttataagttaggcacagtaagaggttaacaataacagaacagttataaccatgtactgtaatcaagttatgtgaaagtgctctctctcttcaaaataccttccggtactgtgctcgtctgttgtgagactgcagtgggccacgcgtcattgaaaccgtgaatagtgagactggatgagcggaggtgactgtacaggccctgctgcccgcgagctcctgcggctgcggcgaatgctcacgcgcttggtttaaaataatgcgagtttgttcttacatgcttggaggccaggattctgagacgagtcttgcggagctgatgctgggtgtggtagggctgctccgtcaggaggctccagggcaaagtccgttcctgcctcttgcagctctggaggccgcctgtgcccttggctccagctgcttcacgtccagctctgcttctgcaggcacacggccttctctccgtagtcagggctccctcggcttccctttgtgcagcctatgcggatattccaagatcatctcccatcttgaggtccttcgcttcatccacctgcagttcccaccactgcgagaggtgacacattcggggtgtagggcgtagggcgtgaccctttgagctatgatgtggccactgtggcagccctcggttactccagagtactggcccagctggagagctgcttgctgcggagggttactttggagtattggcccagctgaagggctgctgtggagtctctgtctcccctctctgcatggcttcctctgtagcgtctcccttggagcaggcagggagggaaggacgcggtgctggtcacacagagcgctggggtgggagcagtcatcgccgagctgctgcgcgcagccttgcctgtgcagggctgtctccaggcagatcagggatgctgctttggagggaaaggacctgggctcgaggcgggaccctgtgcacagcatcgggcctcgcctgtcagttggggatggcggtggcttttaggagttgctgtggccctgtgtgcattctagctgactgcaggcaagagtcactcaccaggctgcagagggcatgaggggcaggccttgagcccacaggaaggacacggtgtgcgtatgtcacaggtgtggtgaagcagagccctccggtgaggccatggacgtttaccagcctctgcccgtataatgaatatgccttttattcacaggaaaaaaagtttaacacgtgaatgtatggaaaagcccttagaatttggatcgtatcatgatggttctcagcacagaggagcccatctctgaggccagatgcctgggactgggctcttggtctgtgcggggttgttctgcagggcagacgtcccggccagcagaggcacagccctaaagcccagagcacagcagccaccagtggccggccccacactcaccgctcttgccaggactcttcctgtctgaagtctttctggccccatcgaaggctgtgtggagctctgaggcctctgaccgggagctcaggacccaaaccctagtcaggtgtgaatttcgccaggaaggggtccctgcaagcagtcagccctgcccaccttccctctgcttctcctgccgctgagaggcccatcctcttctctgcagggcatccagccccacacggtggctggaggtggagagaaggcagcttttctggccctccacctctctgaccttcagtctcatccccggaaaataaggttggaggccggctcacagtgggcacaaacttggaaaagagaaggggctcttctctagcctccactggaggcaaggtctcacaagagaagccagtatgtagaacagctttgtacgagcaagtgagcctgtttcttcacagatgataacattgggctttagagaaagacctctttaaaatctagcagttactaccgtgccaaagagaggtggctgccagcacacttgcgtgattagccgtcagctccctccactgctcttcaggacgcctgtagccacagagcctccctgagggccccgtcgccagggtcacctcctgaagagcctccctgagggccccgtcgccagggtcaccccctgaagagcctccctgagggccccgtctccctaacacattccacattcttgttggcttcagtccttatttttcacagacatctcagccctgaccccagctgcgacacagcagtctgttaagatggcagacactgcggctgcctcatctgcgtggtccatcccggagacatctgcctggcgctctgctccaggccttcctggctcccctggtagggatctggctcagtgacccgaccctccttgcggctctctctggggtgcgccctgcatggacacagctgtccttggtgaacgtctgctgagtcaaagtggttttgctgcagtgagttccccgtgagtgcactgtgtgggtggtgcagcgcctggtgtgtagggaacttccatgcctttgctgtgtctctgggggctcctctgacggggcagctccctcctctccgccttaagctcctcctttcctttggcggtcagctctgtccagggtgtcagtttctgtgcctgtgactgggccccctcaacctgccccaccttggcctctgctccttggcagcctggccctgaacctctgttgggggctgcccgggcgctgacggtggctggtctaccatggtcacttgggcagaggcagcaacggccattgtcgtggaccgtgccagggcgagatgcagctggcaggggcagaggcagaacatctcccagggagctgagggcaggttggttccatcgtcccggagggcaggttggttccatcctcccaagtaaagagtgtgttaccctcagggcgagaggcaggtgggtgtgggtgctggcgcaggccagctgtcaaggatctgggctttctggtcttgctgcttctccagcactgcatgaatgacaccacctggccctttccagtgcccacaggcacacggcttgggagctgctgctgcggcgtctctgcccaggggcatctgccagggggtccctgccttggggtctgtgtcccaagggcgtctgcccagggatttctgctccgagagtgtctaccctggggtctctgcctggggatctgctgtcatcttccagacactgcagactggctcattaatggacacgggaaagcctcagaccttcaacggacacgggaaagcctcagaccttcaccgtttttgacacttacttgggatttttctttaaactatgctgtgaaaacttaattttttttttttttgagatggagtctcgcactgttagccgggctggagtgcagtggcacgatctcggctcactgcaacctccgcctcctgggttcaagcgattctcctgcctcagcctcctgagtagctgggattacaggcacctgccaccacagccagctaattttttgtatttttagtagagacggggtttcactatgttggccaggctggtctagaactccggacctcatgatccacctgcctcagcctcccaaagtgctgggattacagacgtaagccactatgcccagctgaaaacttaatatttaaacaaatttgatgctgtggctacaaaggattgcaactcttttccataaactccaagtttcagggttttccaactttaggaatttctatgtgtaaaatccagctgtcagcgttattgaactttgggattttgtctaagattgtgtggaagaatgtgtaggatacaagtgtggggtgaccagacacctgcggtggtgctgaacgatctcagacgcggtgtcttcaagtcatcctgcacagagggccgtgggtgtcagtgcctgcaggtgacggatggggttgggggagaggaggaggatgccggaagatggatgtgcagccacagcctctggagatcaaagtcaccactgacgagacagccagaggctcagatcagtcactcgtctccaacagcactgccctggccgacttcctcaggatcgcagcatggactcaggagggctgccatctggcagggtctgtgctgtggcagctcaggttagagcaacaggcctgctcctgccacctcagaagcacttgctagttagtcaaatgttatggcgcccttcagggggcctccaggtctttcacgtcttggaagtgtggcaacacattgggatgtgctggaggaagaaggtcaccctcggctctcagtgcccttctttagggcagcagctgccctctgaagatttggatgaattccaagaaagaccgtccttcgtgtctttcacctccgcgcctgctccctgcccctcagccttgtcccgttgcgtgcatgctgtccccgcctcagcaccatcctgctacacgcatgctctccccacctcggcaccatcctgctacacgcgtgctctccccgcctcggcaccatcctgctacacgcgtgctccgttttccgtgcctcagtgtcacgtttgtgtttctggttcactgtgctgttgatctgtgtgttacatcaaatgcagtttgttctttttacgttgctgtgttgtatttcctggtgtgcagaagccacagtgcgcttatccattctgctcttgaaggacttgagattgttttcagtttgtggctattagaagtcacggttgctatgaacattctcacacagatgtccctgtggacagttcccttggatccgcaactcccagtgccggctcacaggctagatgtatgtttcatttcagtggaaactgcggaagagttctcaaacgtggctgcatgtttcacacaccccagccccaaatgtggctgcatgtttcatacgcccccagccccattctgctggtaccaatttactgtattagtccgtgtgcacactactgataaagacatacccaagacagggaagaaaaagaggtttaattggactcgcagttccacatggctggggaggcctcagaatcatggtgggaggcaaaaggcacttcttacatggcggtggcaagagaaaatgaggaagaagcaaaagcggaaacccttgataaacccatcagatctcatgagacttattcactatcatgagaatagcacaggaaagaccggcccccataattcaattacctccccctgggcacctcccacaacacgtgggaattctgggagatacagttcaagttgagatttgggtggggatgccatcaaaccatatcaggagtccttaaatttgttaaattccccacatgtctcctcttctggtgccttcatttgtccctacagaggttctccgcgaagcactgtgcttcccccaacttgtttcccttcagcctggagaacttcttttcaatagttcttgtagtgcagctttgctgacaacaaatccctcaattttgtttcactgaaaatgtttttattgcaccttcccttttcaaaaacagctctatcgagatacagttcacacaccgcaaaattcattattgtaaattttgaattaagtagccattacctcaaaccagtgtccatttccccccattcccagcccctggcaaccacgaatctgctttctgcctctaggatttccttgtttgagatggcagcgtgtgcaaatggggcgtgtcacactcagtcttttattccagcttctttcacttgcaggatggttctgagtttcatccatgttctactgtgtgtattaataacttgttcctgaatagtacttcatcatatggatataccacattttcctcatccattcaccatctgatgggcatttggactgtttcagtttggagctattatgaataatgctgctatgaacatttacatataaatctctgtagacattcattcatcttacatagacacagagggatagaattgatgggttgtatggtgactttctgtttaatgttttaagaaactgtcaaactggccgggcacggtggctcacacctgaaatcctagcactttgggaggccgaggcaggtggatcacttgaggtcaggagtttgagaccagcctgaccaacagggtgaaaccctgtctatactaaaaatacaaaattagccaggcaccgtggttcacacctgtaatcccagctactcgggaggctgaggtaggagaattgcttgaacccagggggcggcgattgcagtgagccaagatcacaccactgcactccagcctgggcaacagagcaagactgtctcaaaaaaaaaaaaaaaaaaaaagaaaagaaaagaaactggcaaactgttttccaaaatggctgtgttgctgtacgttctcatcagcagcgtatgagagttttcatttctttacgtcctgccaacacttgtcactggcttcagtttgcgtttccctaatgactactgatgttaagcttttttttttttttttttttttttttgagatggagtctcactctgtcgctcaggctggagtgcagtggctcagtctcggctcactgcaatctccgcctcctgggttcaagcgcttctcctgcctcagccatctcagcagctgggattacaggcgcacagctccaggtccagctaattttttgtatttttatagagaccaggtttcaccgtgttggccaggctggtcttgaactcctgacctcaagtaacctgcctgcctcagcctcccaaaatgctgtgattatagccgtgagcccgccgcacccggccagatgttgagcattttttgtgtttatttttacttttttccttttaaattatttttgcagaaacagagcctccctatgttgcccaggctggcctcacactcctgagctcaagggatcctcccgcctcagcctcccaaagtgccgggattacgggcatgagcactgcacccagtgctgttttttacgttcttgtttgcatccgtatgtaatctttggtgaactgtctaatgaaatctttggccatttttaaattgggctgtttgtcttcttactgagttgtaagagttctatgtgtattccggatacgagtctcttttcagatgtacggtttacaaatatttcctccaactgcagcttgtctttttattttcttaatgtgtcttttggagcacacattaattttgatgaaattcattttataaaaaaaattttaaaaataaattcattttatcaatttttaaactttatagattgtgcttttggtatctcatctgagaagtctttgccaaaccacaggtcatgtcatgaagatattcccttttgttttttcttagaagttttctagttttagctcatacgtggaggtttctgacccactttgggttaattttgcatatggtgtgaggtagggtctaggagtcaccttctgcatggagatattcagtgtgtcagtgccatttgtgagaaagattatccttttgtccttttccctattggggacttggtttctttgccaagaatcacttgaccagatatctgtgcattcgtttatttctggactctccattgtgttttgtgggtctcttgtctaatcttacacagcatcacactgtgttcgttacttctggtttacgtcagttttggagttgggaactgtgtgttctcacctttaatctgccttttgaaatttattttggatcttctgggtcctttgccttttcgtgtaaaacgtaggataagtgtatcaatttctgcaaaataaagcttgccggaattttgggaagattgctttgaagctggagctcagtgtgggaagaactgccatcttcacaacatggagtgttcccgtctgcgagcctggcctctctccacccgcttatctgttcccctccctccctcgatggcagtgttgtgggtgctgctccgcggtgctgctgtctcccgcactctggtcgcctgtgtctttgctttcccgtctgtgggtcagcctagatcacccccgttgactgtgtctgacttttttcctcttttctgctgcgtcttgtttgttattaggtctattgaatgaattcattttggatcttgtgtttttcagttttatgattttttgcagttccacttctctttgcaattctccatcttccccacgttgttcatcttttctttgaaattccttaatctgcttattgcagtgatttgaagggccttgtctggtgattcggacgtttggatttcctgagacttcttcccttcagttggggatcacatctttgtgtccttacatgctttgtgactttgaagggttccagtctttgtctttgaaagaatgatattatttcttccccggagattcctgcctttctctgccaggcagctgcggtgaggcactcgtcactgcagtccagtgaggagatgagatgggctggggctggactgtggcatcggcatccgtcgaccccagtttcaacgccgtgtgggcgagatctgtcctgtgtgtcctgggcctcccttaggtgctgaccccacagcacgaagagtgccctcctccctccgccacacccttcggtgctccgtgtggaacaccgcgggtagagagggccatggaaggaatgcggctcaccagctcttcctgaagctttatgggcgacgcgagaacccgctaacgagtgaggaacttaaaacgtatttatatgtaagcaagaaatgtttattatggagtaaaatataaaattcacatgactcttttaaataaaagacttcacccgttcgctagtcactgcatgcctgtccatactgggaagcatgctgacttcaggtctgcgggcagccaggccctcctgccagcttccccaaggtgtacatccgccctctctgtgtagctggaagagcctgaccactcacgtctctccaggccacagatcccgaagcccttttctagctctgttcacgattgctcttcccctcacaggccagacgcagctgtcccgcgcaacatggcttctgtgggaaggggtcagagtttgaggcaccccttttagaagggaggcgctgcagactcttgaatgtgaaccatgagaacgctgtgcctggagccaggagcctccgccacgggccccagtgcctgctcatcttcctaccgagtgcttcctttccttcgtaggtttgggaaaagttcttaagttctgaaacgccgcggatcaatgtctttatggcagtgcctacaatatacaccaagctgatggagtactacgacaggcattttacccagccgcacgcccaggatttcttgcgtgcagtttgtgaagaaaaaattaggtaagtgaaaagagcccactttctcgttcagaaagtcttaaagatcaacagatacgacttatttctaataaatcactcctactaagttctgggaagcagtgctttccatttcctttcaatgttccctctctctctacccgtctccgtctctacctctctaactgtctctctctctctctacccgtctgtatgtatatctgtaatctcttccacgtcgatagctgcctggattctgtatcgctctctctgtcacactctgtctctctatctctctctgtctctctttgtctctctctctccatctctccatctatctgtcttctctgtctctcttgtcagactctccatctctgtcttctctctgtctctctccatcgctcttcatctgtctctccgtcttctctttctctatctctcctgtctctccatctgtctctatctctccatctgtctttgtctccgtctgtctgtctgctctctctcctgtccgtctctctctctctctgtcatggcgtctgaaggacaagggtgaggacagtgagctgacccgcttgctcctgcttcatctgcccacatgtcccacggcgcctgcctctcctatgcagtctctctgccttcgtgggcagccctgtgaggcctcctgcctggggcacgttctgctgcttttcctctcagccccgctcctcccctcccagctccctggataaacccctccctcccaggacaagctggtcttttgggccacccaggggcgtgtttgctctgcactctcccatgaacctgcaggcgtgggaacgtttcttttccctcgtggctgttgaggtgtggttcactaactggaaacgcacacgtgtggctcagtgagtcttcacacgcatcacaggcccgcacctccagcagagtcgtgggtggggtattttttctttttgtgagagggaggggtggcgtggagggtgcactgcaggaactgaaggctccactgccatccagtttccagtgggatgtgtgtgtctgtggctgccgcgcgctcctcccagtccccaggaagtgcacagggaagcggcacctttgttcctggagagaattccgggttgtccaaggcacatgtctgaaccgcttcgctctctttgccgttcccttgccccttttctgtgaggccaccggagcccatggttttgctgctgctactgctgggataccctggggctgggcaggccccaagctgagcagggtgagcacaacgttttaccaaatctaaggaaccaagggcaagaacgaggtcagtgaaggagaggatcaggtgatttctggggtgacagaggcaatgagacctcggccatctggatctcccagcgggggtcctgtcagtggtgcctcctcgtaaagcaggggcagcagcagggaccactccgctcagaccgcaaacaaaagcgccttccctactgcccgtgaggctgcgggaaatgctgtgtgagagcgcggggactcggagttctcagggcccgtgttctcctgccaagcctgagctgaccctgtgggccaagatggctgcagttctgcgggtggttctgagccccttgggtgtgcccggccccaccccttgggtgccgcggccattcacccatgtccgcgttctgctgcagagcctgcaagctgagccggctgtagtccccggatgtgcctggccgcagcctgcagcgccgtggctgttcacccgtgatcagctccgtggtcggcagctgcacggtcactgctgttcttgagcgtggttgtgaacagcgcaggaactttgcaggggacaccgcggaccctaagcacattgtttaccctcattagctgttggacctgcttccttctaaaatacacccaacagatcgttttcaaaaaacaaagtcacgccgtagcgcagactgcagcgttggtcccgggtgtcgcacagtggtgctgtacccacggcctggggctcctgcactcgtgaaggagctgccacttttgcaagcaagggccgcctcctgaggggctaaacctgccacctttgcacgcgagagccacgtcccaaggggctaaacctgcctttggttgtgccgcgtaggctgatggtctcaggctcagctgccctgcccctcccagtgctggagaagtggaagaacatcacgggccacaccctgctggagcggtatggcatgaccgagatcggcatggctctgtccgggcccctgaccactgc

SEQ ID NO: 10536 - DNA, 550 bp, Homo sapiens
agtttccagggggctcattaagggagatgtggacagaatccgtggcggggtggtgattcccacccagcctctgccagtttccagggagctccattaggccagaggtgaccgggctggtccacaagtgggcatggaccaaagacgacgtgatcctccacgtgctcccgctgcaccacgtccatggtgtggtcaacgcgctgctctgtcctctctgggtgggagccacctgtgtgatgatgcctgagttcagccctcagcaggtttgggaaaagttcttaagttctgaaacgccgcggatcaatgtctttatggcagtgcctacaatatacaccaagctgatggagtactacgacaggcattttacccagccgcacgcccaggatttcttgcgtgcagtttgtgaagaaaaaattaggctgatggtctcaggctcagctgccctgcccctcccagtgctggagaagtggaagaacatcacgggccacaccctgctggagcggtatggcatgaccgagatcggcatggctctgtccgggcccctgaccactgc

SEQ ID NO: 10537 - DNA, 19780 bp, Homo sapiens
ctggtccacaagtgggcatggaccaaagacgacgtgatcctccacgtgctcccgctgcaccacgtccatggtgtggtcaacgcgctgctctgtcctctctgggtgggagccacctgtgtgatgatgcctgagttcagccctcagcaggtgagttggggtcagggctctcggttgcaccctcagactaggcgcctttcccctgtcggggccagggctctcagccgcgccctcagcctaagcgcctttcgctggttggggtcagggctctcggccgcgccctcagactaggcatcttttcctggtgtgcagtcgcccctatccacaggggacgtgccaatgccgagaccctgggtagcatggaaccctgtacctacgatgctttttgctatacatacgtacctatgataaagcttaatttataagttaggcacagtaagaggttaacaataacagaacagttataaccatgtactgtaatcaagttatgtgaaagtgctctctctcttcaaaataccttccggtactgtgctcgtctgttgtgagactgcagtgggccacgcgtcattgaaaccgtgaatagtgagactggatgagcggaggtgactgtacaggccctgctgcccgcgagctcctgcggctgcggcgaatgctcacgcgcttggtttaaaataatgcgagtttgttcttacatgcttggaggccaggattctgagacgagtcttgcggagctgatgctgggtgtggtagggctgctccgtcaggaggctccagggcaaagtccgttcctgcctcttgcagctctggaggccgcctgtgcccttggctccagctgcttcacgtccagctctgcttctgcaggcacacggccttctctccgtagtcagggctccctcggcttccctttgtgcagcctatgcggatattccaagatcatctcccatcttgaggtccttcgcttcatccacctgcagttcccaccactgcgagaggtgacacattcggggtgtagggcgtagggcgtgaccctttgagctatgatgtggccactgtggcagccctcggttactccagagtactggcccagctggagagctgcttgctgcggagggttactttggagtattggcccagctgaagggctgctgtggagtctctgtctcccctctctgcatggcttcctctgtagcgtctcccttggagcaggcagggagggaaggacgcggtgctggtcacacagagcgctggggtgggagcagtcatcgccgagctgctgcgcgcagccttgcctgtgcagggctgtctccaggcagatcagggatgctgctttggagggaaaggacctgggctcgaggcgggaccctgtgcacagcatcgggcctcgcctgtcagttggggatggcggtggcttttaggagttgctgtggccctgtgtgcattctagctgactgcaggcaagagtcactcaccaggctgcagagggcatgaggggcaggccttgagcccacaggaaggacacggtgtgcgtatgtcacaggtgtggtgaagcagagccctccggtgaggccatggacgtttaccagcctctgcccgtataatgaatatgccttttattcacaggaaaaaaagtttaacacgtgaatgtatggaaaagcccttagaatttggatcgtatcatgatggttctcagcacagaggagcccatctctgaggccagatgcctgggactgggctcttggtctgtgcggggttgttctgcagggcagacgtcccggccagcagaggcacagccctaaagcccagagcacagcagccaccagtggccggccccacactcaccgctcttgccaggactcttcctgtctgaagtctttctggccccatcgaaggctgtgtggagctctgaggcctctgaccgggagctcaggacccaaaccctagtcaggtgtgaatttcgccaggaaggggtccctgcaagcagtcagccctgcccaccttccctctgcttctcctgccgctgagaggcccatcctcttctctgcagggcatccagccccacacggtggctggaggtggagagaaggcagcttttctggccctccacctctctgaccttcagtctcatccccggaaaataaggttggaggccggctcacagtgggcacaaacttggaaaagagaaggggctcttctctagcctccactggaggcaaggtctcacaagagaagccagtatgtagaacagctttgtacgagcaagtgagcctgtttcttcacagatgataacattgggctttagagaaagacctctttaaaatctagcagttactaccgtgccaaagagaggtggctgccagcacacttgcgtgattagccgtcagctccctccactgctcttcaggacgcctgtagccacagagcctccctgagggccccgtcgccagggtcacctcctgaagagcctccctgagggccccgtcgccagggtcaccccctgaagagcctccctgagggccccgtctccctaacacattccacattcttgttggcttcagtccttatttttcacagacatctcagccctgaccccagctgcgacacagcagtctgttaagatggcagacactgcggctgcctcatctgcgtggtccatcccggagacatctgcctggcgctctgctccaggccttcctggctcccctggtagggatctggctcagtgacccgaccctccttgcggctctctctggggtgcgccctgcatggacacagctgtccttggtgaacgtctgctgagtcaaagtggttttgctgcagtgagttccccgtgagtgcactgtgtgggtggtgcagcgcctggtgtgtagggaacttccatgcctttgctgtgtctctgggggctcctctgacggggcagctccctcctctccgccttaagctcctcctttcctttggcggtcagctctgtccagggtgtcagtttctgtgcctgtgactgggccccctcaacctgccccaccttggcctctgctccttggcagcctggccctgaacctctgttgggggctgcccgggcgctgacggtggctggtctaccatggtcacttgggcagaggcagcaacggccattgtcgtggaccgtgccagggcgagatgcagctggcaggggcagaggcagaacatctcccagggagctgagggcaggttggttccatcgtcccggagggcaggttggttccatcctcccaagtaaagagtgtgttaccctcagggcgagaggcaggtgggtgtgggtgctggcgcaggccagctgtcaaggatctgggctttctggtcttgctgcttctccagcactgcatgaatgacaccacctggccctttccagtgcccacaggcacacggcttgggagctgctgctgcggcgtctctgcccaggggcatctgccagggggtccctgccttggggtctgtgtcccaagggcgtctgcccagggatttctgctccgagagtgtctaccctggggtctctgcctggggatctgctgtcatcttccagacactgcagactggctcattaatggacacgggaaagcctcagaccttcaacggacacgggaaagcctcagaccttcaccgtttttgacacttacttgggatttttctttaaactatgctgtgaaaacttaattttttttttttttgagatggagtctcgcactgttagccgggctggagtgcagtggcacgatctcggctcactgcaacctccgcctcctgggttcaagcgattctcctgcctcagcctcctgagtagctgggattacaggcacctgccaccacagccagctaattttttgtatttttagtagagacggggtttcactatgttggccaggctggtctagaactccggacctcatgatccacctgcctcagcctcccaaagtgctgggattacagacgtaagccactatgcccagctgaaaacttaatatttaaacaaatttgatgctgtggctacaaaggattgcaactcttttccataaactccaagtttcagggttttccaactttaggaatttctatgtgtaaaatccagctgtcagcgttattgaactttgggattttgtctaagattgtgtggaagaatgtgtaggatacaagtgtggggtgaccagacacctgcggtggtgctgaacgatctcagacgcggtgtcttcaagtcatcctgcacagagggccgtgggtgtcagtgcctgcaggtgacggatggggttgggggagaggaggaggatgccggaagatggatgtgcagccacagcctctggagatcaaagtcaccactgacgagacagccagaggctcagatcagtcactcgtctccaacagcactgccctggccgacttcctcaggatcgcagcatggactcaggagggctgccatctggcagggtctgtgctgtggcagctcaggttagagcaacaggcctgctcctgccacctcagaagcacttgctagttagtcaaatgttatggcgcccttcagggggcctccaggtctttcacgtcttggaagtgtggcaacacattgggatgtgctggaggaagaaggtcaccctcggctctcagtgcccttctttagggcagcagctgccctctgaagatttggatgaattccaagaaagaccgtccttcgtgtctttcacctccgcgcctgctccctgcccctcagccttgtcccgttgcgtgcatgctgtccccgcctcagcaccatcctgctacacgcatgctctccccacctcggcaccatcctgctacacgcgtgctctccccgcctcggcaccatcctgctacacgcgtgctccgttttccgtgcctcagtgtcacgtttgtgtttctggttcactgtgctgttgatctgtgtgttacatcaaatgcagtttgttctttttacgttgctgtgttgtatttcctggtgtgcagaagccacagtgcgcttatccattctgctcttgaaggacttgagattgttttcagtttgtggctattagaagtcacggttgctatgaacattctcacacagatgtccctgtggacagttcccttggatccgcaactcccagtgccggctcacaggctagatgtatgtttcatttcagtggaaactgcggaagagttctcaaacgtggctgcatgtttcacacaccccagccccaaatgtggctgcatgtttcatacgcccccagccccattctgctggtaccaatttactgtattagtccgtgtgcacactactgataaagacatacccaagacagggaagaaaaagaggtttaattggactcgcagttccacatggctggggaggcctcagaatcatggtgggaggcaaaaggcacttcttacatggcggtggcaagagaaaatgaggaagaagcaaaagcggaaacccttgataaacccatcagatctcatgagacttattcactatcatgagaatagcacaggaaagaccggcccccataattcaattacctccccctgggcacctcccacaacacgtgggaattctgggagatacagttcaagttgagatttgggtggggatgccatcaaaccatatcaggagtccttaaatttgttaaattccccacatgtctcctcttctggtgccttcatttgtccctacagaggttctccgcgaagcactgtgcttcccccaacttgtttcccttcagcctggagaacttcttttcaatagttcttgtagtgcagctttgctgacaacaaatccctcaattttgtttcactgaaaatgtttttattgcaccttcccttttcaaaaacagctctatcgagatacagttcacacaccgcaaaattcattattgtaaattttgaattaagtagccattacctcaaaccagtgtccatttccccccattcccagcccctggcaaccacgaatctgctttctgcctctaggatttccttgtttgagatggcagcgtgtgcaaatggggcgtgtcacactcagtcttttattccagcttctttcacttgcaggatggttctgagtttcatccatgttctactgtgtgtattaataacttgttcctgaatagtacttcatcatatggatataccacattttcctcatccattcaccatctgatgggcatttggactgtttcagtttggagctattatgaataatgctgctatgaacatttacatataaatctctgtagacattcattcatcttacatagacacagagggatagaattgatgggttgtatggtgactttctgtttaatgttttaagaaactgtcaaactggccgggcacggtggctcacacctgaaatcctagcactttgggaggccgaggcaggtggatcacttgaggtcaggagtttgagaccagcctgaccaacagggtgaaaccctgtctatactaaaaatacaaaattagccaggcaccgtggttcacacctgtaatcccagctactcgggaggctgaggtaggagaattgcttgaacccagggggcggcgattgcagtgagccaagatcacaccactgcactccagcctgggcaacagagcaagactgtctcaaaaaaaaaaaaaaaaaaaaagaaaagaaaagaaactggcaaactgttttccaaaatggctgtgttgctgtacgttctcatcagcagcgtatgagagttttcatttctttacgtcctgccaacacttgtcactggcttcagtttgcgtttccctaatgactactgatgttaagcttttttttttttttttttttttttttgagatggagtctcactctgtcgctcaggctggagtgcagtggctcagtctcggctcactgcaatctccgcctcctgggttcaagcgcttctcctgcctcagccatctcagcagctgggattacaggcgcacagctccaggtccagctaattttttgtatttttatagagaccaggtttcaccgtgttggccaggctggtcttgaactcctgacctcaagtaacctgcctgcctcagcctcccaaaatgctgtgattatagccgtgagcccgccgcacccggccagatgttgagcattttttgtgtttatttttacttttttccttttaaattatttttgcagaaacagagcctccctatgttgcccaggctggcctcacactcctgagctcaagggatcctcccgcctcagcctcccaaagtgccgggattacgggcatgagcactgcacccagtgctgttttttacgttcttgtttgcatccgtatgtaatctttggtgaactgtctaatgaaatctttggccatttttaaattgggctgtttgtcttcttactgagttgtaagagttctatgtgtattccggatacgagtctcttttcagatgtacggtttacaaatatttcctccaactgcagcttgtctttttattttcttaatgtgtcttttggagcacacattaattttgatgaaattcattttataaaaaaaattttaaaaataaattcattttatcaatttttaaactttatagattgtgcttttggtatctcatctgagaagtctttgccaaaccacaggtcatgtcatgaagatattcccttttgttttttcttagaagttttctagttttagctcatacgtggaggtttctgacccactttgggttaattttgcatatggtgtgaggtagggtctaggagtcaccttctgcatggagatattcagtgtgtcagtgccatttgtgagaaagattatccttttgtccttttccctattggggacttggtttctttgccaagaatcacttgaccagatatctgtgcattcgtttatttctggactctccattgtgttttgtgggtctcttgtctaatcttacacagcatcacactgtgttcgttacttctggtttacgtcagttttggagttgggaactgtgtgttctcacctttaatctgccttttgaaatttattttggatcttctgggtcctttgccttttcgtgtaaaacgtaggataagtgtatcaatttctgcaaaataaagcttgccggaattttgggaagattgctttgaagctggagctcagtgtgggaagaactgccatcttcacaacatggagtgttcccgtctgcgagcctggcctctctccacccgcttatctgttcccctccctccctcgatggcagtgttgtgggtgctgctccgcggtgctgctgtctcccgcactctggtcgcctgtgtctttgctttcccgtctgtgggtcagcctagatcacccccgttgactgtgtctgacttttttcctcttttctgctgcgtcttgtttgttattaggtctattgaatgaattcattttggatcttgtgtttttcagttttatgattttttgcagttccacttctctttgcaattctccatcttccccacgttgttcatcttttctttgaaattccttaatctgcttattgcagtgatttgaagggccttgtctggtgattcggacgtttggatttcctgagacttcttcccttcagttggggatcacatctttgtgtccttacatgctttgtgactttgaagggttccagtctttgtctttgaaagaatgatattatttcttccccggagattcctgcctttctctgccaggcagctgcggtgaggcactcgtcactgcagtccagtgaggagatgagatgggctggggctggactgtggcatcggcatccgtcgaccccagtttcaacgccgtgtgggcgagatctgtcctgtgtgtcctgggcctcccttaggtgctgaccccacagcacgaagagtgccctcctccctccgccacacccttcggtgctccgtgtggaacaccgcgggtagagagggccatggaaggaatgcggctcaccagctcttcctgaagctttatgggcgacgcgagaacccgctaacgagtgaggaacttaaaacgtatttatatgtaagcaagaaatgtttattatggagtaaaatataaaattcacatgactcttttaaataaaagacttcacccgttcgctagtcactgcatgcctgtccatactgggaagcatgctgacttcaggtctgcgggcagccaggccctcctgccagcttccccaaggtgtacatccgccctctctgtgtagctggaagagcctgaccactcacgtctctccaggccacagatcccgaagcccttttctagctctgttcacgattgctcttcccctcacaggccagacgcagctgtcccgcgcaacatggcttctgtgggaaggggtcagagtttgaggcaccccttttagaagggaggcgctgcagactcttgaatgtgaaccatgagaacgctgtgcctggagccaggagcctccgccacgggccccagtgcctgctcatcttcctaccgagtgcttcctttccttcgtaggtttgggaaaagttcttaagttctgaaacgccgcggatcaatgtctttatggcagtgcctacaatatacaccaagctgatggagtactacgacaggcattttacccagccgcacgcccaggatttcttgcgtgcagtttgtgaagaaaaaattaggtaagtgaaaagagcccactttctcgttcagaaagtcttaaagatcaacagatacgacttatttctaataaatcactcctactaagttctgggaagcagtgctttccatttcctttcaatgttccctctctctctacccgtctccgtctctacctctctaactgtctctctctctctctacccgtctgtatgtatatctgtaatctcttccacgtcgatagctgcctggattctgtatcgctctctctgtcacactctgtctctctatctctctctgtctctctttgtctctctctctccatctctccatctatctgtcttctctgtctctcttgtcagactctccatctctgtcttctctctgtctctctccatcgctcttcatctgtctctccgtcttctctttctctatctctcctgtctctccatctgtctctatctctccatctgtctttgtctccgtctgtctgtctgctctctctcctgtccgtctctctctctctctgtcatggcgtctgaaggacaagggtgaggacagtgagctgacccgcttgctcctgcttcatctgcccacatgtcccacggcgcctgcctctcctatgcagtctctctgccttcgtgggcagccctgtgaggcctcctgcctggggcacgttctgctgcttttcctctcagccccgctcctcccctcccagctccctggataaacccctccctcccaggacaagctggtcttttgggccacccaggggcgtgtttgctctgcactctcccatgaacctgcaggcgtgggaacgtttcttttccctcgtggctgttgaggtgtggttcactaactggaaacgcacacgtgtggctcagtgagtcttcacacgcatcacaggcccgcacctccagcagagtcgtgggtggggtattttttctttttgtgagagggaggggtggcgtggagggtgcactgcaggaactgaaggctccactgccatccagtttccagtgggatgtgtgtgtctgtggctgccgcgcgctcctcccagtccccaggaagtgcacagggaagcggcacctttgttcctggagagaattccgggttgtccaaggcacatgtctgaaccgcttcgctctctttgccgttcccttgccccttttctgtgaggccaccggagcccatggttttgctgctgctactgctgggataccctggggctgggcaggccccaagctgagcagggtgagcacaacgttttaccaaatctaaggaaccaagggcaagaacgaggtcagtgaaggagaggatcaggtgatttctggggtgacagaggcaatgagacctcggccatctggatctcccagcgggggtcctgtcagtggtgcctcctcgtaaagcaggggcagcagcagggaccactccgctcagaccgcaaacaaaagcgccttccctactgcccgtgaggctgcgggaaatgctgtgtgagagcgcggggactcggagttctcagggcccgtgttctcctgccaagcctgagctgaccctgtgggccaagatggctgcagttctgcgggtggttctgagccccttgggtgtgcccggccccaccccttgggtgccgcggccattcacccatgtccgcgttctgctgcagagcctgcaagctgagccggctgtagtccccggatgtgcctggccgcagcctgcagcgccgtggctgttcacccgtgatcagctccgtggtcggcagctgcacggtcactgctgttcttgagcgtggttgtgaacagcgcaggaactttgcaggggacaccgcggaccctaagcacattgtttaccctcattagctgttggacctgcttccttctaaaatacacccaacagatcgttttcaaaaaacaaagtcacgccgtagcgcagactgcagcgttggtcccgggtgtcgcacagtggtgctgtacccacggcctggggctcctgcactcgtgaaggagctgccacttttgcaagcaagggccgcctcctgaggggctaaacctgccacctttgcacgcgagagccacgtcccaaggggctaaacctgcctttggttgtgccgcgtaggctgatggtctcaggctcagctgccctgcccctcccagtgctggagaagtggaagaacatcacgggccacaccctgctggagcggtatggcatgaccgagatcggcatggctctgtccgggcccctgaccactgccgtgcgcctgccaggtacgagcacttcccacagctgcgttcctcttccactgtgctctgagccccccaaggtgggccagtctcgaaccacccacattcggactgaagggcggcatggaggatgctcccccgtgggacaggccactcggccaggagagcactcaggatgcactgcgacctgtcccctctgggtagatcagccttctcccaagtctcagtcgggtggatgggggaggtgtctgtgctggcccctggctgtatgactggggagacaatgggaagaacagcaatgcctggaatgcaggcgtcagtgcatgtctcagaggaaggcggggggccatgctgttggctccagaccacatcagcagtggtggcagcctccgtctgtctggagtccgggtgccacacagcgccagcagcagtgccaggagaggtgggtgtggtgggcagggtgggatgagtcaagcacctgtcttccttctctagatgtgggctcctgataccgggcccctcttgtccagccttccctaacacatcccattctgactttcatctgacccaaccatttgagccctgggtcctccgctgggacttctgggaacagagcccacagctggggggccaccctgctgctttctgcgcagcccttccagtctgtctagagtagaagagagatctcagtgcagacttaaagtgagaccatcccgcacatctgtctgtgcagctgcttacctgcagacccagtaaaaattcacccctctggcgtgcagctctgtgtgtcttaagaaacatcatcacagtcaaaatagagaagggttcctcgcctcagaaactcccttcctagtgctcagcacctcctccacccccgaggcctggccccttgttcctgtttctcttcttgtggttttgctttttctgggaggccacgtggctaaatcctgcaggacgtggcctctgagcctgtctgcttccgcccggcttccgcccacagtcaactgcctgtgctgtgtgcgtcagagcccgcgcctttccctgctgagtggcatccgtggtgtgggtgcggcaccgcttgtgaccctgttttaagcaatgacacgtgagatgttatcaacatttgtgtgcaggtttctgtgcgaacgtggttttttatttcacctgggcagatacctaggagagagattgctgtgttgtctgaagctttcaagctgttctccagagcggctacaccatccccttccccctgcaatgggtgggaggtcacgagcacctgctgctccagcgggcggtggtggtgtctcgttgagttcatgattctctcatgatgggtggcgttgagcacctcttcctgttcgtgtcattccgttttcaactggggcctttgttttcttgagttttgagagcttttaaaattcgggacccaagtgtcagctgtgcgattttaaatatcatctcccagcttgtggtttgtcttcccattcacctaacagcgtctttaaaatcaggagttttaggttttggcccggtttatcaatttgttttgtgaattgtctgatgtcatatctaataaatccttgcgtagcccaaagtcacagagaatagtttcagctcttacgtttgggaccatgatccattttgagttaatgtttgtacatagtgcgagatacggaccacagttcttttttagtgtgtgaatgtctaactttttagcactgttcgttgaaaagactcccttctccatcgaacagccctttggatctttgttgaaagtccgtcgactcctgaggggtcggctcctgggctctgctctgtcccattgctttccgtgtgccctttggctcattccatgcctgcttggttcctgggactctagggtaagcgtggacatgggggttcaggcccaggcagggaccagctggtgccaggcagcgatacggtgctggggcctgcaaggtgagtgtgagggctggctggctgctgggctgggaggaggagagactgtaggctcacgcccctttgctgggcctggggagccatgggggctgttaagtgtattctgagtgtaaagtctcggtttggctggggcatcctgagcagaatgacagggccatggcagcgagatcctcagctgccgtgcagagctgccagtggggtggccgcacagagtgcagtgcctgctgcaacagtgcccagggcagtgggcgggtgggggcatgttgtgaaaagaagtcagtgtgagtgatgagaaatacatcctagtctcagaccccaggaaaccgccgtcagtgctggtggcccctgccctgggccggctcccgcgttagtctcagaccccaggaaacctccacctccgtcagtgctagcggcccctgctctgggctgactcgcgcatctccacgatggctgcggcaccagctgtttcttcggtggctaaagctctctggtggaaataagatggggaccttgaaatcaaatgtgactggtctgttgagtctctgtccttatcgttgtccttcttagtaggatgtgctggttttgtccagtgccaccggccacagtcaccacgtaatatggacggaatgagcaaagcccggctcgctgaggctgcaggctgcaggcaagtgaggactgaaagggtaacgggctctgggctttgtcctctctttgttccggacatgtgagcaggacaagttctgtgtattcagaatctgtctgcacagtttgtagttcatgatgactgttcatccacagcattgctttgtgggcgtcctctcttttgatcttctcgaaacagcccctgcgatggggtcatattttgcactcacatacaagaacccatgagcctgcccacggtcacgcggctggtgagtgatgcacttcccaggagcacggtgacctcttcaatggccctcactagagaagatggacagtgcccccctagccttttttactggaacagatacaaggctgagaagctgaaatcaggagcagcccagggaccactgtctacaccgagggagtcatgagcagcccagggaccactgtctacacccagggagtcaggagcagcccggggactgctgtctacaccgaggatgtcaggagcagcccagggaccactgtctacactgagagcgtcaggagcagcccagggaccgccgtccacaccaagagcgccaaggagcagcccagggaccgccgtccacaccgagggcgccaaggagcagatagtagcccagagacccaggggaggctcagcttccccacgctggaatcagaactcctaggcgaacaggaaggagccccagacagatggcacagggagaggagtccccggctgaggagggggatccagagaccctgaagcttcagggttattgggcaagaaacctgagtgcaccaatccccgagtcttcagctaccgacggcaggttccctcgggtgccggggatgctccctcttctctaaggcagagcccacagtaggttccctcaggcgccaaggacattccctcttctctaaggcagagcccacagcaggttccctcaggcgccagggacgttccctcttctctaaggcagagcccacggcaggttccctcgggcgccggggacgctctctcttctctaaggcagagcccacggcagattccctcgggcgccggggacgctctctcttctctaaggcagagcctgacggcaggttccctcgggcgccagggatgttccctcttctctaaggcagagcatacggcagtttccctggggcgccggggacgctccctcttctctaaggcagaatcaaatatctgtgattttatccttgcctttaaatcaccagcagtgtgagttctttggtttggaaaaaagtaagtaaagtcacctcagcattaaatccaatatgccccacaaaaactccaaaatgcagcctcctgagccatgtttctagagggcacggtggaggagagctttcctcactctcaggctctaacccccaccctggtggccatggccttgacccttgggtcggctccagccacaggctctgagctcatgcttggcctcgctgctcagtgcactgtccgtgctcggaagagagagaagctgggtggagggtgagctctgtcgtgtgttatggttacaggcctgctccgtgcggttcctgtggagggagatgaataattcatggccgaccactgctgggcctcgtcacactctaattggaggttgagctcagaggtgctcacggctcctgggccactctgtggcattgacagggagctccagggcctcattggcggtttccgttccctgggtcccagtccccagtcagagttatcagggaggggctggctgacagcgattttagaggtgggctgtggcaggaaggcagtgccccccacctgcctgcagctgcgctcccatctacattggcctttgcggggccagcctctgtccactctcttgagctctcatgtccacactgtcacatgcccggggcacagcgagcggcacctggagtgtggggacccctccctcgagctctcacgggtggcacctggagtgtgggggcccctgcctcaagctttcatgggtggcacctggagtgtgggggcccctccctgaagctctcacgggcggcacctggagtgtgggggccactccttgagctctcatggacaataccactgcttggctgctgcagaatccagacaccatcccagagcctcttcagcctctgcagatggtgtgggacggccacacggcctccccacctgcggcccccgcccctaccccagccgtgccgtgtccttgcgctgcgtccccgccccagtagaggcatcaccaggaagaggcgaaaggccgcctgtgatggtcctcttcttatgaaacgcccagaacagaaaaaccacggacgcggacagcagacctggtgccaggtctggggagggagggtgtggcggtcgtgggctgtgcgggagttctgactaggggaagtggggggctgtgcaatgtgtgtgcggaacaccgccgtgccgcgcactgaaatgggaagtcatgtgttatgcgggtttcacccccatttaaaaatcttcagaagcaaaacataaaggaggagaaaggatggaagaaagggggctgaagctggccccgccacaccccccatagtggtgacacgggtttctgaccagagtggaggttcggggcgtctgcatacctggaaccacagagaactcccgaggtgacactccgcacaccacactagcccggcttcgcctgcaggaccccaggtgtggacaggcccagcaggatcagcaagaccgagccgggcaccgacagcccctcaccaagcgtctggaggccgggacgccccatggattgcagagttcactgcactgaccctcgatgctgacccttgaagtgccggaaatctcagcgtggactcagacatgataagcgttcaggcactcccctgacgcaggccagggcaaaggcctcacgccccgggatagacaggaagtcccacgtctgctctgcccctaggtcatgcccgtgctgacgccacatcgccagggccgcactccatgagcagcctctgccgtcccaccagcaacctaaaccacaggcagagcgaggctgcggcagccctgcgtgtgccggcgggacacgtctcgccacctgggctctgcccccaccccggccagtgtaagatatgattttagccacgttgagactgtgcaggtgggatggatacactgagcaaatcatgggtgtctaataaatgagccagtacaaagtgtggtccacctgccatgcagagttcaggacagcccctcctggggacatagggcagatcctgccttagcccgtcgtgtgccgggcacacacaggtcccctcatcgtggacagccccggggccatcagggcaaggcgccagccctccctggccagcaagtgtgtaaaagtgggaatgacaccagaatctgtgggcagctgtgaggctttgggaagtaactgggaaagtgatgtatgaggggcccagggcaggccaggcccagcgtgccacgtgagtgcctgctgtgccacatggccatcactgtggcatcggctgggcctgagcacaccgtgcttgccagccacgtatcgtgtggcttttcacctgctggtgcctacaccatcttctctctgggtcacagggcacgtcgctccctccacacagactcccgcacgtggcacacgggagctcagcgggatccgagctcagtgtgtgcttctctcctccaggttcctctcactccagcctccccttcagtgtttctcctctcctgtaggttccgtggggaccccactgcctggagtacaggtgcgcattgtctcagaaaacccacagagggaagcctgctcctacaccatccacgcagagggagacgagagggggaccaaggtaagccactctgctcttggcaggtgggcggccgtgtgtccagtctaggccccccagggtggttacactggtgcatctttcccctggaggcagactcccctccacgcaggggaccagccccctggacactgcaggtgctggctggtgttgcaagggcactggctggtgttctgggccctgcctgctgcgtgtccgtctgtgcgttcacagagcagtgggcagagggagcccagggcggaacgccaaagggactcacacccgggcacacagctcctcccaggggccctgtccacggggacaggctgacgtgggccatgatggccttggctaagcggaagagataaagagcagaggccgttgttgttgatgggaatctggttagaaatatgaactggcctgaccctggcacccgtcctgaggggacgctgaccacaggcccccatagtaggtgtggggagattcacggggccctgcacgcggaggtgggtgcctgtgcagtgctctgtggctgcctccttgtcttgtgcgttattctaaagctgacaagggtgaacaagaacaaaggacattgtctcatttctgtgaggattttaacatgagagtctgctcatcacacgtgaactcatcacagagaaaggtttagggattatggggaaatggaatcttgatttaaaaggaaattattttctctgaagccagtatccacacctgataccacacatgattgactgtgttgccctgaggttttcaaagatcgagggatcctgagtctcatctctgtgcatttccttctctgtgacaccatcttggccctcacgggcacaactgagctccctgtgcagaggctgaggggccgtgggccttgctctcgtgagtgaacagccacacgccctccttgtaccttggtttccacacatgaccacgtgagggttggagcgatggtcgtggttggacgttttagctccagcaaccaagtaggatgtgggtggctttcagtgtcattaaatgacactgaaaggtgcagtggccgcaccttgtgtggagggccacacggcgtgtcccgcctggcctgggccccccgcagtgggctgttatcccccgtggccctgaagtgggtattctgtttccccgtggaaacctctcacctggggccacctgcagtggccgcaccttgtgtggagggccgcacagtgtgtcccgcctggcctgggccacccgcagtgggctgttatcccccgtggccctgaagtgggtattctgtttccccatggaaacctctcacctggggccacctgcagtggccgcaccttgtgtggagggccgcacagtgtgtcccgcctggcctgggccccccgcagtgggctgttatccctgtggcccccacagagccatggggcaacttgctgaaacccacctgggtggctgccccttgctatacccacctcccctgccctctgtagggccccagcccatgctgtt

SEQ ID NO: 10538 - DNA, 434 bp, Homo sapiens
ctggtccacaagtgggcatggaccaaagacgacgtgatcctccacgtgctcccgctgcaccacgtccatggtgtggtcaacgcgctgctctgtcctctctgggtgggagccacctgtgtgatgatgcctgagttcagccctcagcaggtttgggaaaagttcttaagttctgaaacgccgcggatcaatgtctttatggcagtgcctacaatatacaccaagctgatggagtactacgacaggcattttacccagccgcacgcccaggatttcttgcgtgcagtttgtgaagaaaaaattaggttccgtggggaccccactgcctggagtacaggtgcgcattgtctcagaaaacccacagagggaagcctgctcctacaccatccacgcagagggagacgagagggggaccaagggccccagcccatgctgtt

SEQ ID NO: 10539 - DNA, 829 bp, Homo sapiens
ggtccggcccgactcacgaccccgcgggacccggccggaacccggcccgaccccggcgcgcgcgcggcggaggacgaggaagagttgtggcgaggcagatcctgccccgtggccgcggccgtctcgtaggtgaccgggctggtccacaagtgggcatggaccaaagacgacgtgatcctccacgtgctcccgctgcaccacgtccatggtgtggtcaacgcgctgctctgtcctctctgggtgggagccacctgtgtgatgatgcctgagttcagccctcagcaggtttgggaaaagttcttaagttctgaaacgccgcggatcaatgtctttatggcagtgcctacaatatacaccaagctgatggagtactacgacaggcattttacccagccgcacgcccaggatttcttgcgtgcagtttgtgaagaaaaaattaggctgatggtctcaggctcagctgccctgcccctcccagtgctggagaagtggaagaacatcacgggccacaccctgctggagcggtatggcatgaccgagatcggcatggctctgtccgggcccctgaccactgccgtgcgcctgccaggttccgtggggaccccactgcctggagtacaggtgcgcattgtctcagaaaacccacagagggaagcctgctcctacaccatccacgcagagggagacgagagggggaccaaggtgaccccagggtttgaagaaaaggagggggagctgctggtgaggggaccctccgtgtttcgagaatactggaataaaccagaagaaactaagagtgcattcaccctggatggctggtttaagacag

SEQ ID NO: 10540 - DNA, 6864 bp, Homo sapiens
ggaacccggcccgaccccggcgcgcgcgcggcggaggacgaggaagagttgtggcgaggcagatcctgccccgtggccgcggccgtctcgtaggtgcgggcggcggggcccacgggaccgcggcggggtcggccgggcgcagagctctcgggggcgcgggctccggcgcccgcccctgggtcgcagctgggcttgagccgtggcccgtggcgcggtcgcttccccgcgagccgcctggggccgggcgtcggccttcccgggacgccgagcctctcgtgtccggtggggagcggggcccccgcgcggggtgcggggagagaagctgtgcggacgccgggcccggtgataccgtcgagccggcggggtccgtgttcaggcatcctcagaacgaatcgtctttggttgtgtttggaataaattcacttccatttctcattgggcttcagaagtcacccttgaagtactccccgttttagttgtttgctgcgtgcaccttgctgggcgcgtggggcacaggttcacagccggcctagcccctgagggcatgtagatctatgagcaagcaatggagacgtgcggccggccgtgaagtatttggaaggtactgcaggcagcccattccctggagagagggaaggtttaaaggggtgaggcccggtgcagtcaggagttgatgttgctgtcctgagtctaaattccaccaggcaggccaggtgcagtggctcatgcctgtaatcccagcgctttgggcagcagaggcaggaggatcacttgtggccaggagttcaaagccagcctgggcaacatggtgagacccctatctctacaaaaaaatgtaaaaattagctgggtgtggtggcgtacacctgcacttccagctactggttaggctgaggcacgaggatttcttgagcccaggaatcggaggctgcagtgagccatgacagcaccattgcactccagcctaggtggcagagcaagacactgtctcaataaataataaaactgaaaaagaagaggtgatatttgaactgggcttggaagaatgattaggaatttgctagaaagggaacacgtttagagataggaacacgaattgtgtctggggcatagttgttgctttcccatcctgggaggacagacattcgtgttagggcccaaggctgagaccttgttgaggagggggttcacatggtggacccaggagcacgggtgttactaccggtggaccctggggaccctgcgagctttgtagcgtgaagcctggctcaggctggtgtcctctccgcaggtgttggaggacataagatgaggcttcccttgctcttgctcctttggctctgaaccatctcctcaaggcagacagaaatggcggattaaactgtgggcttgggatagttgtaagtgtcacctttccagatggcatttttaaaatagtatttttcttcctaaaatggatatgggtttcaagtgtatttttcctttttggttttttttatttgaatgtactgctcatgaatgcaatgtgaatgtctgttacttaaaaatgtaattttgaaaataaccctccaaaccacaggtgtgatgctgaaacgcatcctgccccgcaggccgagcacagccctcctctgccccacgctctcatcggggcagccgacaggaggaagtgccggcatccacttcaaacacaaggtctgggggggcgggggtgtcaggtgtggtggtgaacaggtcaggtgtcgttttattcatgttgaaagcagcccttcatttgaatgcgagtgtcattctcatctagtaatttttgttgcgaggctccatggggagcaccctgctgagcacggcgcggccgtttgtcttctgcctggcctgtgccgggccattcgtacattctcacgtgaagcctgtgaggcaggtcttgttactgtgccatcttagcggtgggaagtgaagggctaggccagtgaggaaatgaggacaaaggcagcagccgttcaagtcgaagcctgtggtgactaactctgccattaaccagcactccagttaggagggaaaagatgcatcccgctgcgctgcatgtgtgttcccgagaagccccagtgccttagtggtctgatctcagaacctgatggctagaacaccgagaggtcctgcctccctccccgagggctggagagccactgttttcagtggttccagtacgccttcaccaaggaggctgtcctggctcaggcacctttctcagcttctgactagagtccttgcccagccacgtggtgacgccgctgacctcgggttatcagggtgctgcgtagcaggggtatgaagctggctgagggtggaagcccctgactgaactgcatttgtctggtgggcagtgtccctccacactgtgctcctggtggtgatggggagccccacggtagaaggggtcccagtggttgaaaggtgaggttctctctgaggaagctggggtgcctctggaccgggaggtgtgcaggaagaccgcgcacagccatctgccctgagtaggctctgtctgcgtgttcgaggcagggctctgatccgatgaccgtgaagattcaacctctgtgctgaagagaactgatgactgggcacttcattgtcccaagcctgagggactgaaaagctggtttgatggggctggttccgttttccacatgcttggtgggagaataaatcagcacctcgttggaggggactttgtcagtatttctcaaaattaaagatgacccagcaatgtgacttcccggcatctgtgccctagacaccccgagtgaacacagctgtaggtgccaggactccccccttccctcggccgactctggctaggccaggcccttctcaccctccataggaagcctccccaccaggcccccgtccgttcctcctgcccgtggcctctcctcatagcgcgtgggctctctgggagctgggaccatgtcacacggggccagtcacatctgtcacctcccaggggctggtggcaggagtgcccacccacaggcagcgctctggattccgcgcaggagaacagcagtttcttctcagcctgcactttgagtttgcccagcccagctgtgcacgtcagcatcaccagctctgctgagctctgggttttgtggggaatccactcttattcttccgtggcttcgccctgcggggtgactcaggaatttgtagaaatgccaaaaggggggctgtgctctggtagtgtgtgctgtgtgtgctcagcgtgtggttagcgtgtgctcagcgtgtggttaccgtgtgcacagcacgagcttgaactcgctttgtcagaactcggttctttgtggtctgcagaaaccttttctgagcagcagctttagttagagggaagccgtcatcccccttttatgtgcttctgtcatattgagaaacagctacacacaatgacaggcaccttctatattgagtgagtgtcgccggccgtcctagtgctccgctccttagcaccccagaaagcaccgtcccctgctccgagcacccaaggcactccctgtggctctcagcagcggaagtctggcctcggggccgtaacccagagcacccagtgcccagtcggttttctgtgtgtggattctccttgtttctgtgccctcacacctgtaaagcagtgcaggatcggttggaagtgaggaaggaagcgtggtggggccgccctggtttgctgctttctgaagctggcacagcccacgtgccgatctcgtgtcttgtgtctggtgaagcccagttgttttcttgccattctctgggtttctctatggtagcagagtccaggtgtgtgggcggaccagccactgccctgcctctgaacagctgtggagggcttctagaacatgggtgcctcgcgtcaggagatgatgtggcctgcaggactgaccgtttggtaggattcagagaagactcacacaggacgtccaagcagcccgcggagctgtgctgaggttcagggccctgcgtggctcgttttcctcctgcctgggccagaggcaggagatccctcagctggctgggacaggggacttcattaagagccccaggctacctgggaggcggagcttgcagtgagccgagatcgtgccactgcactccagcctgggtgacagagcgagactccgtctcaaaaaaaaaacaaaagagccccaggctagtggggaaaccagacacccaaatcaaacaagcaaaaaccaaggccagtagttgagggtctcaagcacaaaacatactttggctctgacaattttcattgtcatgaagtttgttttgttagacaactatgaagtgttgtgacggtttcaaactaagagcagaaaacaaaactgtttagtacaaaccacagacaataacacagtagctttcccctcacaagttaatgaaagagatgtgctggagagagagaacctgctgaacatgggcacagatcccacagagggggcgtggtgtgtgggaggagactcgacagggtcatggggtcactgctgcccgttgtcgggagataaggctcacagctttatttgataatgttgtctttagcttgtaaatgaacatgcttcccttcccccattgagtgttgagtgttgtgcctgtgggaagcgttatacacacagcctgggacctcagcacagatgcccgttgacaggtgtcccaccggccttccgggttccagcgccaggcctggtgcctgccccaggaggatgagcatttgcattgcctgcaccttatcgtgcccttccacctgctgaagcagctgtgcctgccgctcttgtgaactgcgaacttccccttacctcctctctctggctcgggagctgggtgagtttgaacttggcctcctttgcttttctgtgtgcgaacaagtggttgccttgtttgtttactgaacagagtgtggttgaggcaaaatgctgagatgaaacctaacctaatatgtgtgtattagacggtagcatcattgtcaaaataatacttgttcaaagtccctgaaaaccaaacggacaacttgactacgcttcggccacaggcctgggacgctgtcagaccgagggccgctgagtgcccagtggcagcagagcccagagggtgcttcccccaggaagggaggcagaccagcctattcttactgtgagtcgagcaaagctttgattataaagggccagggatgcaggagcctcgtggagagtgccaccccttcttctcgctctggaatgcgggggctgtgcccctggcctgtgtccgcatcctggggcggtgtcccgtgggcagtgtcctctggctgcagaatgcatgttgcagaattggaccagccctcacgcgtcaggagcgttgggcccacaggcggaggcaccctggcttcttctcggtctcctttctctgaatgaagaattccagtggacggcgggcccgcgcgacccctcccagggagccctcgcttcctgctgatttatttgttatttagtagttaagtttttggggggaaaggagagaattatagttcaacctaaaacacgttttctagctctgtgaattgcctgatttaaagcttggcttggctgggtgcagtggctcacacctgtaatttcaacactttgggaggccaaggtgagtggatcaccggaggtcaggagttggagaccagtctggtcaacatggtgaacccctcgtctctactaacaatacaaaaattagccaggcatggtggtgcgcacctataatcccagctagtcaggaggctgaggcaggagaatcacttgaacccaggaggcggaggttacagtgagcccagatcacactactgtactccagcctgggtgacagaccaagactgcatcttagatagatagatagatagacagagcgggtgagactccatcccagatagataataaagagagagagagaaaggaaaaaaaggtgagagagaggagagagagaaagaaaagaaaagaaggaaaaaagcatggcttacacctgccataaccccaggactttggaccagcctgggcaatacagtgagaccttgtctctaccaaaaaaaaaaaaaaaagctgggtgtggtatcacatgcttgtgggcccagctactcgggaggctgaggccacaggatggcatgagcccaggaagtcgaggctgcagtgagccatgattgcatcactacactccagcctgggcgacacagcaagaccctgtctcaaaaaaacgaaccttggcacctcaccacatttccactgcgcaccagtgtgggaagggtctgagagaggcagcgccgtgtctgccccgggggcggggtctccaggccatgcctgttgtgagcgggggctgtgctgagctcttctctgcacttccccctctcacgggtggttttccaggctcaggattctaaaacccattattcagatgtaccttaagtgtgttgaattttatatgcttctccttggttttacctagtttatttcattgtttagaattttgtgtggtttgggaatccttaaactcatgaagtgaaatagaaagctgagatgctgggcacgtacggaacgttccagcagtgtgggtgagaaaggctggacgtggcctgtctggtgcgctgcctcatgactgaaggtgcagcaggcgtacctggctgggtactggggaggtgttttaaatcctgtcttggccacgtttggatgggacagttgggcactcacgtcctgtgccttgcctttctccagctcggccgcctgtcagtgcaatgctgccccatgtggtgctcaccttccggcgcctgggctgcgccttggcgtcctgccggctggcgcctgcgagacacagaggaag

SEQ ID NO: 10541 - DNA, 477 bp, Homo sapiens
ggaacccggcccgaccccggcgcgcgcgcggcggaggacgaggaagagttgtggcgaggcagatcctgccccgtggccgcggccgtctcgtgttggaggacataagatgaggcttcccttgctcttgctcctttggctctgaaccatctcctcaaggcagacagaaatggcggattaaactgtgggcttgggatagttgtgtcccaccggccttccgggttccagcgccaggcctggtgcctgccccaggaggatgagcatttgcattgcctgcaccttatcgtgcccttccacctgctgaagcagctgtgcctgccgctcttgtgaactgcgaacttccccttacctcctctctctggctcgggagctggctcggccgcctgtcagtgcaatgctgccccatgtggtgctcaccttccggcgcctgggctgcgccttggcgtcctgccggctggcgcctgcgagacacagaggaag

SEQ ID NO: 10542 - DNA, 2024 bp, Homo sapiens
ctcttgtgaactgcgaacttccccttacctcctctctctggctcgggagctggttgggcactcacgtcctgtgccttgcctttctccagctcggccgcctgtcagtgcaatgctgccccatgtggtgctcaccttccggcgcctgggctgcgccttggcgtcctgccggctggcgcctgcgagacacagaggaagtggtcttctgcacacagccccagtggcccgctcggacaggagcgccccggtgttcacccgtgccctggcctttggggacagaatcgccctggttgaccagcacggccgccacacgtacagggagctttattcccgcagccttcgcctgtcccaggagatctgcaggctctgcgggtgtgtcggcggggacctccgggaggagagggtctccttcctatgcgctaacgatgcctcctacgtcgtggcccagtgggcgtcatggatgagtggcggtgtggcagtccccctctacaggaagcatcccgcggcccagctggagtatgtcatctgcgactcccagagctctgtggtccttgccagccaggagtacctggagctcctgagcccggtggtcaggaagctgggggtcccgctgctgccgctcacaccagccatctacactggagcagtagaggaaccggcagaggtcccggtcccagagcagggatggaggaacaagggcgccatgatcatctacaccagtgggaccacggggaggcccaagggcgtgctgagcacgcaccaaaacatcagggctgtggtgaccgggctggtccacaagtgggcatggaccaaagacgacgtgatcctccacgtgctcccgctgcaccacgtccatggtgtggtcaacgcgctgctctgtcctctctgggtgggagccacctgtgtgatgatgcctgagttcagccctcagcaggtttgggaaaagttcttaagttctgaaacgccgcggatcaatgtctttatggcagtgcctacaatatacaccaagctgatggagtactacgacaggcattttacccagccgcacgcccaggatttcttgcgtgcagtttgtgaagaaaaaattaggttccgtggggaccccactgcctggagtacaggtgcgcattgtctcagaaaacccacagagggaagcctgctcctacaccatccacgcagagggagacgagagggggaccaaggtgaccccagggtttgaagaaaaggagggggagctgctggtgaggggaccctccgtgtttcgagaatactggaataaaccagaagaaactaagagtgcattcaccctggatggctggtttaagacaggggacaccgtggtgtttaaggatggccagtactggatccgaggccggacctcagtggacatcatcaagactggaggctacaaggtcagcgccctggaggtggagtggcacctgctggcccaccccagcatcacagatgtggctgtgattggagttccggatatgacatggggccagcgggtcactgctgtggtgaccctccgagaaggacactcactgtcccacagggagctcaaagagtgggccagaaatgtcctggccccgtacgcggtgccctcggagctggtgctggtggaggagatcccgcggaaccagatgggcaagattgacaagaaggcgctcatcaggcacttccacccctcatgacccggcagactgggactgcgggtctggtggggagcagcagacgtccccttcacaccgagaaccacgggggcccgtccaagacctggcctcccttaaacctgaaccccccaaatcaggtcacgtagaatcaagaactgtttgggatgaaatcaccatgtggggtccccagcctcgggccagttgttgcagctcaaggagaccgtccctggtgtcacctctgcctggtcaccgccgacctcatctgtgcagcgcggtgcagccagcccctggccccacgtgctgaggcacctcccgccccacagtgccctgcagttgccaggctctccagggcag

SEQ ID NO: 10543 - DNA, 20137 bp, Homo sapiens
gctgctctgtcctctctgggtgggagccacctgtgtgatgatgcctgagttcagccctcagcaggtgagttggggtcagggctctcggttgcaccctcagactaggcgcctttcccctgtcggggccagggctctcagccgcgccctcagcctaagcgcctttcgctggttggggtcagggctctcggccgcgccctcagactaggcatcttttcctggtgtgcagtcgcccctatccacaggggacgtgccaatgccgagaccctgggtagcatggaaccctgtacctacgatgctttttgctatacatacgtacctatgataaagcttaatttataagttaggcacagtaagaggttaacaataacagaacagttataaccatgtactgtaatcaagttatgtgaaagtgctctctctcttcaaaataccttccggtactgtgctcgtctgttgtgagactgcagtgggccacgcgtcattgaaaccgtgaatagtgagactggatgagcggaggtgactgtacaggccctgctgcccgcgagctcctgcggctgcggcgaatgctcacgcgcttggtttaaaataatgcgagtttgttcttacatgcttggaggccaggattctgagacgagtcttgcggagctgatgctgggtgtggtagggctgctccgtcaggaggctccagggcaaagtccgttcctgcctcttgcagctctggaggccgcctgtgcccttggctccagctgcttcacgtccagctctgcttctgcaggcacacggccttctctccgtagtcagggctccctcggcttccctttgtgcagcctatgcggatattccaagatcatctcccatcttgaggtccttcgcttcatccacctgcagttcccaccactgcgagaggtgacacattcggggtgtagggcgtagggcgtgaccctttgagctatgatgtggccactgtggcagccctcggttactccagagtactggcccagctggagagctgcttgctgcggagggttactttggagtattggcccagctgaagggctgctgtggagtctctgtctcccctctctgcatggcttcctctgtagcgtctcccttggagcaggcagggagggaaggacgcggtgctggtcacacagagcgctggggtgggagcagtcatcgccgagctgctgcgcgcagccttgcctgtgcagggctgtctccaggcagatcagggatgctgctttggagggaaaggacctgggctcgaggcgggaccctgtgcacagcatcgggcctcgcctgtcagttggggatggcggtggcttttaggagttgctgtggccctgtgtgcattctagctgactgcaggcaagagtcactcaccaggctgcagagggcatgaggggcaggccttgagcccacaggaaggacacggtgtgcgtatgtcacaggtgtggtgaagcagagccctccggtgaggccatggacgtttaccagcctctgcccgtataatgaatatgccttttattcacaggaaaaaaagtttaacacgtgaatgtatggaaaagcccttagaatttggatcgtatcatgatggttctcagcacagaggagcccatctctgaggccagatgcctgggactgggctcttggtctgtgcggggttgttctgcagggcagacgtcccggccagcagaggcacagccctaaagcccagagcacagcagccaccagtggccggccccacactcaccgctcttgccaggactcttcctgtctgaagtctttctggccccatcgaaggctgtgtggagctctgaggcctctgaccgggagctcaggacccaaaccctagtcaggtgtgaatttcgccaggaaggggtccctgcaagcagtcagccctgcccaccttccctctgcttctcctgccgctgagaggcccatcctcttctctgcagggcatccagccccacacggtggctggaggtggagagaaggcagcttttctggccctccacctctctgaccttcagtctcatccccggaaaataaggttggaggccggctcacagtgggcacaaacttggaaaagagaaggggctcttctctagcctccactggaggcaaggtctcacaagagaagccagtatgtagaacagctttgtacgagcaagtgagcctgtttcttcacagatgataacattgggctttagagaaagacctctttaaaatctagcagttactaccgtgccaaagagaggtggctgccagcacacttgcgtgattagccgtcagctccctccactgctcttcaggacgcctgtagccacagagcctccctgagggccccgtcgccagggtcacctcctgaagagcctccctgagggccccgtcgccagggtcaccccctgaagagcctccctgagggccccgtctccctaacacattccacattcttgttggcttcagtccttatttttcacagacatctcagccctgaccccagctgcgacacagcagtctgttaagatggcagacactgcggctgcctcatctgcgtggtccatcccggagacatctgcctggcgctctgctccaggccttcctggctcccctggtagggatctggctcagtgacccgaccctccttgcggctctctctggggtgcgccctgcatggacacagctgtccttggtgaacgtctgctgagtcaaagtggttttgctgcagtgagttccccgtgagtgcactgtgtgggtggtgcagcgcctggtgtgtagggaacttccatgcctttgctgtgtctctgggggctcctctgacggggcagctccctcctctccgccttaagctcctcctttcctttggcggtcagctctgtccagggtgtcagtttctgtgcctgtgactgggccccctcaacctgccccaccttggcctctgctccttggcagcctggccctgaacctctgttgggggctgcccgggcgctgacggtggctggtctaccatggtcacttgggcagaggcagcaacggccattgtcgtggaccgtgccagggcgagatgcagctggcaggggcagaggcagaacatctcccagggagctgagggcaggttggttccatcgtcccggagggcaggttggttccatcctcccaagtaaagagtgtgttaccctcagggcgagaggcaggtgggtgtgggtgctggcgcaggccagctgtcaaggatctgggctttctggtcttgctgcttctccagcactgcatgaatgacaccacctggccctttccagtgcccacaggcacacggcttgggagctgctgctgcggcgtctctgcccaggggcatctgccagggggtccctgccttggggtctgtgtcccaagggcgtctgcccagggatttctgctccgagagtgtctaccctggggtctctgcctggggatctgctgtcatcttccagacactgcagactggctcattaatggacacgggaaagcctcagaccttcaacggacacgggaaagcctcagaccttcaccgtttttgacacttacttgggatttttctttaaactatgctgtgaaaacttaattttttttttttttgagatggagtctcgcactgttagccgggctggagtgcagtggcacgatctcggctcactgcaacctccgcctcctgggttcaagcgattctcctgcctcagcctcctgagtagctgggattacaggcacctgccaccacagccagctaattttttgtatttttagtagagacggggtttcactatgttggccaggctggtctagaactccggacctcatgatccacctgcctcagcctcccaaagtgctgggattacagacgtaagccactatgcccagctgaaaacttaatatttaaacaaatttgatgctgtggctacaaaggattgcaactcttttccataaactccaagtttcagggttttccaactttaggaatttctatgtgtaaaatccagctgtcagcgttattgaactttgggattttgtctaagattgtgtggaagaatgtgtaggatacaagtgtggggtgaccagacacctgcggtggtgctgaacgatctcagacgcggtgtcttcaagtcatcctgcacagagggccgtgggtgtcagtgcctgcaggtgacggatggggttgggggagaggaggaggatgccggaagatggatgtgcagccacagcctctggagatcaaagtcaccactgacgagacagccagaggctcagatcagtcactcgtctccaacagcactgccctggccgacttcctcaggatcgcagcatggactcaggagggctgccatctggcagggtctgtgctgtggcagctcaggttagagcaacaggcctgctcctgccacctcagaagcacttgctagttagtcaaatgttatggcgcccttcagggggcctccaggtctttcacgtcttggaagtgtggcaacacattgggatgtgctggaggaagaaggtcaccctcggctctcagtgcccttctttagggcagcagctgccctctgaagatttggatgaattccaagaaagaccgtccttcgtgtctttcacctccgcgcctgctccctgcccctcagccttgtcccgttgcgtgcatgctgtccccgcctcagcaccatcctgctacacgcatgctctccccacctcggcaccatcctgctacacgcgtgctctccccgcctcggcaccatcctgctacacgcgtgctccgttttccgtgcctcagtgtcacgtttgtgtttctggttcactgtgctgttgatctgtgtgttacatcaaatgcagtttgttctttttacgttgctgtgttgtatttcctggtgtgcagaagccacagtgcgcttatccattctgctcttgaaggacttgagattgttttcagtttgtggctattagaagtcacggttgctatgaacattctcacacagatgtccctgtggacagttcccttggatccgcaactcccagtgccggctcacaggctagatgtatgtttcatttcagtggaaactgcggaagagttctcaaacgtggctgcatgtttcacacaccccagccccaaatgtggctgcatgtttcatacgcccccagccccattctgctggtaccaatttactgtattagtccgtgtgcacactactgataaagacatacccaagacagggaagaaaaagaggtttaattggactcgcagttccacatggctggggaggcctcagaatcatggtgggaggcaaaaggcacttcttacatggcggtggcaagagaaaatgaggaagaagcaaaagcggaaacccttgataaacccatcagatctcatgagacttattcactatcatgagaatagcacaggaaagaccggcccccataattcaattacctccccctgggcacctcccacaacacgtgggaattctgggagatacagttcaagttgagatttgggtggggatgccatcaaaccatatcaggagtccttaaatttgttaaattccccacatgtctcctcttctggtgccttcatttgtccctacagaggttctccgcgaagcactgtgcttcccccaacttgtttcccttcagcctggagaacttcttttcaatagttcttgtagtgcagctttgctgacaacaaatccctcaattttgtttcactgaaaatgtttttattgcaccttcccttttcaaaaacagctctatcgagatacagttcacacaccgcaaaattcattattgtaaattttgaattaagtagccattacctcaaaccagtgtccatttccccccattcccagcccctggcaaccacgaatctgctttctgcctctaggatttccttgtttgagatggcagcgtgtgcaaatggggcgtgtcacactcagtcttttattccagcttctttcacttgcaggatggttctgagtttcatccatgttctactgtgtgtattaataacttgttcctgaatagtacttcatcatatggatataccacattttcctcatccattcaccatctgatgggcatttggactgtttcagtttggagctattatgaataatgctgctatgaacatttacatataaatctctgtagacattcattcatcttacatagacacagagggatagaattgatgggttgtatggtgactttctgtttaatgttttaagaaactgtcaaactggccgggcacggtggctcacacctgaaatcctagcactttgggaggccgaggcaggtggatcacttgaggtcaggagtttgagaccagcctgaccaacagggtgaaaccctgtctatactaaaaatacaaaattagccaggcaccgtggttcacacctgtaatcccagctactcgggaggctgaggtaggagaattgcttgaacccagggggcggcgattgcagtgagccaagatcacaccactgcactccagcctgggcaacagagcaagactgtctcaaaaaaaaaaaaaaaaaaaaagaaaagaaaagaaactggcaaactgttttccaaaatggctgtgttgctgtacgttctcatcagcagcgtatgagagttttcatttctttacgtcctgccaacacttgtcactggcttcagtttgcgtttccctaatgactactgatgttaagcttttttttttttttttttttttttttgagatggagtctcactctgtcgctcaggctggagtgcagtggctcagtctcggctcactgcaatctccgcctcctgggttcaagcgcttctcctgcctcagccatctcagcagctgggattacaggcgcacagctccaggtccagctaattttttgtatttttatagagaccaggtttcaccgtgttggccaggctggtcttgaactcctgacctcaagtaacctgcctgcctcagcctcccaaaatgctgtgattatagccgtgagcccgccgcacccggccagatgttgagcattttttgtgtttatttttacttttttccttttaaattatttttgcagaaacagagcctccctatgttgcccaggctggcctcacactcctgagctcaagggatcctcccgcctcagcctcccaaagtgccgggattacgggcatgagcactgcacccagtgctgttttttacgttcttgtttgcatccgtatgtaatctttggtgaactgtctaatgaaatctttggccatttttaaattgggctgtttgtcttcttactgagttgtaagagttctatgtgtattccggatacgagtctcttttcagatgtacggtttacaaatatttcctccaactgcagcttgtctttttattttcttaatgtgtcttttggagcacacattaattttgatgaaattcattttataaaaaaaattttaaaaataaattcattttatcaatttttaaactttatagattgtgcttttggtatctcatctgagaagtctttgccaaaccacaggtcatgtcatgaagatattcccttttgttttttcttagaagttttctagttttagctcatacgtggaggtttctgacccactttgggttaattttgcatatggtgtgaggtagggtctaggagtcaccttctgcatggagatattcagtgtgtcagtgccatttgtgagaaagattatccttttgtccttttccctattggggacttggtttctttgccaagaatcacttgaccagatatctgtgcattcgtttatttctggactctccattgtgttttgtgggtctcttgtctaatcttacacagcatcacactgtgttcgttacttctggtttacgtcagttttggagttgggaactgtgtgttctcacctttaatctgccttttgaaatttattttggatcttctgggtcctttgccttttcgtgtaaaacgtaggataagtgtatcaatttctgcaaaataaagcttgccggaattttgggaagattgctttgaagctggagctcagtgtgggaagaactgccatcttcacaacatggagtgttcccgtctgcgagcctggcctctctccacccgcttatctgttcccctccctccctcgatggcagtgttgtgggtgctgctccgcggtgctgctgtctcccgcactctggtcgcctgtgtctttgctttcccgtctgtgggtcagcctagatcacccccgttgactgtgtctgacttttttcctcttttctgctgcgtcttgtttgttattaggtctattgaatgaattcattttggatcttgtgtttttcagttttatgattttttgcagttccacttctctttgcaattctccatcttccccacgttgttcatcttttctttgaaattccttaatctgcttattgcagtgatttgaagggccttgtctggtgattcggacgtttggatttcctgagacttcttcccttcagttggggatcacatctttgtgtccttacatgctttgtgactttgaagggttccagtctttgtctttgaaagaatgatattatttcttccccggagattcctgcctttctctgccaggcagctgcggtgaggcactcgtcactgcagtccagtgaggagatgagatgggctggggctggactgtggcatcggcatccgtcgaccccagtttcaacgccgtgtgggcgagatctgtcctgtgtgtcctgggcctcccttaggtgctgaccccacagcacgaagagtgccctcctccctccgccacacccttcggtgctccgtgtggaacaccgcgggtagagagggccatggaaggaatgcggctcaccagctcttcctgaagctttatgggcgacgcgagaacccgctaacgagtgaggaacttaaaacgtatttatatgtaagcaagaaatgtttattatggagtaaaatataaaattcacatgactcttttaaataaaagacttcacccgttcgctagtcactgcatgcctgtccatactgggaagcatgctgacttcaggtctgcgggcagccaggccctcctgccagcttccccaaggtgtacatccgccctctctgtgtagctggaagagcctgaccactcacgtctctccaggccacagatcccgaagcccttttctagctctgttcacgattgctcttcccctcacaggccagacgcagctgtcccgcgcaacatggcttctgtgggaaggggtcagagtttgaggcaccccttttagaagggaggcgctgcagactcttgaatgtgaaccatgagaacgctgtgcctggagccaggagcctccgccacgggccccagtgcctgctcatcttcctaccgagtgcttcctttccttcgtaggtttgggaaaagttcttaagttctgaaacgccgcggatcaatgtctttatggcagtgcctacaatatacaccaagctgatggagtactacgacaggcattttacccagccgcacgcccaggatttcttgcgtgcagtttgtgaagaaaaaattaggtaagtgaaaagagcccactttctcgttcagaaagtcttaaagatcaacagatacgacttatttctaataaatcactcctactaagttctgggaagcagtgctttccatttcctttcaatgttccctctctctctacccgtctccgtctctacctctctaactgtctctctctctctctacccgtctgtatgtatatctgtaatctcttccacgtcgatagctgcctggattctgtatcgctctctctgtcacactctgtctctctatctctctctgtctctctttgtctctctctctccatctctccatctatctgtcttctctgtctctcttgtcagactctccatctctgtcttctctctgtctctctccatcgctcttcatctgtctctccgtcttctctttctctatctctcctgtctctccatctgtctctatctctccatctgtctttgtctccgtctgtctgtctgctctctctcctgtccgtctctctctctctctgtcatggcgtctgaaggacaagggtgaggacagtgagctgacccgcttgctcctgcttcatctgcccacatgtcccacggcgcctgcctctcctatgcagtctctctgccttcgtgggcagccctgtgaggcctcctgcctggggcacgttctgctgcttttcctctcagccccgctcctcccctcccagctccctggataaacccctccctcccaggacaagctggtcttttgggccacccaggggcgtgtttgctctgcactctcccatgaacctgcaggcgtgggaacgtttcttttccctcgtggctgttgaggtgtggttcactaactggaaacgcacacgtgtggctcagtgagtcttcacacgcatcacaggcccgcacctccagcagagtcgtgggtggggtattttttctttttgtgagagggaggggtggcgtggagggtgcactgcaggaactgaaggctccactgccatccagtttccagtgggatgtgtgtgtctgtggctgccgcgcgctcctcccagtccccaggaagtgcacagggaagcggcacctttgttcctggagagaattccgggttgtccaaggcacatgtctgaaccgcttcgctctctttgccgttcccttgccccttttctgtgaggccaccggagcccatggttttgctgctgctactgctgggataccctggggctgggcaggccccaagctgagcagggtgagcacaacgttttaccaaatctaaggaaccaagggcaagaacgaggtcagtgaaggagaggatcaggtgatttctggggtgacagaggcaatgagacctcggccatctggatctcccagcgggggtcctgtcagtggtgcctcctcgtaaagcaggggcagcagcagggaccactccgctcagaccgcaaacaaaagcgccttccctactgcccgtgaggctgcgggaaatgctgtgtgagagcgcggggactcggagttctcagggcccgtgttctcctgccaagcctgagctgaccctgtgggccaagatggctgcagttctgcgggtggttctgagccccttgggtgtgcccggccccaccccttgggtgccgcggccattcacccatgtccgcgttctgctgcagagcctgcaagctgagccggctgtagtccccggatgtgcctggccgcagcctgcagcgccgtggctgttcacccgtgatcagctccgtggtcggcagctgcacggtcactgctgttcttgagcgtggttgtgaacagcgcaggaactttgcaggggacaccgcggaccctaagcacattgtttaccctcattagctgttggacctgcttccttctaaaatacacccaacagatcgttttcaaaaaacaaagtcacgccgtagcgcagactgcagcgttggtcccgggtgtcgcacagtggtgctgtacccacggcctggggctcctgcactcgtgaaggagctgccacttttgcaagcaagggccgcctcctgaggggctaaacctgccacctttgcacgcgagagccacgtcccaaggggctaaacctgcctttggttgtgccgcgtaggctgatggtctcaggctcagctgccctgcccctcccagtgctggagaagtggaagaacatcacgggccacaccctgctggagcggtatggcatgaccgagatcggcatggctctgtccgggcccctgaccactgccgtgcgcctgccaggtacgagcacttcccacagctgcgttcctcttccactgtgctctgagccccccaaggtgggccagtctcgaaccacccacattcggactgaagggcggcatggaggatgctcccccgtgggacaggccactcggccaggagagcactcaggatgcactgcgacctgtcccctctgggtagatcagccttctcccaagtctcagtcgggtggatgggggaggtgtctgtgctggcccctggctgtatgactggggagacaatgggaagaacagcaatgcctggaatgcaggcgtcagtgcatgtctcagaggaaggcggggggccatgctgttggctccagaccacatcagcagtggtggcagcctccgtctgtctggagtccgggtgccacacagcgccagcagcagtgccaggagaggtgggtgtggtgggcagggtgggatgagtcaagcacctgtcttccttctctagatgtgggctcctgataccgggcccctcttgtccagccttccctaacacatcccattctgactttcatctgacccaaccatttgagccctgggtcctccgctgggacttctgggaacagagcccacagctggggggccaccctgctgctttctgcgcagcccttccagtctgtctagagtagaagagagatctcagtgcagacttaaagtgagaccatcccgcacatctgtctgtgcagctgcttacctgcagacccagtaaaaattcacccctctggcgtgcagctctgtgtgtcttaagaaacatcatcacagtcaaaatagagaagggttcctcgcctcagaaactcccttcctagtgctcagcacctcctccacccccgaggcctggccccttgttcctgtttctcttcttgtggttttgctttttctgggaggccacgtggctaaatcctgcaggacgtggcctctgagcctgtctgcttccgcccggcttccgcccacagtcaactgcctgtgctgtgtgcgtcagagcccgcgcctttccctgctgagtggcatccgtggtgtgggtgcggcaccgcttgtgaccctgttttaagcaatgacacgtgagatgttatcaacatttgtgtgcaggtttctgtgcgaacgtggttttttatttcacctgggcagatacctaggagagagattgctgtgttgtctgaagctttcaagctgttctccagagcggctacaccatccccttccccctgcaatgggtgggaggtcacgagcacctgctgctccagcgggcggtggtggtgtctcgttgagttcatgattctctcatgatgggtggcgttgagcacctcttcctgttcgtgtcattccgttttcaactggggcctttgttttcttgagttttgagagcttttaaaattcgggacccaagtgtcagctgtgcgattttaaatatcatctcccagcttgtggtttgtcttcccattcacctaacagcgtctttaaaatcaggagttttaggttttggcccggtttatcaatttgttttgtgaattgtctgatgtcatatctaataaatccttgcgtagcccaaagtcacagagaatagtttcagctcttacgtttgggaccatgatccattttgagttaatgtttgtacatagtgcgagatacggaccacagttcttttttagtgtgtgaatgtctaactttttagcactgttcgttgaaaagactcccttctccatcgaacagccctttggatctttgttgaaagtccgtcgactcctgaggggtcggctcctgggctctgctctgtcccattgctttccgtgtgccctttggctcattccatgcctgcttggttcctgggactctagggtaagcgtggacatgggggttcaggcccaggcagggaccagctggtgccaggcagcgatacggtgctggggcctgcaaggtgagtgtgagggctggctggctgctgggctgggaggaggagagactgtaggctcacgcccctttgctgggcctggggagccatgggggctgttaagtgtattctgagtgtaaagtctcggtttggctggggcatcctgagcagaatgacagggccatggcagcgagatcctcagctgccgtgcagagctgccagtggggtggccgcacagagtgcagtgcctgctgcaacagtgcccagggcagtgggcgggtgggggcatgttgtgaaaagaagtcagtgtgagtgatgagaaatacatcctagtctcagaccccaggaaaccgccgtcagtgctggtggcccctgccctgggccggctcccgcgttagtctcagaccccaggaaacctccacctccgtcagtgctagcggcccctgctctgggctgactcgcgcatctccacgatggctgcggcaccagctgtttcttcggtggctaaagctctctggtggaaataagatggggaccttgaaatcaaatgtgactggtctgttgagtctctgtccttatcgttgtccttcttagtaggatgtgctggttttgtccagtgccaccggccacagtcaccacgtaatatggacggaatgagcaaagcccggctcgctgaggctgcaggctgcaggcaagtgaggactgaaagggtaacgggctctgggctttgtcctctctttgttccggacatgtgagcaggacaagttctgtgtattcagaatctgtctgcacagtttgtagttcatgatgactgttcatccacagcattgctttgtgggcgtcctctcttttgatcttctcgaaacagcccctgcgatggggtcatattttgcactcacatacaagaacccatgagcctgcccacggtcacgcggctggtgagtgatgcacttcccaggagcacggtgacctcttcaatggccctcactagagaagatggacagtgcccccctagccttttttactggaacagatacaaggctgagaagctgaaatcaggagcagcccagggaccactgtctacaccgagggagtcatgagcagcccagggaccactgtctacacccagggagtcaggagcagcccggggactgctgtctacaccgaggatgtcaggagcagcccagggaccactgtctacactgagagcgtcaggagcagcccagggaccgccgtccacaccaagagcgccaaggagcagcccagggaccgccgtccacaccgagggcgccaaggagcagatagtagcccagagacccaggggaggctcagcttccccacgctggaatcagaactcctaggcgaacaggaaggagccccagacagatggcacagggagaggagtccccggctgaggagggggatccagagaccctgaagcttcagggttattgggcaagaaacctgagtgcaccaatccccgagtcttcagctaccgacggcaggttccctcgggtgccggggatgctccctcttctctaaggcagagcccacagtaggttccctcaggcgccaaggacattccctcttctctaaggcagagcccacagcaggttccctcaggcgccagggacgttccctcttctctaaggcagagcccacggcaggttccctcgggcgccggggacgctctctcttctctaaggcagagcccacggcagattccctcgggcgccggggacgctctctcttctctaaggcagagcctgacggcaggttccctcgggcgccagggatgttccctcttctctaaggcagagcatacggcagtttccctggggcgccggggacgctccctcttctctaaggcagaatcaaatatctgtgattttatccttgcctttaaatcaccagcagtgtgagttctttggtttggaaaaaagtaagtaaagtcacctcagcattaaatccaatatgccccacaaaaactccaaaatgcagcctcctgagccatgtttctagagggcacggtggaggagagctttcctcactctcaggctctaacccccaccctggtggccatggccttgacccttgggtcggctccagccacaggctctgagctcatgcttggcctcgctgctcagtgcactgtccgtgctcggaagagagagaagctgggtggagggtgagctctgtcgtgtgttatggttacaggcctgctccgtgcggttcctgtggagggagatgaataattcatggccgaccactgctgggcctcgtcacactctaattggaggttgagctcagaggtgctcacggctcctgggccactctgtggcattgacagggagctccagggcctcattggcggtttccgttccctgggtcccagtccccagtcagagttatcagggaggggctggctgacagcgattttagaggtgggctgtggcaggaaggcagtgccccccacctgcctgcagctgcgctcccatctacattggcctttgcggggccagcctctgtccactctcttgagctctcatgtccacactgtcacatgcccggggcacagcgagcggcacctggagtgtggggacccctccctcgagctctcacgggtggcacctggagtgtgggggcccctgcctcaagctttcatgggtggcacctggagtgtgggggcccctccctgaagctctcacgggcggcacctggagtgtgggggccactccttgagctctcatggacaataccactgcttggctgctgcagaatccagacaccatcccagagcctcttcagcctctgcagatggtgtgggacggccacacggcctccccacctgcggcccccgcccctaccccagccgtgccgtgtccttgcgctgcgtccccgccccagtagaggcatcaccaggaagaggcgaaaggccgcctgtgatggtcctcttcttatgaaacgcccagaacagaaaaaccacggacgcggacagcagacctggtgccaggtctggggagggagggtgtggcggtcgtgggctgtgcgggagttctgactaggggaagtggggggctgtgcaatgtgtgtgcggaacaccgccgtgccgcgcactgaaatgggaagtcatgtgttatgcgggtttcacccccatttaaaaatcttcagaagcaaaacataaaggaggagaaaggatggaagaaagggggctgaagctggccccgccacaccccccatagtggtgacacgggtttctgaccagagtggaggttcggggcgtctgcatacctggaaccacagagaactcccgaggtgacactccgcacaccacactagcccggcttcgcctgcaggaccccaggtgtggacaggcccagcaggatcagcaagaccgagccgggcaccgacagcccctcaccaagcgtctggaggccgggacgccccatggattgcagagttcactgcactgaccctcgatgctgacccttgaagtgccggaaatctcagcgtggactcagacatgataagcgttcaggcactcccctgacgcaggccagggcaaaggcctcacgccccgggatagacaggaagtcccacgtctgctctgcccctaggtcatgcccgtgctgacgccacatcgccagggccgcactccatgagcagcctctgccgtcccaccagcaacctaaaccacaggcagagcgaggctgcggcagccctgcgtgtgccggcgggacacgtctcgccacctgggctctgcccccaccccggccagtgtaagatatgattttagccacgttgagactgtgcaggtgggatggatacactgagcaaatcatgggtgtctaataaatgagccagtacaaagtgtggtccacctgccatgcagagttcaggacagcccctcctggggacatagggcagatcctgccttagcccgtcgtgtgccgggcacacacaggtcccctcatcgtggacagccccggggccatcagggcaaggcgccagccctccctggccagcaagtgtgtaaaagtgggaatgacaccagaatctgtgggcagctgtgaggctttgggaagtaactgggaaagtgatgtatgaggggcccagggcaggccaggcccagcgtgccacgtgagtgcctgctgtgccacatggccatcactgtggcatcggctgggcctgagcacaccgtgcttgccagccacgtatcgtgtggcttttcacctgctggtgcctacaccatcttctctctgggtcacagggcacgtcgctccctccacacagactcccgcacgtggcacacgggagctcagcgggatccgagctcagtgtgtgcttctctcctccaggttcctctcactccagcctccccttcagtgtttctcctctcctgtaggttccgtggggaccccactgcctggagtacaggtgcgcattgtctcagaaaacccacagagggaagcctgctcctacaccatccacgcagagggagacgagagggggaccaaggtaagccactctgctcttggcaggtgggcggccgtgtgtccagtctaggccccccagggtggttacactggtgcatctttcccctggaggcagactcccctccacgcaggggaccagccccctggacactgcaggtgctggctggtgttgcaagggcactggctggtgttctgggccctgcctgctgcgtgtccgtctgtgcgttcacagagcagtgggcagagggagcccagggcggaacgccaaagggactcacacccgggcacacagctcctcccaggggccctgtccacggggacaggctgacgtgggccatgatggccttggctaagcggaagagataaagagcagaggccgttgttgttgatgggaatctggttagaaatatgaactggcctgaccctggcacccgtcctgaggggacgctgaccacaggcccccatagtaggtgtggggagattcacggggccctgcacgcggaggtgggtgcctgtgcagtgctctgtggctgcctccttgtcttgtgcgttattctaaagctgacaagggtgaacaagaacaaaggacattgtctcatttctgtgaggattttaacatgagagtctgctcatcacacgtgaactcatcacagagaaaggtttagggattatggggaaatggaatcttgatttaaaaggaaattattttctctgaagccagtatccacacctgataccacacatgattgactgtgttgccctgaggttttcaaagatcgagggatcctgagtctcatctctgtgcatttccttctctgtgacaccatcttggccctcacgggcacaactgagctccctgtgcagaggctgaggggccgtgggccttgctctcgtgagtgaacagccacacgccctccttgtaccttggtttccacacatgaccacgtgagggttggagcgatggtcgtggttggacgttttagctccagcaaccaagtaggatgtgggtggctttcagtgtcattaaatgacactgaaaggtgcagtggccgcaccttgtgtggagggccacacggcgtgtcccgcctggcctgggccccccgcagtgggctgttatcccccgtggccctgaagtgggtattctgtttccccgtggaaacctctcacctggggccacctgcagtggccgcaccttgtgtggagggccgcacagtgtgtcccgcctggcctgggccacccgcagtgggctgttatcccccgtggccctgaagtgggtattctgtttccccatggaaacctctcacctggggccacctgcagtggccgcaccttgtgtggagggccgcacagtgtgtcccgcctggcctgggccccccgcagtgggctgttatccctgtggcccccacagagccatggggcaacttgctgaaacccacctgggtggctgccccttgctatacccacctcccctgccctctgtagggccccagcccatgctgttgtcctgacatgcctctcctgggattcctgcctctgccctgctggtactaggctgctggccacaccccacatctcaggttcctgaatacaccggcccttcctggctctcaagtctgtgccctgcagtgcccctgcccccaactcgaggacctcccagctcagccagttccaaccctgtctgcagggacggggctcagcctgtgcctgggttggggacaccatctagtcagaaatgtccccagcagagagcagaacgtgagtggcgtgtggaggagtgagacgccccgtggctgtgcagccctctccaggtgtcagtcagctgacactcctgcctctgagcacctgctctgccggaaatggcagaaatgttgccagagaaaggggcggagcgggggtggggagcatttctgtcttaaattaaaacaaaacttaactgcttca

SEQ ID NO: 10544 - DNA, 940 bp, Homo sapiens
gctgctctgtcctctctgggtgggagccacctgtgtgatgatgcctgagttcagccctcagcaggtttgggaaaagttcttaagttctgaaacgccgcggatcaatgtctttatggcagtgcctacaatatacaccaagctgatggagtactacgacaggcattttacccagccgcacgcccaggatttcttgcgtgcagtttgtgaagaaaaaattaggctgatggtctcaggctcagctgccctgcccctcccagtgctggagaagtggaagaacatcacgggccacaccctgctggagcggtatggcatgaccgagatcggcatggctctgtccgggcccctgaccactgccgtgcgcctgccaggttccgtggggaccccactgcctggagtacaggtgcgcattgtctcagaaaacccacagagggaagcctgctcctacaccatccacgcagagggagacgagagggggaccaagggccccagcccatgctgttgtcctgacatgcctctcctgggattcctgcctctgccctgctggtactaggctgctggccacaccccacatctcaggttcctgaatacaccggcccttcctggctctcaagtctgtgccctgcagtgcccctgcccccaactcgaggacctcccagctcagccagttccaaccctgtctgcagggacggggctcagcctgtgcctgggttggggacaccatctagtcagaaatgtccccagcagagagcagaacgtgagtggcgtgtggaggagtgagacgccccgtggctgtgcagccctctccaggtgtcagtcagctgacactcctgcctctgagcacctgctctgccggaaatggcagaaatgttgccagagaaaggggcggagcgggggtggggagcatttctgtcttaaattaaaacaaaacttaactgcttca

SEQ ID NO: 10545 - DNA, 883 bp, Homo sapiens
aattccctaaagcctctggctgtgtgtggcgctgtcctctgtccccagggtgaccgggctggtccacaagtgggcatggaccaaagacgacgtgatcctccacgtgctcccgctgcaccacgtccatggtgtggtcaacgcgctgctctgtcctctctgggtgggagccacctgtgtgatgatgcctgagttcagccctcagcaggtttgggaaaagttcttaagttctgaaacgccgcggatcaatgtctttatggcagtgcctacaatatacaccaagctgatggagtactacgacaggcattttacccagccgcacgcccaggatttcttgcgtgcagtttgtgaagaaaaaattaggctgatggtctcaggctcagctgccctgcccctcccagtgctggagaagtggaagaacatcacgggccacaccctgctggagcggtatggcatgaccgagatcggcatggctctgtccgggcccctgaccactgccgtgcgcctgccaggttccgtggggaccccactgcctggagtacaggtgcgcattgtctcagaaaacccacagagggaagcctgctcctacaccatccacgcagagggagacgagagggggaccaaggtgaccccagggtttgaagaaaaggagggggagctgctggtgaggggaccctccgtgtttcgagaatactggaataaaccagaagaaactaagagtgcattcaccctggatggctggtttaagacaggggacaccgtggtgtttaaggatggccagtactggatccgaggccggacctcagtggacatcatcaagactggaggctacaaggtcagcgccctggaggtggagtggcacctgctggcccaccccagcatcaca

SEQ ID NO: 10546 - DNA, 581 bp, Homo sapiens
cgcacgcccaggatttcttgcgtgcagtttgtgaagaaaaaattaggttccgtggggaccccactgcctggagtacaggtgcgcattgtctcagaaaacccacagagggaagcctgctcctacaccatccacgcagagggagacgagagggggaccaaggtgaccccagggtttgaagaaaaggagggggagctgctggtgaggggaccctccgtgtttcgagaatactggaataaaccagaagaaactaagagtgcattcaccctggatggctggtttaagacaggggacaccgtggtgtttaaggatggccagttaaccagagccccttttcctcaggggacaccgtggtgtttaaggatggccagtactggatccgaggccggacctcagtggacatcatcaagactggaggctacaaggtcagcgccctggaggtggagtggcacctgctggcccaccccagcatcacagatgtggctgtgattggagttccggatatgacatggggccagcgggtcactgctgtggtgaccctccgagaaggacactcactgtcccacagggagctcaaagagtgg

SEQ ID NO: 10547 - DNA, 623 bp, Homo sapiens
tggctgtgacaagaccctaagacgggaagctgcgtgcagggcacttgagggcccgctgaggagaagccgcctgtgagggacaggactgggcagggaaggccaccagccatgcggtcacagcccaggactccgccagtcctgcaggagccctggagccaggcccttgctgtccaggccacttgctgtacctggcccacagctacctcccctgcagccctgagtcctgcttgctgtgcccggctcaggctgagactgcagtgcttgtccattcaccatgaaagaaagaagaacaggaagggaggcaggaggaagtaagttagaggattaatccaaatgttccaactgtctaatgggagttccaacaagaagatatccagggaggaaattcacagtcaaatttccccaaaccaaaggtcatgagttttcaggttgaaagaacacccaaccaagaggagagaaaacagcattctaaatatcggaaggaaacgaaacctcgcctcaggcatgcgggctctgacgggcaggatggcggcacggagggctgctgtatccagtgaagtcagcagttcagatgaaacagataactcccttaaaagacacaaattgccaagactgacgcaaac

SEQ ID NO: 10548 - DNA, 506 bp, Homo sapiens
tggctgtgacaagaccctaagacgggaagctgcgtgcagggcacttgagggcccgctgaggagaagccgcctgtgagggacaggactgggcagggaaggccaccagccatgcggtcacagcccaggactccgccagtcctgcaggagccctggagccaggcccttgctgtccaggccacttgctgtacctggcccacagctacctcccctgcagccctgagtcctgcttgctgtgcccggctcaggctgagactgcagtgcttgtccattcaccatgaaagaaagaagaacaggaagggaggcaggaggaagttgaaagaacacccaaccaagaggagagaaaacagcattctaaatatcggaaggaaacgaaacctcgcctcaggcatgcgggctctgacgggcaggatggcggcacggagggctgctgtatccagtgaagtcagcagttcagatgaaacagataactcccttaaaagacacaaattgccaagactgacgcaaac

SEQ ID NO: 10549 - DNA, 4095 bp, Homo sapiens
gttgggcgccggaactggtccggcccgactcacgaccccgcgggacccggccggaacccggcccgaccccggcgcgcgcgcggcggaggacgaggaagagttgtggcgaggcagatcctgccccgtggccgcggccgtctcgtaggtgtcccaccggccttccgggttccagcgccaggcctggtgcctgccccaggaggatgagcatttgcattgcctgcaccttatcgtgcccttccacctgctgaagcagctgtgcctgccgctcttgtgaactgcgaacttccccttacctcctctctctggctcgggagctggctcggccgcctgtcagtgcaatgctgccccatgtggtgctcaccttccggcgcctgggctgcgccttggcgtcctgccggctggcgcctgcgagacacagaggaagtggtcttctgcacacagccccagtggcccgctcggacaggagcgccccggtgttcacccgtgccctggcctttggggacagaatcgccctggttgaccagcacggccgccacacgtacagggagctttattcccgcagccttcgcctgtcccaggagatctgcaggctctgcgggtgtgtcggcggggacctccgggaggagagggtctccttcctatgcgctaacgatgcctcctacgtcgtggcccagtgggcgtcatggatgagtggcggtgtggcagtccccctctacaggaagcatcccgcggcccagctggagtatgtcatctgcgactcccagagctctgtggtccttgccagccaggagtacctggagctcctgagcccggtggtcaggaagctgggggtcccgctgctgccgctcacaccagccatctacactggagcagtagaggaaccggcagaggtcccggtcccagagcagggatggaggaacaagggcgccatgatcatctacaccagtgggaccacggggaggcccaagggcgtgctgagcacgcaccaaaacatcagggctgtggtgaccgggctggtccacaagtgggcatggaccaaagacgacgtgatcctccacgtgctcccgctgcaccacgtccatggtgtggtcaacgcgctgctctgtcctctctgggtgggagccacctgtgtgatgatgcctgagttcagccctcagcaggtttgggaaaagttcttaagttctgaaacgccgcggatcaatgtctttatggcagtgcctacaatatacaccaagctgatggagtactacgacaggcattttacccagccgcacgcccaggatttcttgcgtgcagtttgtgaagaaaaaattaggctgatggtctcaggctcagctgccctgcccctcccagtgctggagaagtggaagaacatcacgggccacaccctgctggagcggtatggcatgaccgagatcggcatggctctgtccgggcccctgaccactgccgtgcgcctgccaggttccgtggggaccccactgcctggagtacaggtgcgcattgtctcagaaaacccacagagggaagcctgctcctacaccatccacgcagagggagacgagagggggaccaaggtgaccccagggtttgaagaaaaggagggggagctgctggtgaggggaccctccgtgtttcgagaatactggaataaaccagaagaaactaagagtgcattcaccctggatggctggtttaagacaggggacaccgtggtgtttaaggatggccagtactggatccgaggccggacctcagtggacatcatcaagactggaggctacaaggtcagcgccctggaggtggagtggcacctgctggcccaccccagcatcacagatgtggctgtgattggagttccggatatgacatggggccagcgggtcactgctgtggtgaccctccgagaaggacactcactgtcccacagggagctcaaagagtgggccagaaatgtcctggccccgtacgcggtgccctcggagctggtgctggtggaggagatcccgcggaaccagatgggcaagattgacaagaaggcgctcatcaggcacttccacccctcatgacccggcagactgggactgcgggtctggtggggagcagcagacgtccccttcacaccgagaaccacgggggcccgtccaagacctggcctcccttaaacctgaaccccccaaatcaggtcacgtagaatcaagaactgtttgggatgaaatcaccatgtggggtccccagcctcgggccagttgttgcagctcaaggagaccgtccctggtgtcacctctgcctggtcaccgccgacctcatctgtgcagcgcggtgcagccagcccctggccccacgtgctgaggcacctcccgccccacagtgccctgcagttgccaggctctccagggcaggtcccagaggtttcccacaaaaaacaaagactccactggaggaaacaagcccctgtcccacgccgtctgcacgtgcctgtgcctcacccagagccagtgtctcccggcccacataggaggtctgggcagccacccagggggccctcctgggaggagctgagggttcacaagcctcccagaaccagccctgtcccatgggttccgtgcatttcctggtgctgctcttggaggagagcagctcccactgtggggacacctgccaccctgcacactactgtgtgtccatcagcatgtgtcacagaaagtgcgtggacggatggccccggagctgctctgccgtgaccctgcctcaccccccagcgcagggactttccaggtcatctccacaccagcccctcagccggtgaaccctctctcccatcaccgtctccacccagacccccacctgccccatggcccccatttcatgtctgtggctcaccagcttttccccagacccagctccggagcccacaggcgtggccgatgcagaaacctcaggaaggtgtgttgtgaatgttgggtgcacccacgttgcatttacttagcggggccaattcagatgcacaggggccacatgcagaatccagaagtttctggacaattttcagaagaataggctgcctcctccccacagcctgggggaagtaacagtcatcgcccagcagtgtctggcctgaacttacccagaacattctgcccccggaatgcacgtctgaaagagtggccagaaacgagtgtgccgggcaggaggccagccccatctcaggctcacgtgcctctgacaggagaccagccccatctcaggctcacatgcctcgcggacagttggacgtggcctggggcccctgctcacttgagcatgtcgcccaccaagcttgtctgaggccacagagcagcgtcccagccctgttttccaggactggtgggtgccccagtccacggccctgccccacccgaactcctgcctcacggtgtggccttgtgcatccccatggcctgaccccgggaacagtcagaggaaggggtcccgccctcccgccagaggcctggacccaagggaacggcagtcagagactacagtccagacgtttgtgtctaggccttgctggtagctaaggaaatgccttctgttgggaaaaggtcaaatttaacatagcaaaatttttacttaattccactaattttacatttgcatctctctcctttaatcctgaaacttttgattcctaaaaagcttacataatcatttgctttatccgatagtatacatcagtatatcatgctttcgaaataatgagtgtaactttctgctgacaatactacaaactacagaaagcctggagctcattgaccagaaactgcagagagcctggagctcgttgaccacaaactacagaaagcctggagctcgttgaccagccggttgaccagaatacggtgctccaaggacatgcggttgaatgccgtgttctaaagtcacgagtgactctccagctggtccctgtgccaggctggtcggccttcgtgcacacagtccgccagtgcccagccaggcccctggttcccctctgctccaccagccgagaacaagcccgtcctggagggaactcatcctctcctccctccccattaaagcccagtttattcccca

SEQ ID NO: 10550 - DNA, 6379 bp, Homo sapiens
ctcggccgcctgtcagtgcaatgctgccccatgtggtgctcaccttccggcgcctgggctgcgccttggcgtcctgccggctggcgcctgcgagacacagaggaagtggtcttctgcacacagccccagtggcccgctcggacaggagcgccccggtgttcacccgtgccctggcctttggggacagaatcgccctggttgaccagcacggccgccacacgtacagggagctttattcccgcagccttcgcctgtcccaggagatctgcaggctctgcgggtgtgtcggcggggacctccgggaggagagggtctccttcctatgcgctaacgatgcctcctacgtcgtggcccagtgggcgtcatggatgagtggcggtgtggcagtccccctctacaggaagcatcccgcggcccagctggagtatgtcatctgcgactcccagagctctgtggtccttgccagccaggagtacctggagctcctgagcccggtggtcaggaagctgggggtcccgctgctgccgctcacaccagccatctacactggagcagtagaggaaccggcagaggtcccggtcccagagcagggatggaggaacaagggcgccatgatcatctacaccagtgggaccacggggaggcccaagggcgtgctgagcacgcaccaaaacatcagggctgtggtgaccgggctggtccacaagtgggcatggaccaaagacgacgtgatcctccacgtgctcccgctgcaccacgtccatggtgtggtcaacgcgctgctctgtcctctctgggtgggagccacctgtgtgatgatgcctgagttcagccctcagcaggtttgggaaaagttcttaagttctgaaacgccgcggatcaatgtctttatggcagtgcctacaatatacaccaagctgatggagtactacgacaggcattttacccagccgcacgcccaggatttcttgcgtgcagtttgtgaagaaaaaattaggctgatggtctcaggctcagctgccctgcccctcccagtgctggagaagtggaagaacatcacgggccacaccctgctggagcggtatggcatgaccgagatcggcatggctctgtccgggcccctgaccactgccgtgcgcctgccagtaggatgtgctggttttgtccagtgccaccggccacagtcaccacgtaatatggacggaatgagcaaagcccggctcgctgaggctgcaggctgcagcattgctttgtgggcgtcctctcttttgatcttctcgaaacagcccctgcgatggggtcatattttgcactcacatacaagaacccatgagcctgcccacggtcacgcggctggttccgtggggaccccactgcctggagtacaggtgcgcattgtctcagaaaacccacagagggaagcctgctcctacaccatccacgcagagggagacgagagggggaccaaggtgaccccagggtttgaagaaaaggagggggagctgctggtgaggggaccctccgtgtttcgagaatactggaataaaccagaagaaactaagagtgcattcaccctggatggctggtttaagacaggggacaccgtggtgtttaaggatggccagtactggatccgaggccggacctcagtggacatcatcaagactggaggctacaaggtcagcgccctggaggtggagtggcacctgctggcccaccccagcatcacagatgtggctgtgattggagttccggatatgacatggggccagcgggtcactgctgtggtgaccctccgagaaggacactcactgtcccacagggagctcaaagagtgggccagaaatgtcctggccccgtacgcggtgccctcggagctggtgctggtggaggagatcccgcggaaccagatgggcaagattgacaagaaggcgctcatcaggcacttccacccctcatgacccggcagactgggactgcgggtctggtggggagcagcagacgtccccttcacaccgagaaccacgggggcccgtccaagacctggcctcccttaaacctgaaccccccaaatcaggtcacgtagaatcaagaactgtttgggatgaaatcaccatgtggggtccccagcctcgggccagttgttgcagctcaaggagaccgtccctggtgtcacctctgcctggtcaccgccgacctcatctgtgcagcgcggtgcagccagcccctggccccacgtgctgaggcacctcccgccccacagtgccctgcagttgccaggctctccagggcaggtcccagaggtttcccacaaaaaacaaagactccactggaggaaacaagcccctgtcccacgccgtctgcacgtgcctgtgcctcacccagagccagtgtctcccggcccacataggaggtctgggcagccacccagggggccctcctgggaggagctgagggttcacaagcctcccagaaccagccctgtcccatgggttccgtgcatttcctggtgctgctcttggaggagagcagctcccactgtggggacacctgccaccctgcacactactgtgtgtccatcagcatgtgtcacagaaagtgcgtggacggatggccccggagctgctctgccgtgaccctgcctcaccccccagcgcagggactttccaggtcatctccacaccagcccctcagccggtgaaccctctctcccatcaccgtctccacccagacccccacctgccccatggcccccatttcatgtctgtggctcaccagcttttccccagacccagctccggagcccacaggcgtggccgatgcagaaacctcaggaaggtgtgttgtgaatgttgggtgcacccacgttgcatttacttagcggggccaattcagatgcacaggggccacatgcagaatccagaagtttctggacaattttcagaagaataggctgcctcctccccacagcctgggggaagtaacagtcatcgcccagcagtgtctggcctgaacttacccagaacattctgcccccggaatgcacgtctgaaagagtggccagaaacgagtgtgccgggcaggaggccagccccatctcaggctcacgtgcctctgacaggagaccagccccatctcaggctcacatgcctcgcggacagttggacgtggcctggggcccctgctcacttgagcatgtcgcccaccaagcttgtctgaggccacagagcagcgtcccagccctgttttccaggactggtgggtgccccagtccacggccctgccccacccgaactcctgcctcacggtgtggccttgtgcatccccatggcctgaccccgggaacagtcagaggaaggggtcccgccctcccgccagaggcctggacccaagggaacggcagtcagagactacagtccagacgtttgtgtctaggccttgctggtagctaaggaaatgccttctgttgggaaaaggtcaaatttaacatagcaaaatttttacttaattccactaattttacatttgcatctctctcctttaatcctgaaacttttgattcctaaaaagcttacataatcatttgctttatccgatagtatacatcagtatatcatgctttcgaaataatgagtgtaactttctgctgacaatactacaaactacagaaagcctggagctcattgaccagaaactgcagagagcctggagctcgttgaccacaaactacagaaagcctggagctcgttgaccagccggttgaccagaatacggtgctccaaggacatgcggttgaatgccgtgttctaaagtcacgagtgactctccagctggtccctgtgccaggctggtcggccttcgtgcacacagtccgccagtgcccagccaggcccctggttcccctctgctccaccagccgagaacaagcccgtcctggagggaactcatcctctcctccctccccattaaagcccagtttattccccatcttggcctctggtgctgacctggcctctggagacacaggccggggggtgctgtttgcgaactcaccgtgactgagctccatgaggataccacagtcccacgtggctggcagcgcccaccccacacaccctgccccttgctgggcggccccatgccacaaaagttagacccaggagcaggtgccctgggagcaggctgccaccagctgggtcagaagcccctctacatgcctggtgcttttgacctcctagggaggctggcttgaatctggaaagtcaccagttctgaccccagccagacacaggggtgctgccaggagctgctcccaggcgggtggcccagcttctctcaggcaccaggggatggcaggactcctggtgaccagctggtccccaaagccgtggcaccgcgcctgctgctgccagcaaagtcccacacacagcctgtggcaggtgccgccccattctttctgcccctccctcatcaggggccagggtgaagcccctgccgccctctgccttccctccacctgcggcttccctggcagggagaccatggacccagctcctgcctcctccattcgtttaacagatagggcccaggccagcagcccaggcattaggctggccggtccactgaggcctagacaggccaggcctgaggcagctcaggagtgccaagctggccccacgttcccacccaacagcggcccttggggctgccttcctgccaggtgtccaggcccaacacacaagacctgagcctgctctgcctcagtttccctactctgtgaactgcggctgctgctctctcggggcccttctagccctggccaaggggtgggggctttgttccctcgggcgtcctgtccctggggactggccacacacacaccacacactgccctcccacctggactctgtcccagcggcaccagggtcaggagcaggagcctcaggacccacgcagcaccaggcacagcacggagtgaggcagtgggcggtgtggcaagcgctgtgtgcaccactaacctggaggagccacggctcccggaccctcgtgtcaaagctgccggcctcctttgctgggagcctgagaggaggtcctggtgcagaacagcagcttgttgccagccacagtgagaaggtggtgagtgtgccagccactgagttaaccatcagtaacaggaggcgtgtgcagacaggtgtggaccacagcagccacaagagagacgaggtcactggaggataaacatccgtgactgcacctcatgatccatcacgcacgacggccgcagcatctcctgccagctgccggcacagacaagagcacgggatggacgaccgcggtagcaacgtggggctcatctgcctctctctgagcaggaagcccgtcactctgtgcggtgtgcactgaccccagccagtggatgttccccgtccaagagcaaagctacagtcggctgcaggtgcagtgacttttgcacagtggaagaatttctccagaagatattcctgcaggtggaatcactggatcgtaggcccagatgtcttccacttacttgattttgcctgatgccttccaaggaggctgtgcacagcaggtgtgagatgccccatctcaccaaccggccaacatcccgatgggagatgttgagttttcaccacgctgctgagtgtgacgtggaatcttcttattttagcttgcatttccctgattacaagtcaggtggaacatctcgaatatgtttctgggccatttgattttcctgcaagtcacctgttccagttctttgcccatttcctgttgggttggtcaatattttttgtgattacacgttggatacgtggctggcctttggcttgcctttgacttcgtttgttctatcgaagcatgtgcagaattgttaaattttaatgtattcaaatgcattaatctcatttcttatttttgttgttttattttttgttttttgtttttttgagacagagtctcgctctgtctcccaggctggaatacagtgacacgatcttggctcactgcaacctctgcctccccacttcaagcaatcctcctgcctcagcttcctgagaagctgggaccacaggcatgtgccatcatgtccggctaattttctttttaaaatgttgtagcaatggagcctgggctcaagccatcttcccacctcagcctgccaagtagctgggaccacagacatgtgccactgctgcgcccagctagcctttaatatttttaaatgctgtaagatctgcaggtttttttccaaccaagtttatagcttttcaccccacggatccccgaggccatgacaggcagtgacctccttggggcacccgcagagtcctcccccccatcttgggagggcttgtcc

SEQ ID NO: 10551 - DNA, 4990 bp, Homo sapiens
gaagcagctgaagcggcggtagcggcggcggctcgggcagaggggcgggagctgaggcgggagcggacaggctggtgggcgagcgagaggcggcggaatggtggactaccacgcggcgaaccagtcgtaccagtacggccccagcagcgcgggcaatggcgctggcggcgggggcagcatgggcgactacatggcccaggaggacgactgggaccgggacctgctgctggacccggcctgggagaagcagcagcgcaagaccttcacggcatggtgcaactcccacctgcggaaggcaggcacacagatcgagaacattgatgaggacttccgagacgggctcaagctcatgctgctcctggaggtcatatcaggggagcggttacctaagccggagcgggggaagatgagagtgcacaaaatcaacaatgtgaacaaagcgctggactttattgccagcaaaggcgtcaagctggtctccatcggggcagaagagattgtggacggcaacgcaaagatgaccctgggaatgatctggaccatcatccttaggttcgccatccaggacatctccgtggaagagacctcggccaaggaagggctccttctctggtgccagagaaagacagccccgtataagaacgtcaatgtgcagaacttccacatcagctggaaggatggtcttgccttcaatgccctgatccaccggcacagaccagagctgattgagtatgacaagctgaggaaggacgaccctgtcaccaacctgaacaatgccttcgaagtggctgagaaatacctcgacatccccaagatgctggatgcagaggacatcgtgaacacggcccggcccgacgagaaggccataatgacctatgtgtccagcttctaccatgccttttcaggagcgcagaaggctgaaactgccgccaaccggatctgtaaggtgctggctgtcaaccaagagaacgagcacctgatggaggactacgagaagctggccagcgacctcctggagtggatccggcgcaccatcccctggctggaggaccgtgtgccccaaaagactatccaggagatgcagcagaagctggaggacttccgcgactaccggcgtgtgcacaagccgcccaaggtgcaggagaagtgccagctggagatcaacttcaacacgctgcagaccaagctgcgcctcagcaaccggcccgccttcatgccctccgagggcaagatggtctcggacatcaacaatggctggcagcacttggagcaggctgagaagggctacgaggagtggctgctgaatgagatccgcaggctggagcggctcgaccacctggcagagaagttccggcagaaggcctccatccacgaggcctggactgacgggaaggaagccatgctgaagcaccgggactacgagacggccacactatcggacatcaaagccctcattcgcaagcacgaggccttcgagagcgacctggctgcgcaccaggaccgcgtggagcagatcgccgccattgcccaggagctcaacgagctggattactacgactcccacaatgtcaacacccggtgccagaagatctgtgaccagtgggacgccctcggctctctgacacatagtcgcagggaagccctggagaaaacagagaagcagctggaggccatcgaccagctgcacctggaatacgccaagcgcgcggcccccttcaacaactggatggagagcgccatggaggacctccaggacatgttcatcgtccataccatcgaggagattgagggcctgatctcagcccatgaccagttcaagtccaccctgccggacgccgatagggagcgcgaggccatcctggccatccacaaggaggcccagaggatcgctgagagcaaccacatcaagctgtcgggcagcaacccctacaccaccgtcaccccgcaaatcatcaactccaagtgggagaaggtgcagcagctggtgccaaaacgggaccatgccctcctggaggagcagagcaagcagcagtccaacgagcacctgcgccgccagttcgccagccaggccaatgttgtggggccctggatccagaccaagatggaggagatcgggcgcatctccattgagatgaacgggaccctggaggaccagctgagccacctgaagcagtatgaacgcagcatcgtggactacaagcccaacctggacctgctggagcagcagcaccagctcatccaggaggccctcatcttcgacaacaagcacaccaactataccatggagcacatccgcgtgggctgggagcagctgctcaccaccattgcccgcaccatcaacgaggtggagaaccagatcctcacccgcgacgccaagggcatcagccaggagcagatgcaggagttccgggcgtccttcaaccacttcgacaaggatcatggcggggcgctggggcccgaggagttcaaggcctgcctcatcagcctgggctacgacgtggagaacgaccggcagggtgaggccgagttcaaccgcatcatgagcctggtcgaccccaaccatagcggccttgtgaccttccaagccttcatcgacttcatgtcgcgggagaccaccgacacggacacggctgaccaggtcatcgcttccttcaaggtcttagcaggggacaagaacttcatcacagctgaggagctgcggagagagctgccccccgaccaggccgagtactgcatcgcccgcatggcgccataccagggccctgacgccgtgcccggtgccctcgactacaagtccttctccacggccttgtatggcgagagcgacctgtgaggccccagagacctgacccaacacccccgacggcctccaggaggggcctgggcagccccacagtcccattcctccactctgtatctatgcaaagcactctctgcagtcctccggggtgggtgggtgggcagggaggggctggggcaggctctctcctctctctctttgtgggttggccaggaggttcccccgaccaggttggggagacttggggccagcgcttctggtctggtaaatatgtatgatgtgttgtgcttttttaaccaaggaggggccagtggattcccacagcacaaccggtcccttccatgccctgggatgcctcaccacacccaggtctcttcctttgctctgaggtcccttcaaggcctccccaatccaggccaaagccccatgtgccttgtccaggaactgcctgggccatgcgaggggccagcagagggcgccaccaccacctgacggctggggacccacccagcccctctcccctctctgctccagactcacttgccattgccaggagatggccccaacaagcaccccgcttttgcagcagaggagctgagttggcagaccgggcccccctgaaccgcaccccatcccaccagccccggccttgctttgtctggcctcacgtgtctcagattttctaagaaccaaaaaaaaaaaaggaaaaaaaacacaaaacaacaaaaaccaaaaaaaaaaaaaatcacaaaaacaaaaaaactataaaaaagaaagaattaaaaactttcagagaattactatttactttattaacttacggatttattatataaatatatattcacctagcaacatatctctgccgtctctcctgctctcataatgaagacatagccgattctctgcccgggccccttgctgatgctcctccgggtctgcgtcgggcgtgggtctctggggaccctccagaggtggaggtgggctgatggcctggctgcctggtggttgatggttttgctccccctaccttttttttttgagtttattctgattgattttttttcttggtttctggataaaccaccctctggggacaggataataaaacatgtaatatttttaagaaggattcctgcagcatcatctttttttatttctcctgtgtctgtcctccaccttctaggagagccagggcagagctagcactgtcttaagctgtcaacgtggactagctcgtgtcatctgctcgagaagggctgtcgctgttcttgtttctgagtgaggagtacgcaggccagagtggtcacccggccgtgagcagtgagggccagagactagccccagacaggtggatgccagagagagtggcacccatgccaggcaaggcctagggaggtggtcttgctcagcaaccctgccctgagcagcaggtgcgcccatccggagatcctaggagaaggtggccacctccatccactaaggaagagaaggaagacagtggcttgaggcagggagctcgcaggacagagcctgagccaccctgtccctcccacctggctcacctgtctgtgggtcaggcagatgaccccctcacccccatccaggtgctggctgcagtggcctgtgcagagaggggcagggtgagtgcccaccagtccccgtaccccttccccccatgccccaccatgccggggtggtactcacagaagatgcaggtgaggtgggccacacaggacacgaaccgctcgaagtccacacgcagacggctatcccggtagcggctggtgagggtctgggtcagctggttgttcaggtggaagcctagggggaggctgcttctgagcccagtggcccacagggaacccaccttggcattgcatccccaccccacctcctcagggaggacatgaatgccacagggtgtcacaccccaactctgccccatcccggcagggtgagtacaggctgatcccttcaatcctctgggcctgtttcctcatccatcaaacggactaagacagccccgaccccatagggtgtgtgaagacagaacgctcaggacagcgtctgacacgtgactcgatgtgtgggtactgttactccttaaatcctgtggggctttctccttgccagtgggcactggaggatatttctgtgcagcaaaaaatatagtcaatcccatatgga

SEQ ID NO: 10552 - DNA, 2102 bp, Homo sapiens
gcggcggaatggtggactaccacgcggcgaaccagtcgtaccagtacggccccagcagcgcgggcaatggcgctggcggcgggggcagcatgggcgactacatggcccaggaggacgactgggaccgggacctgctgctggacccggcctgggagaagcagcagcgcaaggctgaaactgccgccaaccggatctgtaaggtgctggctgtcaaccaagagaacgagcacctgatggaggactacgagaagctggccagcgacctcctggagtggatccggcgcaccatcccctggctggaggaccgtgtgccccaaaagactatccaggagatgcagcagaagctggaggacttccgcgactaccggcgtgtgcacaagccgcccaaggtgcaggagaagtgccagctggagatcaacttcaacacgctgcagaccaagctgcgcctcagcaaccggcccgccttcatgccctccgagggcaagatggtctcggacatcaacaatggctggcagcacttggagcaggctgagaagggctacgaggagtggctgctgaatgagatccgcaggctggagcggctcgaccacctggcagagaagttccggcagaaggcctccatccacgaggcctggactgacgggaaggaagccatgctgaagcaccgggactacgagacggccacactatcggacatcaaagccctcattcgcaagcacgaggccttcgagagcgacctggctgcgcaccaggaccgcgtggagcagatcgccgccattgcccaggagctcaacgagctggattactacgactcccacaatgtcaacacccggtgccagaagatctgtgaccagtgggacgccctcggctctctgacacatagtcgcagggaagccctggagaaaacagagaagcagctggaggccatcgaccagctgcacctggaatacgccaagcgcgcggcccccttcaacaactggatggagagcgccatggaggacctccaggacatgttcatcgtccataccatcgaggagattgagggcctgatctcagcccatgaccagttcaagtccaccctgccggacgccgatagggagcgcgaggccatcctggccatccacaaggaggcccagaggatcgctgagagcaaccacatcaagctgtcgggcagcaacccctacaccaccgtcaccccgcaaatcatcaactccaagtgggagaaggtgcagcagctggtgccaaaacgggaccatgccctcctggaggagcagagcaagcagcagtccaacgagcacctgcgccgccagttcgccagccaggccaatgttgtggggccctggatccagaccaagatggaggagatcgggcgcatctccattgagatgaacgggaccctggaggaccagctgagccacctgaagcagtatgaacgcagcatcgtggactacaagcccaacctggacctgctggagcagcagcaccagctcatccaggaggccctcatcttcgacaacaagcacaccaactataccatggagcacatccgcgtgggctgggagcagctgctcaccaccattgcccgcaccatcaacgaggtggagaaccagatcctcacccgcgacgccaagggcatcagccaggagcagatgcaggagttccgggcgtccttcaaccacttcgacaaggatcatggcggggcgctggggcccgaggagttcaaggcctgcctcatcagcctgggctacgacgtggagaacgaccggcagggtgaggccgagttcaaccgcatcatgagcctggtcgaccccaaccatagcggccttgtgaccttccaagccttcatcgacttcatgtcgcgggagaccaccgacacggacacggctgaccaggtcatcgcttccttcaaggtcttagcaggggacaagaacttcatcacagctgaggagctgcggagagagctgccccccgaccaggccgagtactgcatcgcccgcatggcgccataccagggccctgacgccgtgcccggtgccctcgactacaagtccttctccacggccttgtatggcgagagcgacctgtgaggccccagagacctg

SEQ ID NO: 10553 - DNA, 1566 bp, Homo sapiens
atggtggactaccacgcggcgaaccagtcgtaccagtacggccccagcagcgcgggcaatggcgctggcggcgggggcagcatgggcgactacatggcccaggaggacgactgggaccgggacctgctgctggacccggcctgggagaagcagcagcgcaagaccttcacggcatggtgcaactcccacctgcggaaggcaggcacacagatcgagaacattgatgaggacttccgagacgggctcaagctcatgctgctcctggaggtcatcgagctggattactacgactcccacaatgtcaacacccggtgccagaagatctgtgaccagtgggacgccctcggctctctgacacatagtcgcagggaagccctggagaaaacagagaagcagctggaggccatcgaccagctgcacctggaatacgccaagcgcgcggcccccttcaacaactggatggagagcgccatggaggacctccaggacatgttcatcgtccataccatcgaggagattgagggcctgatctcagcccatgaccagttcaagtccaccctgccggacgccgatagggagcgcgaggccatcctggccatccacaaggaggcccagaggatcgctgagagcaaccacatcaagctgtcgggcagcaacccctacaccaccgtcaccccgcaaatcatcaactccaagtgggagaaggtgcagcagctggtgccaaaacgggaccatgccctcctggaggagcagagcaagcagcagtccaacgagcacctgcgccgccagttcgccagccaggccaatgttgtggggccctggatccagaccaagatggaggagatcgggcgcatctccattgagatgaacgggaccctggaggaccagctgagccacctgaagcagtatgaacgcagcatcgtggactacaagcccaacctggacctgctggagcagcagcaccagctcatccaggaggccctcatcttcgacaacaagcacaccaactataccatggagcacatccgcgtgggctgggagcagctgctcaccaccattgcccgcaccatcaacgaggtggagaaccagatcctcacccgcgacgccaagggcatcagccaggagcagatgcaggagttccgggcgtccttcaaccacttcgacaaggatcatggcggggcgctggggcccgaggagttcaaggcctgcctcatcagcctgggctacgacgtggagaacgaccggcagggtgaggccgagttcaaccgcatcatgagcctggtcgaccccaaccatagcggccttgtgaccttccaagccttcatcgacttcatgtcgcgggagaccaccgacacggacacggctgaccaggtcatcgcttccttcaaggtcttagcaggggacaagaacttcatcacagctgaggagctgcggagagagctgccccccgaccaggccgagtactgcatcgcccgcatggcgccataccagggccctgacgccgtgcccggtgccctcgactacaagtccttctccacggccttgtatggcgagagcgacctgtga

SEQ ID NO: 10554 - DNA, 7427 bp, Homo sapiens
ggcctgatctcagcccatgaccagttcaagtccaccctgccggacgccgatagggagcgcgaggccatcctggccatccacaaggaggcccagaggatcgctgagagcaaccacatcaagctgtcgggcagcaacccctacaccaccgtcaccccgcaaatcatcaactccaagtgggagaaggtgggccggggccatccgtaggggctggggcaggacggcggggctgggggccacctccctgaccgctcccacaccgcgtctcctctgccaggtgcagcagctggtgccaaaacgggaccatgccctcctggaggagcagagcaagcagcagtccaacgagcacctgcgccgccagttcgccagccaggccaatgttgtggggccctggatccagaccaagatggaggtgaggcacggctgagccccacagagctgagaaggttccaagagagctcccgtagtgagggggtccccggccagcccagggcctgcagactgaggcgcctggcagagcaggtcccaattctcaccacccaggggccgtgatcaccctgcggggttaggagagtccacagagcttgcgcctggaatcccggcacctggggaggctgaggcgggcggatcgcttgagcccaggagttcgagaccagcctgggcaacatagtgagaccccaactctacaaaaaatacaaaaattagctgggcatgatggtgcgcagcccaaggaggtcgaggctgccgtgagctacgatcatgccactgcacttcagcctgacagcgagaccctgtggtctctagtgggctacctatgggaggtgggtttgatccctgaatgccctggtctgatgattgtgagactcaggcactattgaacctctgatcctgtcctcccagctctaaaatggggatgaaaacagttaccttattacttcaacaaatgctttttgcaccaactaaccagccacatgagtgctgtcattcttacagcagttctgaccaccactcactgagcactcactacataccaggcaaccaggctggcagcaggcaacctcgtttaaacccagcaagcctgagagggggtccgggtgccaggcaggtcagccctgaggttcatgccagccacgcagcatgtggacttgtgggtgccgagacatggagtgcccgaggtcaggagctgcagccaggccagggttcagatcccaactctgcctctaacagcactgagctgtcctccgtgagcctcggtttctacctctgcagtcagggcctgccacagccctggcctcacagagaggtcaagggtaaaatgaagttgggcacagggagcgcttggcagagaaaacctccctgtcattgtcatagctgctttaacatgagagggcaggaccggaggggacagttgtgagcagtgggccttccctcccagggacccatgggccaaggccccaggccaaaggggccccggggaagatgcaggccagcagcgcgagtgggctcctccaggtggtcagtgggggcaggcccaccagcctcaccccaccgcctgcacccacccccgtaggagatcgggcgcatctccattgagatgaacgggaccctggaggaccagctgagccacctgaagcagtatgaacgcagcatcgtggactacaagcccaacctggacctgctggagcagcagcaccagctcatccaggaggccctcatcttcgacaacaagcacaccaactataccatggaggtgcgcggctgccccgcccgctggcctttccaccagcatggccggcttcctcactggaaatggttcgggccagtgagaagatagctgtctgctgtctgttgtttttcactctgtttaaaaattattgaagagaccagcactttgggaggccaagtgggaggatggcttgagcccaggagttcaagaccagcctgggcaacatagcaagaccctgtctctacaaaaaatgaaaatattagccaggcatggtggtgcatgcctatagtcccagctccccaggaggttgaggtgggcagattgcttgagccagggaggcagaggttgaggtgagccgaggtcatgccaccacacttcggtctgggtgacagagccagactctgtctcaaaaaaaaaaaaaaaaaagattgaaaagactagatcaaaatgtttagacatttttaaaaattacactttccctagcactgctctcatcaccatgacaatgcccctcacaggacaagctgttctaggggcccacagagggcaccgtttgccctgtggccttagcagtatcagccttgctcagggccagagccagccagcgggtgccgggtcagggcagcagctcccactggctaacactccggggacattacaagctggtcgccgtcatattggtagcttgagaaaccaaaagactggacactcttgatccaacccatacaggtccacagatgcttcaaaccagagttggcttttttgtttttttcccctgagagccagtggtgagacactgaccagagtttgtccaaacagtctccacagggatcccggcacaagattcatgggtccttgcccttctgctgcccctgtagctgggaaacacacttactgtggagacagacattggcagaggcagcagggaggcaccatggcccgtgtcccctgtgaggtgtacaggagagcaggggctttccccagggcgggaggacagttcacagtcctccacgtgtgaaccacggtgaggacagttcacagcacccggcccacgatcacgcccccgtctttccgcagcacatccgcgtgggctgggagcagctgctcaccaccattgcccgcaccatcaacgaggtggagaaccagatcctcacccgcgacgccaagggcatcagccaggagcagatgcaggagttccgggcgtccttcaaccacttcgacaaggtgagcagcctgccacctcctcggcctctcccctcccgccgttgccgtaccagcccacaccttcgtctctgcatctgttcgtccattcccatcacagttgctgagcgtcggccgccactcccagggccagcagggccctgccactgtcagggtgtaggtgtgcggcaccaagaccccagcctgggccacttcacacgcacaggcagggggccggaggtcccaagtcctgccttctggggtggcatcctcaccacccccagggcagatgaagtctcagcacacccaggctttgcgacccggtctgtgaacctggacacagacaccccgcacagtgcttttagaattcagatttggtccggcagcctcatcagaggggccctgagcgccagagtttgctgccatccccagcccacccctgccgggctgacggactgagaagtgtgcagcctcagctctgcacctggcgcccccaggacaggatacagtcccctctgtcccactccaaatcccaaaggcaaggagaaccccccccccgaccctccaccagtcctgggacttgtcctcagttctgtagcatccagctgccacccctgctgtgggcagagaggtcggggaggcctctgccttcctttgagcttccgaggttggggaaaggatgaaaggggcccgtgccgcccccgaccccacgtgtccctggccatctccttgtccatgttgcctctaactctgtgtttccctcccctacgtgtcccttccccctgccctctgcatgtgaccccgatccctcatcctggtctccacgccgcccctcccgcacacctgccttcggatggccccggcaggatcatggcggggcgctggggcccgaggagttcaaggcctgcctcatcagcctgggctacgacgtggagaacgaccggcaggtactgcaccctgggccccagcggaccatggcattaactgctctctctctctctctccttctctctttctcccctcgccatcccacccctgccatcctgtgtgccatctcatggctctcttgcctccctgcccacatctccctggaccccttcccttttacctggtctcttggggccgctgtctccctgctccccgccactgtcctgtctgcctgctgtgcacatggggcggcccctcttgcctactctgggcccggcctcctctgctatgcctgcgtcctcggagcagaagcagacaggcagcatggactccgatgacttcagggctctgcttatctccacaggatacagcctggtatgcagctctgtctccccagccacccgctcctcctcctcctcctcctcctcctcctcctcctcctcccccccacctctccccctcaccgcctccagagcttcctcgtcctcggggacactcctccgcccgagcagcgcagccgtgcctgcctcttcctctgctgcatctgccggggtggggtccctccgatgacttcccgagccccccttcttccctagaagtctccagaaagagggggcagctctcccactctctcccctttttctttctctttctctctttcttccccatcctccagagcttactcgtgagcctgggctgagggcagtagaccccagttccctgctgtgggagaccacgagaggggagggtgcagagaggccctgcttcccggcctggggcactgggggcttggaggcctgggtcagctggagcagtggcaggctctgcccggggccaaggctgctggagcaggcggggaacagggcgcacgcacacgtgggttgggccctactctctcggctgtttccctggagaccccaccagtgtgggcctggctgcccctgccccactaaatgtcgggtgtcccccaccccaccctctccttgcagggtgaggccgagttcaaccgcatcatgagcctggtcgaccccaaccatagcggccttgtgaccttccaagccttcatcgacttcatgtcgcgggagaccaccgacacggacacggctgaccaggtcatcgcttccttcaaggtcttagcaggggacaaggtgagcgagacccctacgaggtgcatgggggctggcgagaggggtccctgcagtgggaggggctgagggggccagtgtgtgggtggggatggctcagagtcccatcctgcctgccccagaacttcatcacagctgaggagctgcggagagagctgccccccgaccaggccgagtactgcatcgcccgcatggcgccataccagggccctgacgccgtgcccggtgccctcgactacaagtccttctccacggccttgtatggcgagagcgacctgtgaggccccagagacctgacccaacacccccgacggcctccaggaggggcctgggcagccccacagtcccattcctccactctgtatctatgcaaagcactctctgcagtcctccggggtgggtgggtgggcagggaggggctggggcaggctctctcctctctctctttgtgggttggccaggaggttcccccgaccaggttggggagacttggggccagcgcttctggtctggtaaatatgtatgatgtgttgtgcttttttaaccaaggaggggccagtggattcccacagcacaaccggtcccttccatgccctgggatgcctcaccacacccaggtctcttcctttgctctgaggtcccttcaaggcctccccaatccaggccaaagccccatgtgccttgtccaggaactgcctgggccatgcgaggggccagcagagggcgccaccaccacctgacggctggggacccacccagcccctctcccctctctgctccagactcacttgccattgccaggagatggccccaacaagcaccccgcttttgcagcagaggagctgagttggcagaccgggcccccctgaaccgcaccccatcccaccagccccggccttgctttgtctggcctcacgtgtctcagattttctaagaaccaaaaaaaaaaaaggaaaaaaaacacaaaacaacaaaaaccaaaaaaaaaaaaaatcacaaaaacaaaaaaactataaaaaagaaagaattaaaaactttcagagaattactatttactttattaacttacggatttattatataaatatatattcacctagcaacatatctctgccgtctctcctgctctcataatgaagacatagccgattctctgcccgggccccttgctgatgctcctccgggtctgcgtcgggcgtgggtctctggggaccctccagaggtggaggtgggctgatggcctggctgcctggtggttgatggttttgctccccctaccttttttttttgagtttattctgattgattttttttcttggtttctggataaaccaccctctggggacaggataataaaacatgtaatatttttaagaaggattcctgcagcatcatctttttttatttctcctgtgtctgtcctccaccttctaggagagccagggcagagctagcactgtcttaagctgtcaacgtggactagctcgtgtcatctgctcgagaagggctgtcgctgttcttgtttctgagtgaggagtacgcaggccagagtggtcacccggccgtgagcagtgagggccagagactagccccagacaggtggatgccagagagagtggcacccatgccaggcaaggcctagggaggtggtcttgctcagcaaccctgccctgagcagcaggtgcgcccatccggagatcctaggagaaggtggccacctccatccactaaggaagagaaggaagacagtggcttgaggcagggagctcgcaggacagagcctgagccaccctgtccctcccacctggctcacctgtctgtgggtcaggcagatgaccccctcacccccatccaggtgctggctgcagtggcctgtgcagagaggggcagggtgagtgcccaccagtccccgtaccccttccccccatgccccaccatgccggggtggtactcacagaagatgcaggtgaggtgggccacacaggacacgaaccgctcgaagtccacacgcagacggctatcccggtagcggctggtgagggtctgggtcagctggttgttcaggtggaagcctagggggaggctgcttctgagcccagtggcccacagggaacccaccttggcattgcatccccaccccacctcctcagggaggacatgaatgccacagggtgtcacaccccaactctgccccatcccggcagggtgagtacaggctgatcccttcaatcctctgggcctgtttcctcatccatcaaacggactaagacagccccgaccccatagggtgtgtgaagacagaacgctcaggacagcgtctgacacgtgactcgatgtgtgggtactgttactccttaaatcctgtggggctttctccttgccagtgggcactggaggatatttctgtgcagcaaaaaatatagtcaatccca

SEQ ID NO: 10555 - DNA, 3180 bp, Homo sapiens
ggcctgatctcagcccatgaccagttcaagtccaccctgccggacgccgatagggagcgcgaggccatcctggccatccacaaggaggcccagaggatcgctgagagcaaccacatcaagctgtcgggcagcaacccctacaccaccgtcaccccgcaaatcatcaactccaagtgggagaaggtgcagcagctggtgccaaaacgggaccatgccctcctggaggagcagagcaagcagcagtccaacgagcacctgcgccgccagttcgccagccaggccaatgttgtggggccctggatccagaccaagatggaggagatcgggcgcatctccattgagatgaacgggaccctggaggaccagctgagccacctgaagcagtatgaacgcagcatcgtggactacaagcccaacctggacctgctggagcagcagcaccagctcatccaggaggccctcatcttcgacaacaagcacaccaactataccatggagcacatccgcgtgggctgggagcagctgctcaccaccattgcccgcaccatcaacgaggtggagaaccagatcctcacccgcgacgccaagggcatcagccaggagcagatgcaggagttccgggcgtccttcaaccacttcgacaagaagcagacaggcagcatggactccgatgacttcagggctctgcttatctccacaggatacagcctgggtgaggccgagttcaaccgcatcatgagcctggtcgaccccaaccatagcggccttgtgaccttccaagccttcatcgacttcatgtcgcgggagaccaccgacacggacacggctgaccaggtcatcgcttccttcaaggtcttagcaggggacaagaacttcatcacagctgaggagctgcggagagagctgccccccgaccaggccgagtactgcatcgcccgcatggcgccataccagggccctgacgccgtgcccggtgccctcgactacaagtccttctccacggccttgtatggcgagagcgacctgtgaggccccagagacctgacccaacacccccgacggcctccaggaggggcctgggcagccccacagtcccattcctccactctgtatctatgcaaagcactctctgcagtcctccggggtgggtgggtgggcagggaggggctggggcaggctctctcctctctctctttgtgggttggccaggaggttcccccgaccaggttggggagacttggggccagcgcttctggtctggtaaatatgtatgatgtgttgtgcttttttaaccaaggaggggccagtggattcccacagcacaaccggtcccttccatgccctgggatgcctcaccacacccaggtctcttcctttgctctgaggtcccttcaaggcctccccaatccaggccaaagccccatgtgccttgtccaggaactgcctgggccatgcgaggggccagcagagggcgccaccaccacctgacggctggggacccacccagcccctctcccctctctgctccagactcacttgccattgccaggagatggccccaacaagcaccccgcttttgcagcagaggagctgagttggcagaccgggcccccctgaaccgcaccccatcccaccagccccggccttgctttgtctggcctcacgtgtctcagattttctaagaaccaaaaaaaaaaaaggaaaaaaaacacaaaacaacaaaaaccaaaaaaaaaaaaaatcacaaaaacaaaaaaactataaaaaagaaagaattaaaaactttcagagaattactatttactttattaacttacggatttattatataaatatatattcacctagcaacatatctctgccgtctctcctgctctcataatgaagacatagccgattctctgcccgggccccttgctgatgctcctccgggtctgcgtcgggcgtgggtctctggggaccctccagaggtggaggtgggctgatggcctggctgcctggtggttgatggttttgctccccctaccttttttttttgagtttattctgattgattttttttcttggtttctggataaaccaccctctggggacaggataataaaacatgtaatatttttaagaaggattcctgcagcatcatctttttttatttctcctgtgtctgtcctccaccttctaggagagccagggcagagctagcactgtcttaagctgtcaacgtggactagctcgtgtcatctgctcgagaagggctgtcgctgttcttgtttctgagtgaggagtacgcaggccagagtggtcacccggccgtgagcagtgagggccagagactagccccagacaggtggatgccagagagagtggcacccatgccaggcaaggcctagggaggtggtcttgctcagcaaccctgccctgagcagcaggtgcgcccatccggagatcctaggagaaggtggccacctccatccactaaggaagagaaggaagacagtggcttgaggcagggagctcgcaggacagagcctgagccaccctgtccctcccacctggctcacctgtctgtgggtcaggcagatgaccccctcacccccatccaggtgctggctgcagtggcctgtgcagagaggggcagggtgagtgcccaccagtccccgtaccccttccccccatgccccaccatgccggggtggtactcacagaagatgcaggtgaggtgggccacacaggacacgaaccgctcgaagtccacacgcagacggctatcccggtagcggctggtgagggtctgggtcagctggttgttcaggtggaagcctagggggaggctgcttctgagcccagtggcccacagggaacccaccttggcattgcatccccaccccacctcctcagggaggacatgaatgccacagggtgtcacaccccaactctgccccatcccggcagggtgagtacaggctgatcccttcaatcctctgggcctgtttcctcatccatcaaacggactaagacagccccgaccccatagggtgtgtgaagacagaacgctcaggacagcgtctgacacgtgactcgatgtgtgggtactgttactccttaaatcctgtggggctttctccttgccagtgggcactggaggatatttctgtgcagcaaaaaatatagtcaatccca

SEQ ID NO: 10556 - DNA, 1277 bp, Homo sapiens
cttgcctccctgcccacatctccctggaccccttcccttttacctggtctcttggggccgctgtctccctgctccccgccactgtcctgtctgcctgctgtgcacatggggcggcccctcttgcctactctgggcccggcctcctctgctatgcctgcgtcctcggagcagaagcagacaggcagcatggactccgatgacttcagggctctgcttatctccacaggatacagcctggtatgcagctctgtctccccagccacccgctcctcctcctcctcctcctcctcctcctcctcctcctcccccccacctctccccctcaccgcctccagagcttcctcgtcctcggggacactcctccgcccgagcagcgcagccgtgcctgcctcttcctctgctgcatctgccggggtggggtccctccgatgacttcccgagccccccttcttccctagaagtctccagaaagagggggcagctctcccactctctcccctttttctttctctttctctctttcttccccatcctccagagcttactcgtgagcctgggctgagggcagtagaccccagttccctgctgtgggagaccacgagaggggagggtgcagagaggccctgcttcccggcctggggcactgggggcttggaggcctgggtcagctggagcagtggcaggctctgcccggggccaaggctgctggagcaggcggggaacagggcgcacgcacacgtgggttgggccctactctctcggctgtttccctggagaccccaccagtgtgggcctggctgcccctgccccactaaatgtcgggtgtcccccaccccaccctctccttgcagggtgaggccgagttcaaccgcatcatgagcctggtcgaccccaaccatagcggccttgtgaccttccaagccttcatcgacttcatgtcgcgggagaccaccgacacggacacggctgaccaggtcatcgcttccttcaaggtcttagcaggggacaaggtgagcgagacccctacgaggtgcatgggggctggcgagaggggtccctgcagtgggaggggctgagggggccagtgtgtgggtggggatggctcagagtcccatcctgcctgccccagaacttcatcacagctgaggagctgcggagagagctgccccccgaccaggccgagtactgcatcgcccgcatggcgccataccagggccctgacgccgtgcccggtgccctcgactacaagtccttctccacggccttgtatggcgaga

SEQ ID NO: 10557 - DNA, 544 bp, Homo sapiens
cttgcctccctgcccacatctccctggaccccttcccttttacctggtctcttggggccgctgtctccctgctccccgccactgtcctgtctgcctgctgtgcacatggggcggcccctcttgcctactctgggcccggcctcctctgctatgcctgcgtcctcggagcagaagcagacaggcagcatggactccgatgacttcagggctctgcttatctccacaggatacagcctgggtgaggccgagttcaaccgcatcatgagcctggtcgaccccaaccatagcggccttgtgaccttccaagccttcatcgacttcatgtcgcgggagaccaccgacacggacacggctgaccaggtcatcgcttccttcaaggtcttagcaggggacaagaacttcatcacagctgaggagctgcggagagagctgccccccgaccaggccgagtactgcatcgcccgcatggcgccataccagggccctgacgccgtgcccggtgccctcgactacaagtccttctccacggccttgtatggcgaga

SEQ ID NO: 10558 - DNA, 6285 bp, Homo sapiens
ggcgtattcagggaccagctagagaggagtgagtgacacgcagtgatgggtcaggcccaacaagacccttgtggtgtgggataagaaattcatgttccactctgagggccatgggagccccttagggtcttactccgtggtgggagctgctcactcacattttcagacagatcatttagcaactgactcctccaacccaaaacaaagctgcctttatagggcccacagctagtctgtctccagcccaggccggttagaaaaggaatgcaccctattcggactccacaaaaccccgcaaggcatgtccacgcaggcctggggctggcttccagtccagagcaagtgctcttcctcctgcatgagcctcaggccggcccggccgccctccctgcgtctttcactctctcctgcctctctctctctttctctctctctctgtgcagatattgtgggcactctgaggccagatgagaaggccatcatgacttacgtgtcctgcttctaccacgctttctcgggggctcagaaggtgagctgggccaggcacacctcgctgctggggctgcagacctgccttcaccaccgcccttgcatcaccgctggccatctgtggttggagccctggccaggccgtgggccgccacaccacacagactgaccctgccggcctctgactcggaaggtcccctggggcaggtttcccgcctggccggtgctgggcctgtgctgaggagtcacagacctctgtttgaacacagcccaccctgggaggtgggtggtggcatcctaggctctcaggcggggaaactgaagccctgcattacagtcaatggcagagctgggatttgactgcccggcgttcccactcgccctgtccatcatctgcaccagggctgcctgcctgcccctgccaagcccttcgtggggagcactgggctttacccgttttgcagctccttcctgccaggaaaggctcagcatgtgcagcccaacctgcactcacggtcccagccctccagaggccaggcagagcccacagagcttgcgtggcagtggccgccctcctgggcccagctgacctcatgctgcctcacagctcctgccgggccctcagcgttcacgcagaggcccaagcactgctccccccgcttgccttgtggtctctgaagtatctcaggcagcattcccgatgcctgctttgaagtgtcagcagttggcacaggttcagaggaggaggcagaatcgattcttgtttactgaacatgtactacacgctaggcaccctccaaggccttcacatgcacaggcttccagagggtccctgtgcacacccccaggagggctaggcgcagttagccccatttgagagaggaggaattgaagtttagggaaacagctattcctaaaactagaaggggggggccgtaccttctgtggacccctgctttgagcctcccaactagcaggtgcattacctaccgtcagtctggcctggccccactctgccacctcttggtactgtgaccttgggtgggtcacttgacctcagcttccccacctgtgaaatgggcatcgctgtagttcggtctcacaggattgttctgggcgtgaaacgagctcctgcaggcaaagggcttagcacagtgcctggcacggcagctgccatttaggcagctgccagggagccacagtggtggggagtgtggttcttcccagcctcgggccagaaaggcctcttcacctcctcagcatgcgattggagcttgtgtttggagtgttctgctagagggcacgggccaggagggtggagggaggacccctgacccacactcccgcgggagggtgggcagggaccagcagcaatggacgattcgtcaccacagaccccaactaacagcatgtttgccattggactcacccctacgggccccgaaccagccccctgcccaccacatggcctcaccagattgcttttctttctacccacactgctcccctgtgcttagggctgaactccagtctggaggctctgagggattttgggggagcagggactggcaggcaagcccaggacagtatgggtgggtgctgaggcactgggcctggaggcttgtcactggcccctctctgagggggtagtggaggcccggctgcagggcgctggctggtcagaaaggaaagtgctgggtccctgtgtgctcctcaggacagccccgtggtgctgctcctgctgcctcgtttccccagagacccagtccaagctcttgcaagagtgctctctggggttcatgttttataaacgcagagtgaaccccaggtctagcgccagtgtgcccattctgtcctgagatcatttatttctagtcaccgaagcgttcccgcctcgttcctttattcactcactcattcagcaaccctgaacaccgccagtgcactgagccccaagctggatgcgggaactcagcggtgaaacatgattcccttgccttgcggcagccccgtgctcacagagaggacttgagtttcgggtgccagttgtctctgccaagttaggagtcagggactgacctctgtgacccccacaagctgcagccctggctgtgttttccacactggcctggggcccatgttcattggctgaggaacctcttggacctcatctctgaggagcaccgcctggggccctgggtgtgtgtcccgcagcatggcgcggggtgtgcacgtgcgtgtgtgcgctcacacgagcaccggctgccgcctccccgcctgtctccaggtgccatgtgtggaggggagaggctgggcgtcgctgcctgcagcactggctctgagccgttggccaagcctctccattttccttccccatcactctgtagaccctcctcactctttctgttcctgttctgttgccgtttcaactcctcctcttggaccctttctgtgcttcctgaaaggtacctggtctctctctccccgtgtgcaccccctgcctcctctacactgttcactgccccctagcaggacagggcaggacgctctcctgtagttcaggcccagggactatgtccaccactctcaccctccaaagccccagcacttttctgccccacggatggtgacttctgtcctctggagctcctattaacattgcctccaaggcaggagagtggacaggcctgagtgtgctcctgtgcacggaccactaggctcctccgggacccgggcgcccctgctctgttgcccccagctctccagctctcggcttcccatcctttcaccttcccaccgggagagactcctccgcagtcttaggtccaacgcagccgacccgtccagcctcaccctcctctgtgtggggcactagagggtttgcgagcagcagtgggagggctccccaaccctcctcggtgcctccagggtctgggctttctggacccaggggcattttgcagtcagcagtgaggatgccaacaaggcctattgggacagggcaccatctcactggagctgtgcttcctctccttcccctctgtgaggagttccgtgggccatggaccagctgctttcaagggacgtgcccgtcaggagggagggtggccagcccccaggcagccctgactgtgtgctcccctccaggctgaaactgccgccaaccggatctgtaaggtgctggctgtcaaccaagagaacgagcacctgatggaggactacgagaagctggccagcgacgtgagtgttcccccagtgaaagtcagggccacctcattatcctcagccagaggtcactgtgactcttgcagggggaaagcaggtgtggcagcgagatgacctagaaaaggctgcgtggtcacagaccatggcatttagccagctggtgtgtacacgacctctccgtttgcttccacaaggctaagggtcagaccggcagccaccttgccagccagcccctgggctcccgagcttgggttcctacagagatgctcagggacagtgtttcctgggcacctcagtgctttagaatcacctggggagctttgtgaaagcccctcttcccgtgccctggccctggagagagtgattcagaaggatggagaggggcctgggaaccaataggatagcaggccctgtgcaggtgcttaacgagcagcccagcaagacgggaactcggattatcctcctttccaagtgaggaaactgaggcccagggagggtcaggcacgtgcctgctgttacatgactagtgggacagagagctgggcttcacccaggcagccctgctctagagtccaaacccaatgcttcagttggaaataagggtggttagtacaactcttctggaggctcttcatttttgaaatctccatatttaaaaaataaacgtaggctgggcgcagtggctcacacctgtaatcgcagcattttgggaggccaaggcaggtggatcacttgaggtctggagttcaaaaccagcctggccaacatggtgaaaccttgtctctactgaaaatacaaaaattagccgggtgttgtggcacacacctgtagtcccagctacttgggaggctgaggcaggaggatcgcttgagcctgggaggcagaggttgcagtgagccaagattgcgccactgtactctagcctagcgacagagcaagactccattaaaataaaaataaaataaaataaaatttcccaaagagcagtggtttgactgctcatctagaaccagtggttcccagattttgcaatctcatagaccaggaaaatttgaaaaactattggatgtccaacctaagagggccagctttttattttgccaagttacggatgttttaaaaagaaacactaccatctgttaccaccagcacttctaacaccaagataaggtaaaaaggttattcttagaaccccagccattgccaagaaagggcagctggcagcacgcctcacaatgtatccacacagaggtatttctgtctttgaatttctcactttgccagaagttggcatttgggaaccacttctccagcttgtccgtgctggcagataactgattttgtacttctagaattgttttattatttttttgagatggagtttcactcttgtcacccaggctggagtgcaatggcacgaccttggctcactgcaacctctgcctcccaggttcaagcagttctcctgcctcagcctcccaagtagctgggattacaggcgcgcaccaccacgcccagctaatttttgtattttttttagtagagatggggtttcaccatgttggtcaggctgatcttgaactcctgacctcaggtgatccactcacctcagcctcccaaagtgctgggattacaggtgtgaaccagcgtgcctggcctagaattgttttagaatgtccaactgtttgttaccctttctcactccattaaagatctgagtagttcctaaaagaatatgtttgtttctttttcaattttattttctaatttatgtcccaggcccagtgcacatactggcctagccagactgagccaggtgggcttgtcggccttgcccttgaggcacttagtgagcccagaagcagtcaggctctcagcatggagctcagtgaagacagcggcagtggggcatgtgacagcatggaaagggacctttttggcgggggcatgggagtggaggtttcccctcttagacctgagggaaaagactaagagcaaaggcatgggccaggcatggtggctcacccctgtcatcccaccactttgggaggctaaagtgggattgcttgaagttcaggagctcaagaccagcctgggcagtatactgagacccccttctctataaaaacttaaaataaaaatcagccaggctcggaggtaggcacctgtagtcccaactacttgggagactgaggtggaaggatggcttcagcccgggaggttgctatgatcatgccacttcactccagcctgggtgacaaagcgtgaacctgtctttaaaaagaaaagcacaggcaggaacaggaagtaacaagagaacagtacagtgatgcagggacagggagggagcccacgctcccagagttccaggttgggggttctagcaggaatcgtggagaagttgggctggggagcaggggtaaccccctaaggtggggccctcaaagatccagatcccatgtgcccataagctggggggcagcccgtcagcactctgagggtcccccacaaaggccacgctggcttctgtggcccacagctcctggagtggatccggcgcaccatcccctg

SEQ ID NO: 10559 - DNA, 654 bp, Homo sapiens
ggcgtattcagggaccagctagagaggagtgagtgacacgcagtgatgggtcaggcccaacaagacccttgtggtgtgggataagaaattcatgttccactctgagggccatgggagccccttagggtcttactccgtggtgggagctgctcactcacattttcagacagatcatttagcaactgactcctccaacccaaaacaaagctgcctttatagggcccacagctagtctgtctccagcccaggccggttagaaaaggaatgcaccctattcggactccacaaaaccccgcaaggcatgtccacgcaggcctggggctggcttccagtccagagcaagtgctcttcctcctgcatgagcctcaggccggcccggccgccctccctgcgtctttcactctctcctgcctctctctctctttctctctctctctgtgcagatattgtgggcactctgaggccagatgagaaggccatcatgacttacgtgtcctgcttctaccacgctttctcgggggctcagaaggctgaaactgccgccaaccggatctgtaaggtgctggctgtcaaccaagagaacgagcacctgatggaggactacgagaagctggccagcgacctcctggagtggatccggcgcaccatcccctg

SEQ ID NO: 10560 - DNA, 586 bp, Homo sapiens
attaggggaaaccgaggagatgactgggcaggctgaaatggaactgggatccgaggcgggcttgaaggaccttcacggcatggtgcaactcccacctgcggaaggcaggcacacagatcgagaacattgatgaggacttccgagacgggctcaagctcatgctgctcctggaggtcatatcaggggagcggttacctaagccggagcgggggaagatgagagtgcacaaaatcaacaatgtgaacaaagcgctggactttattgccagcaaaggcgtcaagctggtctccatcggggcagaagagattgtggacggcaacgcaaagatgaccctgggaatgatctggaccatcatccttaggttcgccatccaggacatctccgtggaagagacctcggccaaggaagggctccttctctggtgccagagaaagacagccccgtataagaacgtcaatgtgcagaacttccacatcagctggaaggatggtcttgccttcaatgccctgatccaccggcacagaccagagctgattgagtatgacaagctgaggaaggacgaccctgtcaccaacctgaacaatgc

SEQ ID NO: 10561 - DNA, 1965 bp, Homo sapiens
ttccccctgccctctgcatgtgaccccgatccctcatcctggtctccacgccgcccctcccgcacacctgccttcggatggccccggcaggatcatggcggggcgctggggcccgaggagttcaaggcctgcctcatcagcctgggctacgacgtggagaacgaccggcaggtactgcaccctgggccccagcggaccatggcattaactgctctctctctctctctccttctctctttctcccctcgccatcccacccctgccatcctgtgtgccatctcatggctctcttgcctccctgcccacatctccctggaccccttcccttttacctggtctcttggggccgctgtctccctgctccccgccactgtcctgtctgcctgctgtgcacatggggcggcccctcttgcctactctgggcccggcctcctctgctatgcctgcgtcctcggagcagaagcagacaggcagcatggactccgatgacttcagggctctgcttatctccacaggatacagcctggtatgcagctctgtctccccagccacccgctcctcctcctcctcctcctcctcctcctcctcctcctcccccccacctctccccctcaccgcctccagagcttcctcgtcctcggggacactcctccgcccgagcagcgcagccgtgcctgcctcttcctctgctgcatctgccggggtggggtccctccgatgacttcccgagccccccttcttccctagaagtctccagaaagagggggcagctctcccactctctcccctttttctttctctttctctctttcttccccatcctccagagcttactcgtgagcctgggctgagggcagtagaccccagttccctgctgtgggagaccacgagaggggagggtgcagagaggccctgcttcccggcctggggcactgggggcttggaggcctgggtcagctggagcagtggcaggctctgcccggggccaaggctgctggagcaggcggggaacagggcgcacgcacacgtgggttgggccctactctctcggctgtttccctggagaccccaccagtgtgggcctggctgcccctgccccactaaatgtcgggtgtcccccaccccaccctctccttgcagggtgaggccgagttcaaccgcatcatgagcctggtcgaccccaaccatagcggccttgtgaccttccaagccttcatcgacttcatgtcgcgggagaccaccgacacggacacggctgaccaggtcatcgcttccttcaaggtcttagcaggggacaaggtgagcgagacccctacgaggtgcatgggggctggcgagaggggtccctgcagtgggaggggctgagggggccagtgtgtgggtggggatggctcagagtcccatcctgcctgccccagaacttcatcacagctgaggagctgcggagagagctgccccccgaccaggccgagtactgcatcgcccgcatggcgccataccagggccctgacgccgtgcccggtgccctcgactacaagtccttctccacggccttgtatggcgagagcgacctgtgaggccccagagacctgacccaacacccccgacggcctccaggaggggcctgggcagccccacagtcccattcctccactctgtatctatgcaaagcactctctgcagtcctccggggtgggtgggtgggcagggaggggctggggcaggctctctcctctctctctttgtgggttggccaggaggttcccccgaccaggttggggagacttggggccagcgcttctggtctggtaaatatgtatgatgtgttgtgcttttttaaccaaggaggggccagtggattcccacagcacaaccggtcccttccatgccctgggatgcctcaccacacccaggtctcttcctttgctctgaggtcccttcaaggcctccccaatccaggccaaa

SEQ ID NO: 10562 - DNA, 877 bp, Homo sapiens
ttccccctgccctctgcatgtgaccccgatccctcatcctggtctccacgccgcccctcccgcacacctgccttcggatggccccggcaggatcatggcggggcgctggggcccgaggagttcaaggcctgcctcatcagcctgggctacgacgtggagaacgaccggcagggtgaggccgagttcaaccgcatcatgagcctggtcgaccccaaccatagcggccttgtgaccttccaagccttcatcgacttcatgtcgcgggagaccaccgacacggacacggctgaccaggtcatcgcttccttcaaggtcttagcaggggacaagaacttcatcacagctgaggagctgcggagagagctgccccccgaccaggccgagtactgcatcgcccgcatggcgccataccagggccctgacgccgtgcccggtgccctcgactacaagtccttctccacggccttgtatggcgagagcgacctgtgaggccccagagacctgacccaacacccccgacggcctccaggaggggcctgggcagccccacagtcccattcctccactctgtatctatgcaaagcactctctgcagtcctccggggtgggtgggtgggcagggaggggctggggcaggctctctcctctctctctttgtgggttggccaggaggttcccccgaccaggttggggagacttggggccagcgcttctggtctggtaaatatgtatgatgtgttgtgcttttttaaccaaggaggggccagtggattcccacagcacaaccggtcccttccatgccctgggatgcctcaccacacccaggtctcttcctttgctctgaggtcccttcaaggcctccccaatccaggccaaa

SEQ ID NO: 10563 - DNA, 9175 bp, Homo sapiens
gccctgatccaccggcacagaccagagctgattgagtatgacaagctgaggaaggtgagtgtctccagctccccttgatggcccacagacgtgccctgtctgaccccctaactccgggtcaccatccccatgcccttccatcgccagcctccagatctgggttctgcacgcagatgggcagcctgggagagccttgtgcaggctctccgcaacccctggctcggtggctgactctcacctcccttattcccctcgtggactgtccagtctccctccatggcactgcaaccaacccggggttatttaagggcctggccagccatgctttataactccccttcctcaatcttctggattctagaacctcctctgcccaaaggggcagagggcaaggaattccaaaccatcaccacaagcccatgttgcccatgcagggtcctgctgtcatttgcctgtacaaagcctgtatggatccaggccctggccaccagaagctgccagcctcgtgggggaaggcaggacaaaaattgtgtccaaagcaaagcaccacaccaggccgtgtacatgtgctcaggctgaatggggtggcagggcatggggtcagatcagtgctgcggaggaggctagtgtaccccgagcgagcaggagccaggaaaggtcccggaagaagaggcagcttagagccagaggagggcttcctgggggaggcaccagatggcacccagcccgttccagccacagtgagcaagagagctgggccccggccagggagagttggagtgcagtgggctttagtcctgtaagcagtggggagcctgtgagggggctgggggacactttagggtggttgggacctgggacctctcggtttgctccccttacccagtccccagtgctctctcaggcctggcccacatcttccagtcaatgtgaaaaccaggttttagggcaaggggcttaagctagggtctgtgggtggctggaaattgtatgaaaagagtacacctgcatttttctggagaaaaagccctggtttgccccacaaagatttcacgaggcactcctgtgagtgggaattgaatttatccaggcggtgccctcccgctcacacatcacacgtggctgagaactgcctgaagaaacccccaaccctcgccctcccgggtctctccctctgggccagccctgcctccctcctgctcctgcaccctgccctgacggagttcttgttgtccccacttgcctccttctaggacgaccctgtcaccaacctgaacaatgccttcgaagtggctgagaaatacctcgacatccccaagatgctggatgcagagggtaagtcatctcttctgttcagccaccactgtgcttcctgatggccttttctgtccagggctggcctcgggcaaggggctgtgggcacatcagagctttgggtcaccttggggagctggcagagccagcaagaagggctgaatgattctgggtgaactggggacagccatgtcgccctgggagacagagcaagggtagcctgggctggccagatgccttcagggatgaagaagcgtatggggagggggagctgaaggatcaactctcctgagggtgcatctcctcagggcccaggaagggcaaggtggctgaggaggggtgcttcaggcttcctgcgagcaaccctggcctctccctccctacctgcagcaggcatggagtatggagcccgacaaagtggagtgttttgttttttccttttccggctttgctccatttcccagccatgcactgccccatttcctagccatgcactgccccagctgggacctgtgtctctggcctctggtggcccttggagttgactgtcctgctgctccttgaggccattctcagagagaggaagtggcctcattttaatccgcttcccacagccttgtcctttccagacccatgggagagggaggggctgagggtgtggctgagcccacccaagtcacgcgtcactctgcaggtccctctcccccaaggccgtggccttgggagcccgtggatcccagtgagtgacgcctccaccccccgccctactcgggcagtttaacccttgttgttcacttgcagacatcgtgaacacggcccggcccgacgagaaggccataatgacctatgtgtccagcttctaccatgccttttcaggagcgcagaaggtaccgagcagggccaggcaggccctcctcgccgccaccgcgcaatgccgccgctgcctctcgcctcccgtgctcacctcatttctcttgcagacggcagtggcctctctccaactggaagccacccccagctccctggcgttgctgccccctcagccttagctcacacacctattgggtacctcatctgtgccaggcttttccaggcattgaggatgccctggtgactgagtcagacaaggtccctgttctcagggcacttccatgctagtgggagaaacatacagcaggcctgtcacaggagtggaatagagaaaatggggccagatgggggacagagatggctggggtgaccttcagctggtgctgtcaatgtggaggggtgaagtgagcaggtacttgcagcaggagctgctagatgcaggctggggcacaggtgttccaggcagagggtgaagcactacgaaggccctgagacaggaagaagcttggcgtattcagggaccagctagagaggagtgagtgacacgcagtgatgggtcaggcccaacaagacccttgtggtgtgggataagaaattcatgttccactctgagggccatgggagccccttagggtcttactccgtggtgggagctgctcactcacattttcagacagatcatttagcaactgactcctccaacccaaaacaaagctgcctttatagggcccacagctagtctgtctccagcccaggccggttagaaaaggaatgcaccctattcggactccacaaaaccccgcaaggcatgtccacgcaggcctggggctggcttccagtccagagcaagtgctcttcctcctgcatgagcctcaggccggcccggccgccctccctgcgtctttcactctctcctgcctctctctctctttctctctctctctgtgcagatattgtgggcactctgaggccagatgagaaggccatcatgacttacgtgtcctgcttctaccacgctttctcgggggctcagaaggtgagctgggccaggcacacctcgctgctggggctgcagacctgccttcaccaccgcccttgcatcaccgctggccatctgtggttggagccctggccaggccgtgggccgccacaccacacagactgaccctgccggcctctgactcggaaggtcccctggggcaggtttcccgcctggccggtgctgggcctgtgctgaggagtcacagacctctgtttgaacacagcccaccctgggaggtgggtggtggcatcctaggctctcaggcggggaaactgaagccctgcattacagtcaatggcagagctgggatttgactgcccggcgttcccactcgccctgtccatcatctgcaccagggctgcctgcctgcccctgccaagcccttcgtggggagcactgggctttacccgttttgcagctccttcctgccaggaaaggctcagcatgtgcagcccaacctgcactcacggtcccagccctccagaggccaggcagagcccacagagcttgcgtggcagtggccgccctcctgggcccagctgacctcatgctgcctcacagctcctgccgggccctcagcgttcacgcagaggcccaagcactgctccccccgcttgccttgtggtctctgaagtatctcaggcagcattcccgatgcctgctttgaagtgtcagcagttggcacaggttcagaggaggaggcagaatcgattcttgtttactgaacatgtactacacgctaggcaccctccaaggccttcacatgcacaggcttccagagggtccctgtgcacacccccaggagggctaggcgcagttagccccatttgagagaggaggaattgaagtttagggaaacagctattcctaaaactagaaggggggggccgtaccttctgtggacccctgctttgagcctcccaactagcaggtgcattacctaccgtcagtctggcctggccccactctgccacctcttggtactgtgaccttgggtgggtcacttgacctcagcttccccacctgtgaaatgggcatcgctgtagttcggtctcacaggattgttctgggcgtgaaacgagctcctgcaggcaaagggcttagcacagtgcctggcacggcagctgccatttaggcagctgccagggagccacagtggtggggagtgtggttcttcccagcctcgggccagaaaggcctcttcacctcctcagcatgcgattggagcttgtgtttggagtgttctgctagagggcacgggccaggagggtggagggaggacccctgacccacactcccgcgggagggtgggcagggaccagcagcaatggacgattcgtcaccacagaccccaactaacagcatgtttgccattggactcacccctacgggccccgaaccagccccctgcccaccacatggcctcaccagattgcttttctttctacccacactgctcccctgtgcttagggctgaactccagtctggaggctctgagggattttgggggagcagggactggcaggcaagcccaggacagtatgggtgggtgctgaggcactgggcctggaggcttgtcactggcccctctctgagggggtagtggaggcccggctgcagggcgctggctggtcagaaaggaaagtgctgggtccctgtgtgctcctcaggacagccccgtggtgctgctcctgctgcctcgtttccccagagacccagtccaagctcttgcaagagtgctctctggggttcatgttttataaacgcagagtgaaccccaggtctagcgccagtgtgcccattctgtcctgagatcatttatttctagtcaccgaagcgttcccgcctcgttcctttattcactcactcattcagcaaccctgaacaccgccagtgcactgagccccaagctggatgcgggaactcagcggtgaaacatgattcccttgccttgcggcagccccgtgctcacagagaggacttgagtttcgggtgccagttgtctctgccaagttaggagtcagggactgacctctgtgacccccacaagctgcagccctggctgtgttttccacactggcctggggcccatgttcattggctgaggaacctcttggacctcatctctgaggagcaccgcctggggccctgggtgtgtgtcccgcagcatggcgcggggtgtgcacgtgcgtgtgtgcgctcacacgagcaccggctgccgcctccccgcctgtctccaggtgccatgtgtggaggggagaggctgggcgtcgctgcctgcagcactggctctgagccgttggccaagcctctccattttccttccccatcactctgtagaccctcctcactctttctgttcctgttctgttgccgtttcaactcctcctcttggaccctttctgtgcttcctgaaaggtacctggtctctctctccccgtgtgcaccccctgcctcctctacactgttcactgccccctagcaggacagggcaggacgctctcctgtagttcaggcccagggactatgtccaccactctcaccctccaaagccccagcacttttctgccccacggatggtgacttctgtcctctggagctcctattaacattgcctccaaggcaggagagtggacaggcctgagtgtgctcctgtgcacggaccactaggctcctccgggacccgggcgcccctgctctgttgcccccagctctccagctctcggcttcccatcctttcaccttcccaccgggagagactcctccgcagtcttaggtccaacgcagccgacccgtccagcctcaccctcctctgtgtggggcactagagggtttgcgagcagcagtgggagggctccccaaccctcctcggtgcctccagggtctgggctttctggacccaggggcattttgcagtcagcagtgaggatgccaacaaggcctattgggacagggcaccatctcactggagctgtgcttcctctccttcccctctgtgaggagttccgtgggccatggaccagctgctttcaagggacgtgcccgtcaggagggagggtggccagcccccaggcagccctgactgtgtgctcccctccaggctgaaactgccgccaaccggatctgtaaggtgctggctgtcaaccaagagaacgagcacctgatggaggactacgagaagctggccagcgacgtgagtgttcccccagtgaaagtcagggccacctcattatcctcagccagaggtcactgtgactcttgcagggggaaagcaggtgtggcagcgagatgacctagaaaaggctgcgtggtcacagaccatggcatttagccagctggtgtgtacacgacctctccgtttgcttccacaaggctaagggtcagaccggcagccaccttgccagccagcccctgggctcccgagcttgggttcctacagagatgctcagggacagtgtttcctgggcacctcagtgctttagaatcacctggggagctttgtgaaagcccctcttcccgtgccctggccctggagagagtgattcagaaggatggagaggggcctgggaaccaataggatagcaggccctgtgcaggtgcttaacgagcagcccagcaagacgggaactcggattatcctcctttccaagtgaggaaactgaggcccagggagggtcaggcacgtgcctgctgttacatgactagtgggacagagagctgggcttcacccaggcagccctgctctagagtccaaacccaatgcttcagttggaaataagggtggttagtacaactcttctggaggctcttcatttttgaaatctccatatttaaaaaataaacgtaggctgggcgcagtggctcacacctgtaatcgcagcattttgggaggccaaggcaggtggatcacttgaggtctggagttcaaaaccagcctggccaacatggtgaaaccttgtctctactgaaaatacaaaaattagccgggtgttgtggcacacacctgtagtcccagctacttgggaggctgaggcaggaggatcgcttgagcctgggaggcagaggttgcagtgagccaagattgcgccactgtactctagcctagcgacagagcaagactccattaaaataaaaataaaataaaataaaatttcccaaagagcagtggtttgactgctcatctagaaccagtggttcccagattttgcaatctcatagaccaggaaaatttgaaaaactattggatgtccaacctaagagggccagctttttattttgccaagttacggatgttttaaaaagaaacactaccatctgttaccaccagcacttctaacaccaagataaggtaaaaaggttattcttagaaccccagccattgccaagaaagggcagctggcagcacgcctcacaatgtatccacacagaggtatttctgtctttgaatttctcactttgccagaagttggcatttgggaaccacttctccagcttgtccgtgctggcagataactgattttgtacttctagaattgttttattatttttttgagatggagtttcactcttgtcacccaggctggagtgcaatggcacgaccttggctcactgcaacctctgcctcccaggttcaagcagttctcctgcctcagcctcccaagtagctgggattacaggcgcgcaccaccacgcccagctaatttttgtattttttttagtagagatggggtttcaccatgttggtcaggctgatcttgaactcctgacctcaggtgatccactcacctcagcctcccaaagtgctgggattacaggtgtgaaccagcgtgcctggcctagaattgttttagaatgtccaactgtttgttaccctttctcactccattaaagatctgagtagttcctaaaagaatatgtttgtttctttttcaattttattttctaatttatgtcccaggcccagtgcacatactggcctagccagactgagccaggtgggcttgtcggccttgcccttgaggcacttagtgagcccagaagcagtcaggctctcagcatggagctcagtgaagacagcggcagtggggcatgtgacagcatggaaagggacctttttggcgggggcatgggagtggaggtttcccctcttagacctgagggaaaagactaagagcaaaggcatgggccaggcatggtggctcacccctgtcatcccaccactttgggaggctaaagtgggattgcttgaagttcaggagctcaagaccagcctgggcagtatactgagacccccttctctataaaaacttaaaataaaaatcagccaggctcggaggtaggcacctgtagtcccaactacttgggagactgaggtggaaggatggcttcagcccgggaggttgctatgatcatgccacttcactccagcctgggtgacaaagcgtgaacctgtctttaaaaagaaaagcacaggcaggaacaggaagtaacaagagaacagtacagtgatgcagggacagggagggagcccacgctcccagagttccaggttgggggttctagcaggaatcgtggagaagttgggctggggagcaggggtaaccccctaaggtggggccctcaaagatccagatcccatgtgcccataagctggggggcagcccgtcagcactctgagggtcccccacaaaggccacgctggcttctgtggcccacagctcctggagtggatccggcgcaccatcccctggctggaggaccgtgtgccccaaaagactatccaggagatgcagcagaagctggaggacttccgcgactaccggcgtgtgcacaagccgcccaaggtgcaggagaagtgccagctggagatcaacttcaacacgctgcagaccaagctgcgcctcagcaaccggcccgccttcatgccctccgagggcaagatggtctcg

SEQ ID NO: 10564 - DNA, 546 bp, Homo sapiens
gccctgatccaccggcacagaccagagctgattgagtatgacaagctgaggaaggacgaccctgtcaccaacctgaacaatgccttcgaagtggctgagaaatacctcgacatccccaagatgctggatgcagaggatattgtgggcactctgaggccagatgagaaggccatcatgacttacgtgtcctgcttctaccacgctttctcgggggctcagaaggctgaaactgccgccaaccggatctgtaaggtgctggctgtcaaccaagagaacgagcacctgatggaggactacgagaagctggccagcgacctcctggagtggatccggcgcaccatcccctggctggaggaccgtgtgccccaaaagactatccaggagatgcagcagaagctggaggacttccgcgactaccggcgtgtgcacaagccgcccaaggtgcaggagaagtgccagctggagatcaacttcaacacgctgcagaccaagctgcgcctcagcaaccggcccgccttcatgccctccgagggcaagatggtctcg

SEQ ID NO: 10565 - DNA, 1729 bp, Homo sapiens
gaagcagctgaagcggcggtagcggcggcggctcgggcagaggggcgggagctgaggcgggagcggacaggctggtgggcgagcgagaggcggcggaatggtggactaccacgcggcgaaccagtcgtaccagtacggccccagcagcgcgggcaatggcgctggcggcgggggcagcatgggcgactacatggcccaggaggacgactgggaccgggacctgctgctggacccggcctgggagaagcagcagcgcaagaccttcacggcatggtgcaactcccacctgcggaaggcaggcacacagatcgagaacattgatgaggacttccgagacgggctcaagctcatgctgctcctggaggtcatatcaggggagcggttacctaagccggagcgggggaagatgagagtgcacaaaatcaacaatgtgaacaaagcgctggactttattgccagcaaaggcgtcaagctggtctccatcggggcagaagagattgtggacggcaacgcaaagatgaccctgggaatgatctggaccatcatccttaggttcgccatccaggacatctccgtggaagagacctcggccaaggaagggctccttctctggtgccagagaaagacagccccgtataagaacgtcaatgtgcagaacttccacatcagctggaaggatggtcttgccttcaatgccctgatccaccggcacagaccagagctgattgagtatgacaagctgaggaaggacgaccctgtcaccaacctgaacaatgccttcgaagtggctgagaaatacctcgacatccccaagatgctggatgcagaggacatcgtgaacacggcccggcccgacgagaaggccataatgacctatgtgtccagcttctaccatgccttttcaggagcgcagaaggctgaaactgccgccaaccggatctgtaaggtgctggctgtcaaccaagagaacgagcacctgatggaggactacgagaagctggccagcgacctcctggagtggatccggcgcaccatcccctggctggaggaccgtgtgccccaaaagactatccaggagatgcagcagaagctggaggacttccgcgactaccggcgtgtgcacaagccgcccaaggtgcaggagaagtgccagctggagatcaacttcaacacgctgcagaccaagctgcgcctcagcaaccggcccgccttcatgccctccgagggcaagatggtctcggacatcaacaatggctggcagcacttggagcaggctgagaagggctacgaggagtggctgctgaatgagatccgcaggctggagcggctcgaccacctggcagagaagttccggcagaaggcctccatccacgaggcctggactgacgggaaggaagccatgctgaagcaccgggactacgagacggccacactatcggacatcaaagccctcattcgcaagcacgaggccttcgagagcgacctggctgcgcaccaggaccgcgtggagcagatcgccgccattgcccaggagctcaagtacgtgcgggctcaggacactatcatcacctggctctcaccacagcctgcccagactggtggcggcagcacgccgaggcccagcctgcctcaaggcctggaatagggtccccagtgccccaactgcacctccttccagaagccagggaagggccttatgggatgaggccttttgcccatcctgtctcag

SEQ ID NO: 10566 - DNA, 441 bp, Homo sapiens
gcggcggaatggtggactaccacgcggcgaaccagtcgtaccagtacggccccagcagcgcgggcaatggcgctggcggcgggggcagcatgggcgactacatggcccaggaggacgactgggaccgggacctgctgctggacccggcctgggagaagcagcagcgcaagaccttcacggcatggtgcaactcccacctgcggaaggcaggcacacagatcgagaacattgatgaggacttccgagacgggctcaagctcatgctgctcctggaggtcatatcagaggagctgagttggcagaccgggcccccctgaaccgcaccccatcccaccagccccggccttgctttgtctggcctcacgtgtctcagattttctaagaaccaaaaaaaaaaaaggaaaaaaaacacaaaacaacaaaaaccaaaaaaaaaaaaaa

SEQ ID NO: 10567 - DNA, 4391 bp, Homo sapiens
agcggcggccggaagctggctgagccggcctttggtaacgccacctgcacttctgggggcgtcgagcctggcggtagaatcttcccagtaggcggcgcgggagggaaaagaggattgaggggctaggccgggcggatcccgtcctcccccgatgtgagcagttttccgaaaccccgtcaggcgaaggctgcccagagaggtggagtcggtagcggggccgggaacatgaggcagtctctcctattcctgaccagcgtggttcctttcgtgctggcgccgcgacctccggatgacccgggcttcggcccccaccagagactcgagaagcttgattctttgctctcagactacgatattctctctttatctaatatccagcagcattcggtaagaaaaagagatctacagacttcaacacatgtagaaacactactaactttttcagctttgaaaaggcattttaaattatacctgacatcaagtactgaacgtttttcacaaaatttcaaggtcgtggtggtggatggtaaaaacgaaagcgagtacactgtaaaatggcaggacttcttcactggacacgtggttggtgagcctgactctagggttctagcccacataagagatgatgatgttataatcagaatcaacacagatggggccgaatataacatagagccactttggagatttgttaatgataccaaagacaaaagaatgttagtttataaatctgaagatatcaagaatgtttcacgtttgcagtctccaaaagtgtgtggttatttaaaagtggataatgaagagttgctcccaaaagggttagtagacagagaaccacctgaagagcttgttcatcgagtgaaaagaagagctgacccagatcccatgaagaacacgtgtaaattattggtggtagcagatcatcgcttctacagatacatgggcagaggggaagagagtacaactacaaattacttaatagagctaattgacagagttgatgacatctatcggaacacttcatgggataatgcaggttttaaaggctatggaatacagatagagcagattcgcattctcaagtctccacaagaggtaaaacctggtgaaaagcactacaacatggcaaaaagttacccaaatgaagaaaaggatgcttgggatgtgaagatgttgctagagcaatttagctttgatatagctgaggaagcatctaaagtttgcttggcacaccttttcacataccaagattttgatatgggaactcttggattagcttatgttggctctcccagagcaaacagccatggaggtgtttgtccaaaggcttattatagcccagttgggaagaaaaatatctatttgaatagtggtttgacgagcacaaagaattatggtaaaaccatccttacaaaggaagctgacctggttacaactcatgaattgggacataattttggagcagaacatgatccggatggtctagcagaatgtgccccgaatgaggaccagggagggaaatatgtcatgtatcccatagctgtgagtggcgatcacgagaacaataagatgttttcaaactgcagtaaacaatcaatctataagaccattgaaagtaaggcccaggagtgttttcaagaacgcagcaataaagtttgtgggaactcgagggtggatgaaggagaagagtgtgatcctggcatcatgtatctgaacaacgacacctgctgcaacagcgactgcacgttgaaggaaggtgtccagtgcagtgacaggaacagtccttgctgtaaaaactgtcagtttgagactgcccagaagaagtgccaggaggcgattaatgctacttgcaaaggcgtgtcctactgcacaggtaatagcagtgagtgcccgcctccaggaaatgctgaagatgacactgtttgcttggatcttggcaagtgtaaggatgggaaatgcatccctttctgcgagagggaacagcagctggagtcctgtgcatgtaatgaaactgacaactcctgcaaggtgtgctgcagggacctttctggccgctgtgtgccctatgtcgatgctgaacaaaagaacttatttttgaggaaaggaaagccctgtacagtaggattttgtgacatgaatggcaaatgtgagaaacgagtacaggatgtaattgaacgattttgggatttcattgaccagctgagcatcaatacttttggaaagtttttagcagacaacatcgttgggtctgtcctggttttctccttgatattttggattcctttcagcattcttgtccattgtgtggataagaaattggataaacagtatgaatctctgtctctgtttcaccccagtaacgtcgaaatgctgagcagcatggattctgcatcggttcgcattatcaaaccctttcctgcgccccagactccaggccgcctgcagcctgcccctgtgatcccttcggcgccagcagctccaaaactggaccaccagagaatggacaccatccaggaagaccccagcacagactcacatatggacgaggatgggtttgagaaggaccccttcccaaatagcagcacagctgccaagtcatttgaggatctcacggaccatccggtcaccagaagtgaaaaggctgcctcctttaaactgcagcgtcagaatcgtgttgacagcaaagaaacagagtgctaatttagttctcagctcttctgacttaagtgtgcaaaatatttttatagatttgacctacaaatcaatcacagcttgtattttgtgaagactgggaagtgacttagcagatgctggtcatgtgtttgaacttcctgcaggtaaacagttcttgtgtggtttggcccttctccttttgaaaaggtaaggtgaaggtgaatctagcttattttgaggctttcaggttttagtttttaaaatatcttttgacctgtggtgcaaaagcagaaaatacagctggattgggttatgaatatttacgtttttgtaaattaatcttttatattgataacagcactgactagggaaatgatcagtttttttttatacactgtaatgaaccgctgaatatgaggcatttggcatttatttgtgatgacaactggaatagttttttttttttttttttttttttgccttcaactaaaaacaaaggagataaatctagtatacattgtctctaaattgtgggtctatttctagttattacccagagtttttatgtagcagggaaaatatatatctaaatttagaaatcatttgggttaatatggctcttcataattctaagactaatgctctctagaaacctaaccacctaccttacagtgagggctatacatggtagccagttgaatttatggaatctaccaactgtttagggccctgatttgctgggcagtttttctgtattttataagtatcttcatgtatccctgttactgatagggatacatgctcttagaaaattcactattggctgggagtggtggctcatgcctgtaatcccagcacttggagaggctgaggttgcgccactacactccagcctgggtgacagagtgagactctgcctcaaaaaaaaaaaaaaaaaaaaaaaattcactatctacaaacctagaatatttaaaatacaaagattgcctgttttcaaacactattgaataagagggtgagatatttcttaacaacaacaacaacaaaaaaaacaggttgttttgaatgtgatgagccagccaggagatagaatactacctgcccttagggttgggggctgtccccacaagacttgatacttcagaaaccctttttattgacccacaagcagatatttgaattacttcttactttattgctccaggattctggatgggctgcatttactgtgtgaaggataaaaatcattagcctggattctgatttctataaattgccattaaaagctttttttcccctaagaactgaaatgtgctcaccagccaaaacattttaacttgtaaattttgagggcagttaaccaaacctgtgactaatcatatctcctcctaccccccatttccaaggacatttgttactcagatacttgttatactaatacttgaacttgtaccttatggtatttgctatcttttaactagtcatgatattcttatactttagttacacttttggaatttgatacaaggttgagtggggtgtgtgggtgtatgtatgagtgaaacagttctcaaaagaatgtaagaaaaaccatttttataaaattgtgactttttaaaaacatagtctttgtcatttatagaattaacaagctgctcagggtatattttatagctgtagcactgatatctgcattaataaatactgtcgaaacacaa

SEQ ID NO: 10568 - DNA, 28274 bp, Homo sapiens
gggcgtcgagcctggcggtagaatcttcccagtaggcggcgcgggagggaaaagaggattgaggggctaggccgggcggatcccgtcctcccccgatgtgagcagttttccgaaaccccgtcaggcgaaggctgcccagagaggtggagtcggtagcggggccgggaacatgaggcagtctctcctattcctgaccagcgtggttcctttcgtgctggcgccgcgacctccggatgacccgggcttcggcccccaccagagactcggtaaagacccaggggagttggcttaggccggcgcctggagcgctcgtttgagggaagagcaggggagctgggtctatcaggtgtttgggggcggggtattggcgatggtggcgcgtccctaagttttcagtgtagaagggggtgtggctctcggagtttggggaaagaataaaggagatgggcctgtctctgagtgggaaagggctactggacgggctccatgtagtgactgagcgcctgagaggggtttgctccctagctttgtgttcggggagggtgttgggaaagcggtaaggagtagggtggctggatcttgtttggagagggagatgtggtcagggttcttgccttagtagggaacaaatctagtgttgtgtgttcctaccagagccagaaaggaagggcccaaagctccagaattcttcctggtcctcgaaggagggaactagaatttctgctgtaggaggtacttatgcagtaatctcgttgggaggcggagactggagttggagtcttaagagttgtgtttttgcgaacatcctaagcacgttcttggttatttcaattgtagcttattggaggtgcttgggagatggggggaggcggaaacctggtaagccaactcgtgatgctgccactatgaatgctttccttgcacttttaaacaaagaaattatcaagagtgacgagtttgatgaatttagaggctagaaagtagagggttcctatttcattagattttccagagagattggattttaaggatggagatgcattaagggatctgaactttggtggaagtaagtttgcgtgaacttttagtgtattttaaaatccttttatctttcaaaaattgacgtgtaagatactttaattagtaataaagtgtgaaataatgttttcccagtgtgtgaaattgtaggcttgcatggttgtactggttcccaaatttcaccatgataccatgtgtagtattttttttctttatatttagtggacagaaattgtaatggattggtatggatactaaaggtgttgagagtgttatcacttgaacagctgtcttatgattctttccgattgaaatggattacaagtgactaatgaaaggcaagggatcttgttaggaagtgctgagaagtggtaagtcagtacaaattgaaggacattttgaggtaggattgtggttaggatggagggatagggtaagggtcttcattttaaggataaatgttagtaaaaagaataaatatgtattttgagatattaaaattatatttgcaccaccctgacacaactgtttcacttatgttattaatctgttgttcgtaggtaaaaataagcatgagtcccaaggaagcatacagtttaaagagaaacattactttctagatcaattcataacatttgcagatcgtaaggttttttagaccattttttttttccaagacagagtcttgctctgttgcccaggctggagtgcagtggcgcgatctcagctcactgcaacctccgcctcccggggttcaagcagttcacctgccttagcctcctgagtagctgggattacaggcatgtgccaccacgcccagctaatttttgtattcctagtagagacggggtttcaccatgttggccaggctggtctagaactcttgacctcgtgatccgcccacctgggcctccctaagtgctgggattacaggcatgaaccaccgctcctggcccatgtgtttgttttttatttgcaaaatgcagaccacctgtgccagaagaatgcatagacttttcttttttcttttcttttctttttctttctttttttttttttttgaggcagtgttttgctcttgttgcccaggctggagtgcaatggcgtcatctcagctcaccacaacctccgcctcccgggttcaagcaattctcctgcctcagcctcccaagtagctgggattacaggcatgtgccaccacgtccggctaattttttgtatttttagtagagatggggtttctccatgttattcaggctggtctcgaactcctgacctcaggtgatcagcacacctcggcctcccaaagtgctgggattaaaggcttgagccaccaggcccggcctctttttttttttttaaacgaaatatttgaaggacacacaagtattatacgtggcattggaaatacaaagatcagacgatatccatcttcaaatggttatagcatagggaaatagacattcatttaggacacttctaaaacagcatagaggagagtgctagagtacgttatagcaagtgttatcaccaaatgaatcttagagatcaagtctagttttcaaataaaggaggaggaaaatgagtctcaggaagatgctgtcagttgtcaatgatgaacataggccttgtgggtatttttcttttgaagaatgactttttttttcagtttgtttgacagcttacaatataatttgttacttaaccttaccattagattgagttggtcaagactagcaaatagtttcatagttgaaaaacatgctttattatttattttttatgtttattgtcctacaaatactactatattgcagtactcaatatcgattaggcatatgacaacatttttctgaaaggcaaaaaatacctaataaaatgaagcctggtttttagagtcctctatgggtcaccaaaaatgatttcaattgaactgttatgaattgcataatttaggaaagttatgagtcatatgagcttagtcatgatgatatcttgttgaagttgcagctggggtgtataagtctcactttgatttcaaaatcgttttccctttgtgttacttttaataaaagaggatgtagtgggtgggaggaaaaaatataggtcacagatgagggatgagaaagtttgtatctgaaacatgtattttcaaatttaccttgaggttattggcatggggattctccatattgcagtgctgatttcattattgacagcaccattttactcagtattttgacatctggctttctcttttgatgttaattttgcttactggctgcattcctttgaaacctaaatgcttaactgccctaactgctccaagggagatttaatgtaactctgctttatattagtctaagagataaaccatatttcaagagtagaatggagaggaattaagcagataattgtgatggggaaactggagagatccttttgactttcacaggatttcctagaacattaaatataggtttcctccaaggccaattgtggttgatttttggatccttcaccattttctatttgtgagataataagtgtatacagctggaagtgtaatgtgaagaaagtctgaaaaagattgataggaaaggaggacaggaatgggcttcattgaggtaacggaagtgaaatgaaaggcttttcatatatgggttgagcatccctaatctgaaatgctccaaaatttgaaactttttgaatgctggcatgacagcacacattacccctaacacacgattttttcactgttagtggtatattttttactgtgtagtacttatgtgtgaataggtataacaaaacgattacttattgtagcatgtaaaatcagtcaggaatgatggtgatgccagacaaccacagattatttatgtgggtggccgagacagtgacacctttgctttcgaatgcttcgttgtacacaaactttttttcatgcaaaaaaagttacttaaaaatattgtttaggccaggcgcggtggctcatgcctgtaatcccagcactttgggaggccgagctgggtggatcacgaggtcaggagatcgagaccatcctggctaacatggtgaaaccctgtctgtactaaaaatacaaaaaattagccaggtgtggtagcaggcgcctgtagtcccagctactcgggaggctgaggcaggagaatggtgtgaacctgggaggtggagcttgcagtgagccgagatcgcgccactgcactccagcctgggcgacagagcaagactccatctcaaagtaagtgaataaatgaaacataaatgaattttatatttagacttgggtcccatccccaagatacctcattatgtatatgcaaatatttcaaaatttaaaaaattctgatgaatgaaacacttctggtctcaagcattttggataagggatgctcaatctgtatctctttatttactcctaaaatcagccaaggaaatgggcatctctccgttcccccccttccttttttttttttctttgttgttacatgagttgtactggtttcacttcatttgacagtgttctgctaatgactagacgtgtatctctgacctggacttgttctctggagttcatattcagctgcccatttggcacttcaaatataacatgtccaaaattagttaccttttttttttttttgagacagagtctcactgtcacccaggctggagcgcagtggcgcaatcttggcttactgcaacctccacttcccaggttcaagtgattctcgtgcctcagcctcacgaatagctgggattacaggtgtcccccaccacgcctggctaattttttttttttttttttttttgtatttttagtagagatggggtttcatcatattggacaggcctgtgttgaactcctgacctctggtgatccacctgcctcagcctcccaaagtgctgggattacagacgtgaaccactgccccagccagttacctattcttttgattacaagaatgagtagctggacacagtggcttacacctatagtcccagcactttgggaggctgaggccggcggatgacttgaggccaggagttcaagaccagcttgaccaacatggtgaaacctgtctctactaaaaatacaaaaattagccaggcgtggtggtgcgtgcctgtaatcccagctactggggagactgaggcaggagaattgcttgaacccgggaggcagaggttgcagtgtgccaaggttgagccactgcagtgcagcctgggcagcagagtgagactccatctcaaaaaaaaaaaaaaaaaaaaaaaagaatgagtatcggatacaggtttagcctaggactaggcagggctgctggtaattgtggaagtagtctcattgcctaacctgaaacttgcatcctggttactggtcttgctggagagtcttggctcaggttacgtcccaggtctgttgaggagctcttgatagggaattagttgaagcagctcatactctatcctcctttactggtataaatccataaaattgtttagttcccaggctctggggtccctggcctagcagagagcactgctccctttttctcattccttagtcccaacaacccgcacctgacacttactacacgtggcctgcttccctgtcctgtgtgttttggggggtgctgaagaggaaggctcctgtgtcttcagcacaaacacaataaacacttcacagcagtactggctttatgttttccatttctgatatcagaagtaggagcatgacattgatagtgtcattttgggggaacttttcgtacttcatgcagcagagcagtgaagagtgagctgagtgccttggggttctgcagtacactctcaagtagtattttaggaaaatgcaatttgctgaaaaaataaaagaaattaatgtaaaaaatccacaagctgggcgcggtggctcacgactgtcatctcagcattttggaaagctaagggggaaggatcacttgagcccaggagtttgagaccaggctgggcaacatggcaagaccttgtctctacaaaaaaatagaaacaaaaattagccaggtgcggtggcatgtgcctgtggtcccagccacccggaggattgctcatgcccaggaggttgaggctgcagtgagtggtgattgtgccctgcactctagcctgagcaacagagcgagaccctgtctcaaaaacaaaacaaaacaaaaacccacacgtttccagaaccttctcatataacactttatttacattgttcttaaatacgtgtgggacggttatatacataccactatacttatgtgtatatatgttgatatacacacaaaattatatacataatttttgtttgtttgtttttgagatggagtctcactctatcacctaggctggagtgcagtggcgtgatctcagctcactcactgcaacctctgccacccgggttcaagcgattctcctgcctcaggcttctgagtagctgggattacaggtgcctgccaccgcgcctggctaatttttgtatttttagtagagactgggttttaccatgttggccaggctggtcttgaactcccacccttgtgatccacccacctcggcctcccaaagtgctgggattacaggtgtgagccactgtgacctgccatatacataattttttaaagtttcacgattagttttagcttaaaaatgtcagctctgggcttaatgaagaaaatatggatatactttatgtcaatgcattaaagtgaatggccataaaagcttatcccagagacaaaacaattcagatataagagaagtgggagagtggaaggtttatctaatcttctgtaggcaactccacagctacaaccagaaggccattttgttacaggcctgaaagccccgttttctttttattcttctttgaaacctttagaaggaacaaagtattggctactttttaccgctgatgtcagtgttaagaatcttgtgataacatagatttactctccctgctgaaaatcactatgtggctcatcagtaacacaactagacatgatgacttaatgcaaaggaagtcctatgtaaatgagcaatgaaattgcaactgtgtataaggaacaaaatagaatatgaaactccagaatcttttgttttcatttctgtttctcccaaggctctatcattcaaaactccagaatctttcagcatgcaattgtctcctgatatcagcccctctcttgttttgttttcttttttttttttttaatcacagtgagccacaacctaggagtcttttagtggtttctacttggtttgctctgcagcctaccagcagatttcctacattccggtcttgttcccctctagcccattctccacactgcagtcataatgaaatttctttcttttttgggggggatggagtctcactctgtcacccaggttggagtgcagtggcatgatctcggctcactgccacctttgcctcctgggttcaagcgattctcatgcctcagcctcccaagtagctgagattatacgcacctgctaccacgcccagctaatcttgtatttttagcagagacagggttttgccacgttggccaggctggtctctaactcctgacctcaagtgatcgcccaccttggctttctctctctttttttttttttggattttgagacaggatctggcctcgttgcctaggctggagtgcagtggcacgatatcagctcactgcaacctctgcctcctgagctcaagccatcctcccacctcagcctcctgagcagctgggactgcaggtgtacaccaccacgcctggctaatttttgtattttattttatttatttttttggtagagacggggttttgctgtgttgcccaagcttgtcttgaactcctggggctcaagcgatctacccatcttggcctcccaaggtgctgggatgacaggcatgagccaccacagctggcctataatgaaatttccaacttacagctattgccattatccaaagcccagaatccctgatttccttccatagcccttcatggcctgaccagtgcctgactctccagcctcacacttcatattctctctgtactgctctgcactgtagcctcattgagttgctttcacgtctttaagtgttgtgttctattttttgtggaattcagcatatgttatgcccttgacctaaggcctctcctttcttttccttctctggggtgctgcctcatccttctggtcttcaaaaccgtttccctgggaaaacatctttgactcagcaggcagggatcatgcccctgctgtgtctgtgcataactttctgtggctacttctgtcttggtctgtgatgtactttataataattttggtctttcctccagtgtcacaatactggaagtctgtttctttttctctgtgttgtatccttagtgcctgaaaggtaggaggttctcaataaatatttgttaaataatcaagtaaatggagtctggtggaaaagagaaaaaataagtgtagaatgtgtgtgcaagaaaggaggggtagggggatgaaaaagataacaaaagcacataacaaaacaacaaaaagcaaaaacaacaaaaaatgcagatgacaaaaaagataacaaaatgatgactgctgtggcaacttgtagaaagtaaggaaggtgctctcattctagagagaagtaggcagccattgtagttttttaaagagagaatatgggctgggctctgtggcccacgcctgtaatcccagcactttgggaggccgaagtgggtggatcacgaggtcaagagatcaagaccatcctggccaacacagtgaaaccccttctctactaaaaatacaaaaattagctggataggtggtgtgcacctgtagtcccagctacttgggaggctgagacaggagaatcgcttgaacccaggaggcggaggttgcagtgagctgagatcacgccactgcattccagcctggcgacagagtgagactccatttcaaaaaaaaaaaaagaatatggccagacactgagctgagatagacagtgcggcagtgtctggtattaactgtaataaactctactgtcagaagcaggtggtttatacttaagtttattgagagaattggatatggataagagataaactcttgggaaatggggagaaatataaattctgttgtaaagcctgtaaaaaattgagattactagtggttagaattttggaagtgaagtgcagtgaaatattgagtacctgagaggttacttgttagtgaaaacacaatagcagtagtacgtagctacagtttggctccaaaggaagaactgtttttactatagtttgtaatggcttcagaatcttcaatttgagatatccagttattaaaagagaatcaattgcagttgaaatgcattagttaagtattttaaagtgctttagcaagctacatttaaaaagtgcttattatagaaaatatacccaaaataaccaatgatgttactgtcttgtgcttattttttctagacctatttttatacatagttaagattatacaatatgaatatttctgaaatctatatttaacattataacatatgtatttttccatgttctttctttttttttttttttgagactgggtctcatcctgtcacccaggctggagtgcagtggtgctatcttggcttactgcagccttgacctcctgggctcaagtgatcctcccgcctgaaccttctgagtagctgagactacaagcacatgccaccatgcctggctaattttatttttactttttggagagatgagggtctcactattttgcccaggctggtctcgaactccttgggtcaagcaattctctcaccttgacctcccaaagtgctgggattacaggagcgagccaccgccctcagccccatgttcttaaaaaccttttgtgaacgacatttaaaatagttgcagattttttcccctgtctttggaagtgttacaacatccaaccatttcacagttactaatttaccatcattctggtttttgtccttgaaaataaggcaaggctgaataatgaacatctttgtggctaaagtttttttctttactttgagttgttaccttcctttagcttagttcagtggttttttctttttcttttttgagatggagtcttgccttgttgcccaggctggagagtagtggtgtgatctcggctcactgcaacctccgcctcccaggttcaagcagttctcttgcctcagcctaccgagtagctgggattataggcgtctgctgccatgcccagctaattttttgtatttttagtagagacagggttttgccatgttggccaggctggtcttgaactcctgacctcaggtgatccacccgcctctgcctctccaagtgctgggattacaagtgtgagccaccatgcccagccagttcagtgattttcatatttgagtgtgtcagccttgcctggaagccttgttaaacacagactattggatcccactgggcggatttctgtttgagcaggtctgaggggagacctgagcatttgcatttttaacaaattcccagttgatgatgatgctgctggtttgggaactacactttgagaactactgggctatattattgacaatgaaactataatgttgaggttaagttcctaagtcagtaggagtgattatgatcttgaatgaaactgagttcatgtaccaacctgtatcagggaaattgaagaactaaaggaccatattgcatttcagcactgagaattcgtgcagtttgtgaacatgtgagtgctgatatgtgcaaggtttttgctgagtattgtgaggcaaggatgttgtaatgaataaaaaatagccctttttggctttttttttcttcttttgagatggagtcttgctctgtcgccaggctggagtgcagtgatgtgatctcagctcactgcaacttccgcctcccaggttcaagcgattcttctgcctcagcctcatgagtagctgggactacaggtgcccgccaccacgcctggctaattttttgtattttggtagagactgggtttcaccatgtttgccaggatggtctccatctcctgaccttgtgatccccctgccttggcctcccaaagtgctgggattacaggcgtgagccaccgtgcccagcccggccttttttcccccgcctagagatggagtcttgctctgtcgcccaggctagagtgtagtggtgcaatctcagctccctgcaacatctgcctcctgggttcaagcgattctcctgcctcaaactagctgggattacaggcatgcaccaccatgcccggctaattttgtatttttagtagagacagggtttcaccatgttaatcaggctggtctggaactcctggcttcaggtgatccttggcctcccaaagtgctgggattacaggtgtgagccaccatgcatggcctcatttgggaaacttttgatatcagaatcttaggtttttcattagagattgtcagatttccatattcctctggaaggtaaaggcctaattgctagcattctggaagccagttagggtaggagggtaggagggtagggtattgggtagaggataaagaaggggtttgggaaaggtggggggtgtctcttggcagttgtatggttaaattgagtttttgttttatttagtgatatgtgttttttgggtacatgtgatattttgatacctgtgtataatatgtagtgatcaaatcagggtgattgggatacccatcatttgaaacatcttttctgtgttaggaatattacaagtcttctagctgttttgaagtatacaataaattgttaactataatttctgtactgtactatcaaatattagaacttactaatcaaactgtatttttgtaacactaaccactttctgttcatctccaccactcccacttcccttctcagcctctggtaaccaccattctgctgtctacctccacgagatccacttttttagcttccacacatgagtaagagtctttcttttaaaactggttttgtgagcatatttaacatcagtagcaataaacttgtattttaagctcctgttgctgtattttgaggaccttctaagtccattggaaggattttgaataccatagtgtctgcagtgatagttgttgaaagaaagggaaggcatcagtgcaaatatttttagacagtttttaaagagactcaagtcacccaatttgtcttctaaaaatcctgattttggaagaggcagtggagtttctgttgataaaaaatgatttatagtttgtgcttggcacttcctaatggattacatcaggaaagatttattgtctggcactctcattttaacgatactacaattgattattaggtttagatgctaataccttttttacctttatttcagagaagcttgattctttgctctcagactacgatattctctctttatctaatatccagcagcattcggtaagaaaaagagatctacagacttcaacacatgtagaaacactactaactttttcagctttgaaaaggtaatttgaattattcatggaataatgttggggcactgggggcttggtttggcaaaaacaaaaaagtaagggtatctactgaaatcttgggaaattacattttaaagatttgtaattaatttccagtataatgcttattctaaaattcatactggggctgggtgcagtggctcacgcctataatccgagcactttggggggccaagacatgtggattgcttgagctcaggagtttgcccaagctcagcctgggcaacatggcaaaaccccgtctctactaaaagtacaaaaattaggcatggtgacacgtgcctgtaatcccagctacttgggaggctgaggcaggagaatcacttgaaccagggaggtggaggctgcactagccgagatggtgccactgcactccagactgggcaacagagtgagactctgtctcaaaaaataaataaataaaataaataaagttcatactgatgagtatttttaaaaaagtaaatagatattgcagaggtgttaatgatggtaacgatgtttagaaaattctaacataatttaaattaattgaatgcttataaaaccttttgtttttggtgctactttataaccatcaatcatgtgctaaatattatctttatatatgaagagataaagattttgttcaggaccccacagcctggtggtgagctgggtctagattttactgttctatttatttatttagctaactagttacttagtttccaggattctttaacctgcttcatatttatttatttttaaaaacagggtcttgccatgttgccaaggctgatcttgaacttctgggctcaggtggtctttccatcttggcctcccaaagtgctgggattacaggtgtgagccaccatgcctggcccaaatttaatattctttctacattgagttcctcttacttcttagcataaattgatggatatgttctatttcagtagtaattttaataccacgtattgttttgcacattgaaatgttaaataattgcaggcctctttttaaagtctttaggaagctttattcagtatcaaaaaacagacacatggagaattgactgaattattctttatttatttatttttttgagagtcttgctctgtcgtccaggctggagtgcagttgtgtgatcttggctcactgcaacctctgcctcctgggttcaagcgattcttgtgcctcagcctctcaagtagctgggactacaggtgcacagcaccacgcctgggtgatttttgttatttttagtagagacagagtttcaccatgttggccaggctggtcttgaactcctcacctcaagtgatccacgatctcggcctcccaaagtgctgggattacagacaggggccactgcatctggccatctttattctttatataggacaagccttctcaactatgttaaaaaataaaaggaatatgtgcgtctggtttaaaaaacaagccatggaggatatgcaaagtttttacttctaactcagttagacttctcagacccagagaggtttcctttgtaaacttccaattttttgttttgttttgttttttgttttttgagacagagtttttgctcttgtcgcccagactggagtgcaatggcacgatcttagctcactgaagcctccacctctcgggttcaagcagttctcctgcctcagcttcccgagtagctgggattacaggagcccactgccatgctcagctaatttttgtatttttagtagagatgaggtttcaccatgttggccaggatggtcttgaactcctgacctcaggtgatccacctgcctcaggctcccaatgtgatgggattacaggtgtgagccaccgtgcccgacccaaaatattttaatgcatgttttttgcctataggtctctgtgtgtgtataggtgatatagatagcatatttacctcattttaaacagctgcataaatattcctattgcatagaattgtaacaacatactgactaatacactacagatggatattgtttaaccaaagtgatttttttaatacaacaaacagtgctctagtgagtatctttgtaaatgtgtaccttgatgaggtgtttttataggatatattcctggaaggagaattactgggtcaaggatatgtatactatgtttattgatattgctctttcctcccaaagagatttgacaaatttattcttccagcagcaatatatgagtttacctgtttcctgttatctttgccaatagtaggtttatcagcctttaactgtcacccctctaaagggcatggcattttatagttgttttgattttcattttgtgtgacattgagcatctttttatatatttgtaagtaatttgttttatatttctgtaaactgcctttttatctcttttgactatttttctattgaatttgtctttctaactactgaattgtagcagtgcttagtatattaaggagattggttcattgtcatgtggttattttaggcaaatttttaatgcaaattaatttttcctagctattgcaattatccttaggttattttttaatgacttctttttattcgattttatgtcagaatattatagtattggttattagctttcaacttacaccaaatttgagcagattggtaatattaatagctacagttaatcaggtacttattttctgtaatttactggcattttacataagttatctctaaaagtgattccttttttgaaggaacaaaaaaaaaaaaattaaggcttagacagcttagtaacttgcccaagattactcagctagtaaatgacagatacaagatttgaacaaaggttggactccaaaacttgtgttatttctgctatactggtggagagtttggtgaagaagtggatatagtagcaagaaataagtaggagcgaaggaagagtgaggaaactataaaatgaaaagaactcaaagtttagctttttgggtttctttggatttgaagtggcctgtagaatccgtattctagaggcaaaaacttccatagccttacatatttctctttcaagtttcgtagatgacattgattccctaagaaaatattaaatcgtagccacttgttatcttttctctgtgtaagaaagcagggaagtatgtaatttattttacaaagtttccatactaaatatttaatgggaaatttatctaacagtctatggaattttataccaggtgttttaaaataggttatttcctttaatccccaaaaccgttcagttattaggtgatattatttccatttgtagataaatacttaggattcaaagattgaggccaaggtcggacagtgagtaaatgaaagtaggacttaagccaagtttgtcagactccaaagcccataccctttcttttctatcatattgcgtcattaaagtttaaaacaagaacaaaaacaaagatagctgaagtaatcagtttgtatcagggctgaattaactctatgaaacccctcattacttgatggtaaatgagaagattccgtttttcgatagcagtggaaggcaaagtaatttaaaccaagatcattgcattaaatttggatgtaactattagaggttgaaaaagcatagaaacactgagaggttgtatgaagagttgaagtaacttaagaaaaaaagaaacttgtttaaaatttgccttacaagtttcatttcctttttgttataaatcaagaaattatcagctaggcgtggtgactcacacatgtaatcccagcactttgggaggccgagctggatggatcatgaggtcatgaggtcaggagatcgagaccatcctggctaacacggtgaaaccccgtctctactaaaaatacaaaaaattagccaggcgtggtagcaggcgcctgtagtcccagctatttgggaggctgaggcaggggaatggcgtgaacccaggaggtggagcttgcagttagccgagattgcgccactgcactccagcctgggcgacagagtgagactccgtctcaaaaaaaaaaaaaaatcaagaaattatcttatttttaaataacgaaaaagctgcggagtatatactgttttgatacttttttgatgttgcctgaatttttttggaaaaagttaaatgtttctcctaaaagtgaaatatatcagattacttgagaaggtctagaactgataaagaaatgaaagtgatatacctgactaaatggaccattaaaaatggttagggtaataatgttaattcaaactggttagctggtctttagttactgtaaattcttaagtcaaaagtcagaaagataaaacgttaaagaaatctgtaagaaaatgacttcacataattttgggaggataaagtaaaagaaattttgacattctgttggacgttttataactcaaaagctaatattggaaaatcaaaaaacatgaattttataatcgcttggtctttatctttagaaaagattcttaatgtagcaaatgaaaaatgcaattccactgatttctttctgaaaagaacattaagtaatgttgcaactcttagctttaaaacaaaataataagacatttataataagtatgcttttgaaagttctcagcataactggagggaaaaatcataactgagaatgtgtgggaagatatgttttaggatagcagaagaaaatgttccaaggatttacgaaataatgttctattgtcttttccctttgaccattaaaaaaccacaagcaaactaaaattaccttgttatgctcaaaaagttaaaaatatttgttgccatggagatagtcccagtctagatttctttccggtagtttaaagacttttgcaatcccatggggaagtaatatattttcagtacaacagctgacaaaatttgtttctgtgggtgagatgaataatatacctttctttgtctttggtgttcatggacacattgaaagactataaataatacttgagaaagtcttgctcaccactcctagttttcatgtaaggatggaaagtcatagaaaacaaaaagaatagtaagccaattaaagaactggactgaaactcaacaaaaagaatagtaagcccactaaagaactgaagtgtataccccctcccctctcctcccctcccttcccctcccctcccttcccctcccttccccttcccttcccctctcttccccctccccttcccctctcctccccctctcctcccctctcctccccctctcctcccctcccctcccctcccctcccctcttttcctgtcttctggtgccaatggagtctatattctaatgtctgtcttagataccttgtatttattttcctaactgtaattgtgggttacttttttgcaagatatgttgttttgaggaggaaaaaaagcacgagtactttttttttttcttattttgagcgggagtctcgcgctgtcaaccaggctggcgatctcggctcacagcaggctccgcctcccgggttcactccattctcctgcctcagcctcccaagtagctgggactataggcacccgccaccatgcctggctaatttttgtatttttagtagagatggggtttcgctgtgttagccaggatggtctcgatctcctgacctcgtgatccgcccagctcaacctcccaaagtgctgggattacaggcgtgagccactacgcacggccgcatgagtacttttaaatatagaaagcagcatttattaattttgcacagcaataagaattttctcatagtccacccagcttgatagagacagcatagtacagggttttgaaataaaccaggtttatttcccagtttcaccatttactagctgtgtaactttgagtaggttgattagcttccaagcctcaatttgtacttgtgtgaagtggggataatagatgcatagtacctaacaccaagtaggtgttcaataaatggtatataataggattagtttttgataataatttttttagataatcaggattccaacttaactacgcagtcatgtgtgtttccttattcttcagtgttttccaggagagatgaatgtataagttctttgaatatctttaccctagtgtgagtttattgtgatctgctgtttttatagctaaataaattagttcatttgtcgttacaggagatatattgctctaagtacctaataagactttagttgtaacttgcatagtgttttattaatgtcaatgcttctggctttttaagaaagtttaattatgtgaaaatgagacttaaaatttgtgtgcttagagtaaaatatgaatgcatttttcttcaggcattttaaattatacctgacatcaagtactgaacgtttttcacaaaatttcaaggtcgtggtggtggatggtaaaaacgaaagcgagtacactgtaaaatggcaggacttcttcactggacacgtggttggttagtatggagcttgttggtttgcccctgtgtctggtgtattaggtctccaaatctaacttgattgcatattcttttctggtgcaggatagtggggacggggtgtcatagaagtgctattctttgacttttctttgaggtatataagtttagaggcaggaacattctaatagaaggaaatgagtattatctaaatgtcatactagctggctggtttaatgattaaaattaaattcttcttaagtgataggaatttaacctttcttttcctcagtgactgtaagctttctttatgatattttaaacagggaagcttggagataaaatacttggtgatcctattacgtatgtatttgagaaaatttatcaaacaagcaattgcagtttactttttgacctttttctgcaatgagaaaaaaaaatgtcattgaaatccacaaatagtatagttcctaggcctgtacattctaaatcatgctttctgtctctcttagttcttcctttacctagaagtagataaaattattccagaagaaaatcttagcagttttgtttgttttgggaaagggataggtttcaagtgactaaacttgaggctaccccttaggagttgagattatctagcttctttctggagcctttgtttcttgttttgcagagctctcacagtactaggcaaattccaccctgaaggatttaatttttattgagagtaatgcatagtttcttatttgatgtaagtatttttaaataataattttttttttctcttaaggtgagcctgactctagggttctagcccacataagagatgatgatgttataatcagaatcaacacagatggggccgaatataacatagaggtaaatttatatgtgaattttttttcagtagcttatatctctgattttcaaaaagctgctcagttctgcaaaggtgaaaagtaattatacttatttctttcctcttcgtatttgaagttttttactaggaaagtagactttttaaaaaaggataatctctaagaagctgtgttatgatacaccctgtatttctaagtaccataattgagagagttacatgtgggatggataataggaagagaaaactttctttccctcctgactcattttttaattctttctcaaataataaatgtaaacatcctcagaaatgaaaagtgaagtattatttttcaatttctctgtttttctgctagacacactggaaatgctagatcaatgaaaggtggtagttcatagtctgagaagttaaagaggaagctaggaaagtcaggctgtggtcactcttccattgaaagagtagcaatagaaatcaagaccacagtggctgcattggttaagacacatatctatctgtcagatattagtctacaaaacaaaacgtttcctcataattgtgaattgaagttgattctgtgtttcctgaaaaatgagaagactctgggtggtggtggtgatatcactaaaatagatcacctgtgggaaaactgagtaagattggtcaaaatgaaatgttcaggtgtatttgagtgcttaataggggtaaaacagtctgctggagctatatatactatatgttttaattatatccaatctacatgactgttagtcctttgactgtccattattgtgaaaaagaaacctatggccttgcagtatgttatagtttgttaatgtttaagctatttaatgtcaatgttttgaggagtctggcctaccagaaagagtcagaaatttagtagaaagtaaaggaactaatattataaatgcattcattctagaataggcaaagcatcactggaatgtcttaaatttgcctgttctttcaaatcaatttattttttaagaatacctttattttaaaatatatgctcattgcaaaattcggaaaatagattatctgtacttggacagataactactattgacattttgacagacatccttccaaatttttttttctatgtgtaaatacacaaataaatatagttatacccactattttttcctgcaaaactaggaccatacaatatgtacagtttgtcttcacacatttttcgtttaacaatatgattatgaaccttttcgtgttaatatagatctaaattagggttttgtttgtttgtttgtttgttttttgagacggagtcttgctctgtcacccaggctagagtgcaatggcgtgatcttggctcactataacctctgcctccccggttcaggcgattctcctgccttagcctcccaagtagctgggactgcaggtgtgcgccatgatgtccggctaattttttttcttttttttgagatggagtatcactctgtcactcaggctagagtgcactggcgtggtctcggctcactgcaacctctggctcctgggttcaggcggttctcccgccttagacccttgagtagctcagactacaggcacatgctacctcacctggctaatttttgtatttttagtagagacggggtttcaccatgttggccaggatggtctcgatctcctgacctcatgatctgccagcctcggcctctgaaaagtgctgggattataggcgtgagccactgtgcctggcctcaactgttttgtttctaacttttgaaataaaaggtattgtagtgaacagccttgggcacaccttttggtgcatgtgtttagttggaatagtctggatgataggtaatagtctgggaagttaaatgaagaaactgtaggaagctctgtctaggctgtgcgagggcttcagataaactcccatagctgagtagcttaacacaagcaaagttttttcttactctcctgtggcttgatgtgggttaggtggttctcctctactttgtggctttgacttttggacacatgtcctctgtagttctcacagaaagaaaacagagctagagaattatacaggatattaagggccaggcttggaaatggccttccgttcaatacattctagaacactttatctctgacctgctacaaaggagaatggaaaagatagtcgtaatttgagctcagaaagagaaaatagtgtggtaaatgcacagcattgtttttgctgcagtgcatatgtctgcttatttccttagaataatttattcttttttgtttttttgagactgagtctcactctgttaccaggctggagtgcagtggcgtgatctcagctcactgcagactctgcctcctgggttcaagccattctcctgcctcagcctcccgagtagctgggattacaggtgcgcaccaccacacccagctaatttttgtatttttggtagagacagggtttcacaatgttggccaggatggtctcgatctcctgacctcatgatctgccagcctcggcctctgaaagtgctgagattaaaggcgtgagccactgtgcctggccagcttattaattcttaagccaaaatatgtgtctttaggatccaagttaaatttgctcagattacatttttttttttttaagatggcatctcgccctgtcacccagactggagtgcaatggcgcgatctcggctcaccacatcctctgcctcccaggttaaagcgattctcctgcctcagtcccttgagtagctggaattacaggcgtgtgccaccatgccccgttaatttttgtagttttagtagagatggggtttcactgtgttggccaggctggtcttgaactcctgacctcgtgatctgcccatcttggcctcccaaagtgctgagattataggcatgagccaccacgcccagctagattactcatttttttcaaatacttccttttggaaaaataggaattctgtttccatccatacctttgtttcactaagtacaaaaatgagtataactaatatttcattgtaagatatttacttagccaggcacagtggctcacacttgtaatcagcactttgggaggctgaggcgggtggactgcttgagcccaggaatttgagaccagcccaggcaatatagggagaccttgtctctactcctccacaaaaaaaaaaaaaaaaaaaaaattagctgggcatggtggcacatgcctgtggtctcagctacttagaatgctgaagcagtaggatcagttgaattcggaaggcggagactgcagtgagctgagattgtactgctgcactccagcctgggtgacagagcgagaccctatctcacacatacacacacacaaagatgtttacttacaagtatactcatcagataccttgagggacttttgcatgaaattaataatgtttattgaaaaaatgatttactacttacaggggtgattttcatactctttataattcttttgatacttttatagttcataagtgtggtgattggctgttcacacacacatatgagatgtaccaccctagaaccttgttacaatgttagcacattaccagtctgacatgaaaaaaaataattctttacacttaccttgatgcaaaaacattgtctatctgcactaatatcttaggaatataagtgagcaggaaaaaatatatatcttatttttaacacatcatcattaaatattttgtttatgacagtcttacttggtcactcaggctgaagtgcagtggtgccatcatagctcactgcagccttgacctcctgggctcaaacaatccctcttttctgcctcctgagtagctgggactacaggtgcatgccaccatgcccaactaatttgttaaatttttgtagagtgtatcagatttttgatgaggtctcactgtgttgcccaggctgatctcaaatgtctgactgtaagcaatcctcttgcttggcctcccaaagtgctgggattacaggtgtgagccactgtgcgcagccgttaaatattttaaaccgtcactgactttaccatagcttactatttatataaataatcctgggttaaacttgcatagtgagataatatttcccccaacttttatttatttatttgagatggagtcttgctctgtcgcccaggctggagtgcagtggcgcaatctcggctcactgcagtctccgcctcccaggttcaagcatttctcctgcctcagcctcccaagtagctgggattacaggcacacgccactgtgcccggctagtttttatatttttggtagagacagggttttgccacgttggccaggctggtcttgaactcctggtctcaggtgatccacccgcgtcggcctcccaaggtgctgggattacaggcatgagccactgcatccggcctaatttttgtatttttagtagagacggggtttcaccatgttagtgaggctggtcttgaacttctgaccttgtgatctgcccacctcggcctcccaaagtgctgggatgacagacgtgagccaccatgcttggcctcccccagcttctagttttaaaaatgttcagctggtgcagtggctcatgcctgtcatcccagcactttgggaagctgaggtgggtggatcacttcaggccaggagttcgaggccagcctggccaacatggtgaaacctcgtctctactaaaaatacaaaaattagccaggcttggtggcttgcgcccgtaatcccaactgctcgggaggcctaggtgggagaatcgcttgaacctgggagacagaggttgcagtgagctgagatcgctccactgtactccaatgtgggtgacagggtgaaactctgtctcagaaaaaaataaaaaagaaaatgtgcaaatctacagaaagattaaaaagtaccctgtagttacagaaagatttttttaaaaaataccctgtagcccttaaacaatttctaacataatgtcctgttagctttctctctttttttcgtgaatcatatgaaaatcatttgcaaacatcatgacccttcacccctaaatacttctgtatgcatccttaggaataaaggcactcttttctatagctgtaataaaagtaacatacctgagaaaatgacaagaattctacaatattatctaataatcatgccatagtcaaaatctctagtcatcctcaaaatctcctttgtagattttttttggttttccagtccaggatccaatccagttttctgccttttagtcaattactcatcaaattattttttccagcaacttactagtaataatggtaatagccttagcttttattaataacaaccacttttcttttgaaatgttaatataaaactagatttattacctacataatcttcataatcttcaagttaggtattatcactactttacctaatgagggaggttatgctcagggtacttgtccaaggcacatagtgaggtatggttgaggtttgaactcagatatatctgatcccaaagccagctgtctttttctgtgctggactgactatactaggaaacaatcaatgtgaacttagaaatgtttgacccaaaagaaaaaaaatttcactcctattcataggctaaatgaactttactaaatatggaagattcctgtagcccggaagttgggttagttaacttttgagatctctgccaaccctgaaattctgtaacccttgtttcttacatctgcctcatacatggattaccaaagatgtatatgcatataatatttaacagttttattgagataaaattcacatactatattattcacccacttaatgtatacaattttgtagttttgtgtgtgtgtgtgtgtgtgtgtatttttgagatggagtctcactctgtcacccaggctggagtgcagtggcacgatcactgcaacctctgcctcctgggttcaagtgattctgtggcctcagcctgttgagtagctgggattacaggcgcccaccaccatgcccggctgatttttgtgtttcagtagagatggggtttcaccgtgttggtcaggctgttctcgaactcctggactcaagttatctgcccaccatggcctccccaaagtgctgagattacaggcgtgagccatcgcgcccggcagttttcgtatattgatggagttgtgcaaacaccacctcattcaattttagaacatttttatcacctgaaaaagaaacgctgtatcctttagccatacttcccccttcctccctaactcccccagctctaggcaaccagggatctactgtctatttagatttgtctgtttgggtcatctcatataaatggaattacataacatgtcttttgtgtgtggcttcaatttttttatttttttgagatggagtcttgctctgtcacccaggctggagtgcagtggcatgatctcagctcactgcaacttttgcctcctgggttcaactgattctcttgcctcagcctcccaggtagctgggattacaggctcctgccaccatgcctgactaatttttgtattttttactagagtcggggtttcactatgttggccaggctgttctcaaactcctgacctcaagtgatccacctgcctcggcctcccgaagtgctgggattaaagacatgagccaccacgcccagcctgtgtgtggcttctttcacttagaataatgtttccaaggttcatctgtgttgtagcatgtatctgtatcttatttatttttattgctgaatagtattccattgtatggataaactgcattttgtttattcattgattagttgttgatggacatttgggttgtttccactttttagctatatttacattactgcttgtgttttcatttctcttggttatatactaggagcagaattgctgggtcatatggtacttctacttttaacctttgaggacctgccagactgttttctaaagtggttttaccattttacattctcatcagcatatgtgagggttctggatttctctacatcctcaccagtatttgtctttgatcatagtcatcctagtgggtatacaggggtgtctcattgtgggggtttttttccccattggggttttgatttgcatttccctgatggagataaatatattttttgtgtgtccccccacaaactgcctggttctgatgagaccagtgttcttacagagaataactttgctttgaaacaaaacaaacaaacagccttttgacttgggtaacctttggagtatgttaattgtgatttactctggccttgtaacattgtaagtggagattttgtttaaaaactgcgttcgctgaaacaagtaataaggttcagacctattgttacaagttctgagttttctttcatataaatatgtttgttcttttgtgtggataaaacctaacgtggcaaaaaggtgtcaaacacctaagtattaaggaaactaaaatgaaaatgctgcatgaacagaaaccttgtccaattttcattactatagcaccatcacctataacagtgccagtgtacagtagatattacataatatttttgaatgaatgagtggaaaatgatatgcatttttctcttctgcatcctctgaaagatttcacaacgtgcaaagtatgtaaggctttatttatatacagataaaataatcagagtttataatctatgtatttactttcctgcatagaaactccatatgattaaaaattgagattatttattttaataacatgactaatcagtttacttaacctagaaatgaatgttatctaagaacaagcaaagaatgttagaagaatttagtgtttaggaattattattgttttccatctcagtcgtatatattttctgttttagccactttggagatttgttaatgataccaaagacaaaagaatgttagtttataaatctgaagatatcaagaatgtttcacgtttgcagtctccaaaagtgtgtggttatttaaaagtggataatgaagagttgctcccaaaagggttagtagacagagaaccacctgaaggtaagacttaaagagtgtatttcaaataagaaacaaacatactacaattgacttcagtaggggtggttgttatttgttaaaaaataacatgattgtcaagtaactatagtatttggcatgaaaataagaggtttgttccagaaattttcatcttcttttgtttataatgtaagagttgaaaactctggaaaataatgggaacaacagagattagactttaaaaaagattagggaaaagggaaatggagtgatctgagggaaaatattcctgcagatatttagaaa

SEQ ID NO: 10569 - DNA, 1073 bp, Homo sapiens
gggcgtcgagcctggcggtagaatcttcccagtaggcggcgcgggagggaaaagaggattgaggggctaggccgggcggatcccgtcctcccccgatgtgagcagttttccgaaaccccgtcaggcgaaggctgcccagagaggtggagtcggtagcggggccgggaacatgaggcagtctctcctattcctgaccagcgtggttcctttcgtgctggcgccgcgacctccggatgacccgggcttcggcccccaccagagactcgagaagcttgattctttgctctcagactacgatattctctctttatctaatatccagcagcattcggtaagaaaaagagatctacagacttcaacacatgtagaaacactactaactttttcagctttgaaaaggcattttaaattatacctgacatcaagtactgaacgtttttcacaaaatttcaaggtcgtggtggtggatggtaaaaacgaaagcgagtacactgtaaaatggcaggacttcttcactggacacgtggttggtgagcctgactctagggttctagcccacataagagatgatgatgttataatcagaatcaacacagatggggccgaatataacatagagccactttggagatttgttaatgataccaaagacaaaagaatgttagtttataaatctgaagatatcaagaatgtttcacgtttgcagtctccaaaagtgtgtggttatttaaaagtggataatgaagagttgctcccaaaagggttagtagacagagaaccacctgaaggtaagacttaaagagtgtatttcaaataagaaacaaacatactacaattgacttcagtaggggtggttgttatttgttaaaaaataacatgattgtcaagtaactatagtatttggcatgaaaataagaggtttgttccagaaattttcatcttcttttgtttataatgtaagagttgaaaactctggaaaataatgggaacaacagagattagactttaaaaaagattagggaaaagggaaatggagtgatctgagggaaaatattcctgcagatatttagaaa

SEQ ID NO: 10570 - DNA, 1883 bp, Homo sapiens
cgccacctgcacttctgggggcgtcgagcctggcggtagaatcttcccagtaggcggcgcgggagggaaaagaggattgaggggctaggccgggcggatcccgtcctcccccgatgtgagcagttttccgaaaccccgtcaggcgaaggctgcccagagaggtggagtcggtagcggggccgggaacatgaggcagtctctcctattcctgaccagcgtggttcctttcgtgctggcgccgcgacctccggatgacccgggcttcggcccccaccagagactcgagaagcttgattctttgctctcagactacgatattctctctttatctaatatccagcagcattcggtaagaaaaagagatctacagacttcaacacatgtagaaacactactaactttttcagctttgaaaaggcattttaaattatacctgacatcaagtactgaacgtttttcacaaaatttcaaggtcgtggtggtggatggtaaaaacgaaagcgagtacactgtaaaatggcaggacttcttcactggacacgtggttggtgagcctgactctagggttctagcccacataagagatgatgatgttataatcagaatcaacacagatggggccgaatataacatagagccactttggagatttgttaatgataccaaagacaaaagaatgttagtttataaatctgaagatatcaagaatgtttcacgtttgcagtctccaaaagtgtgtggttatttaaaagtggataatgaagagttgctcccaaaagggttagtagacagagaaccacctgaagagcttgttcatcgagtgaaaagaagagctgacccagatcccatgaagaacacgtgtaaattattggtggtagcagatcatcgcttctacagatacatgggcagaggggaagagagtacaactacaaattacttaatacacacagatagagctaattgacagagttgatgacatctatcggaacacttcatgggataatgcaggttttaaaggctatggaatacagatagagcagttattatttgaataggtaacatgtacacagtacaaaagccagtgaaaagtaagtctctgcagcctgtttattgtcaaaccagttcctttccccaaagacattcatgtcactagtttcatatgtatctttctagagatgtcgtatgcaggtatagtgtatgtatatgtctgtatttgacacaacggtgctatgcagtacacttttacaccttgctttttcatttcacagtatgttggagagtacttcatgttcatgcatgtaaagctgcttcacttgttttattataaatagctgcatcatgtttgagtttcagggaacctgtaaattttctttttgctttaggcatttggaaccagtcgaagaaacaggaataatataggagattaaaacattaacttctttacatctgatgaaggatggattggagggtgtggtttagatgtgtatcatggtgggcttctaagtagttctatcccagatttgaccttgaccagccaccatcaaaactgcagagtccaccccagtaaacttaccacacagtggcagaggagaccagaatgggccttctctgcaggcaggcaggcaggcaggcaggcagagagactcacagaaactctgagctgagcatggtttccttctttatctcacacttactaatgggagcctttgttacttttttttttcttctttgcaggtttaatatgaatttgtctgaaatgcctgtataaggagaagactctattcttagccttttattcctttgatgcacaaagagatgtatattttattattctttcctgagttgtcgactgtagtcgtaataaatattttaggctcctgtaa

SEQ ID NO: 10571 - DNA, 2513 bp, Homo sapiens
ggcggatcccgtcctcccccgatgtgagcagttttccgaaaccccgtcaggcgaaggctgcccagagaggtggagtcggtagcggggccgggaacatgaggcagtctctcctattcctgaccagcgtggttcctttcgtgctggcgccgcgacctccggatgacccgggcttcggcccccaccagagactcgccactttggagatttgttaatgataccaaagacaaaagaatgttagtttataaatctgaagatatcaagaatgtttcacgtttgcagtctccaaaagtgtgtggttatttaaaagtggataatgaagagttgctcccaaaagggttagtagacagagaaccacctgaagtgcatacaaattcatattagagcttgttcatcgagtgaaaagaagagctgacccagatcccatgaagaacacgtgtaaattattggtggtagcagatcatcgcttctacagatacatgggcagaggggaagagagtacaactacaaattacttaattcgcattctcaagtctccacaagaggtaaaacctggtgaaaagcactacaacatggcaaaaagttacccaaatgaagaaaaggatgcttgggatgtgaagatgttgctagagcaatttagctttgatatagctgaggaagcatctaaagtttgcttggcacaccttttcacataccaagattttgatatgggaactcttggattagcttatgttggctctcccagagcaaacagccatggaggtgtttgtccaaaggcttattatagcccagttgggaagaaaaatatctatttgaatagtggtttgacgagcacaaagaattatggtaaaaccatccttacaaaggaagctgacctggttacaactcatgaattgggacataattttggagcagaacatgatccggatggtctagcagaatgtgccccgaatgaggaccagggagggaaatatgtcatgtatcccatagctgtgagtggcgatcacgagaacaataagatgttttcaaactgcagtaaacaatcaatctataagaccattgaaagtaaggcccaggagtgttttcaagaacgcagcaataaagtttgtgggaactcgagggtggatgaaggagaagagtgtgatcctggcatcatgtatctgaacaacgacacctgctgcaacagcgactgcacgttgaaggaaggtgtccagtgcagtgacaggaacagtccttgctgtaaaaactgtcagtttgagactgcccagaagaagtgccaggaggcgattaatgctacttgcaaaggcgtgtcctactgcacaggtaatagcagtgagtgcccgcctccaggaaatgctgaagatgacactgtttgcttggatcttggcaagtgtaaggatgggaaatgcatccctttctgcgagagggaacagcagctggagtcctgtgcatgtaatgaaactgacaactcctgcaaggtgtgctgcagggacctttctggccgctgtgtgccctatgtcgatgctgaacaaaagaacttatttttgaggaaaggaaagccctgtacagtaggattttgtgacatgaatggcaaatgtgagaaacgagtacaggatgtaattgaacgattttgggatttcattgaccagctgagcatcaatacttttggaaagtttttagcagacaacatcgttgggtctgtcctggttttctccttgatattttggattcctttcagcattcttgtccattgtgtggataagaaattggataaacagtatgaatctctgtctctgtttcaccccagtaacgtcgaaatgctgagcagcatggattctgcatcggttcgcattatcaaaccctttcctgcgccccagactccaggccgcctgcagcctgcccctgtgatcccttcggcgccagcagctccaaaactggaccaccagagaatggacaccatccaggaagaccccagcacagactcacatatggacgaggatgggtttgagaaggaccccttcccaaatagcagcacagctgccaagtcatttgaggatctcacggaccatccggtcaccagaagtgaaaaggctgcctcctttaaactgcagcgtcagaatcgtgttgacagcaaagaaacagagtgctaatttagttctcagctcttctgacttaagtgtgcaaaatatttttatagatttgacctacaaatcaatcacagcttgtattttgtgaagactgggaagtgacttagcagatgctggtcatgtgtttgaacttcctgcaggtaaacagttcttgtgtggtttggcccttctccttttgaaaaggtaaggtgaaggtgaatctagcttattttgaggctttcaggttttagtttttaaaatatcttttgacctgtggtgcaaaagcagaaaatacagctggattgggttatgaatatttacgtttttgtaaattaatcttttatattgataacagcactgactagggaaatgatcagtttttttttatac

SEQ ID NO: 10572 - DNA, 5715 bp, Homo sapiens
gcacttctgggggcgtcgagcctggcggtagaatcttcccagtaggcggcgcgggagggaaaagaggattgaggggctaggccgggcggatcccgtcctcccccgatgtgagcagttttccgaaaccccgtcaggcgaaggctgcccagagaggtggagtcggtagcggggccgggaacatgaggcagtctctcctattcctgaccagcgtggttcctttcgtgctggcgccgcgacctccggatgacccgggcttcggcccccaccagagactcgagaagcttgattctttgctctcagactacgatattctctctttatctaatatccagcagcattcggtaagaaaaagagatctacagacttcaacacatgtagaaacactactaactttttcagctttgaaaaggcattttaaattatacctgacatcaagtactgaacgtttttcacaaaatttcaaggtcgtggtggtggatggtaaaaacgaaagcgagtacactgtaaaatggcaggacttcttcactggacacgtggttggtgagcctgactctagggttctagcccacataagagatgatgatgttataatcagaatcaacacagatggggccgaatataacatagagccactttggagatttgttaatgataccaaagacaaaagaatgttagtttataaatctgaagatatcaagaatgtttcacgtttgcagtctccaaaagtgtgtggttatttaaaagtggataatgaagagttgctcccaaaagggttagtagacagagaaccacctgaagagcttgttcatcgagtgaaaagaagagctgacccagatcccatgaagaacacgtgtaaattattggtggtagcagatcatcgcttctacagatacatgggcagaggggaagagagtacaactacaaattacttaatagagctaattgacagagttgatgacatctatcggaacacttcatgggataatgcaggttttaaaggctatggaatacagatagagcagttattatttgaataggtaacatgtacacagtacaaaagccagtgaaaagtaagtctctgcagcctgtttattgtcaaaccagttcctttccccaaagacattcatgtcactagtttcatatgtatctttctagagatgtcgtatgcaggtatagtgtatgtatatgtctgtatttgacacaacggtgctatgcagtacacttttacaccttgctttttcatttcacagtatgttggagagtacttcatgttcatgcatgtaaagctgcttcacttgttttattataaatagctgcatcatgtttgagtttcagggaacctgtaaattttctttttgctttaggcatttggaaccagtcgaagaaacaggaataatataggagattaaaacattaacttctttacatctgatgaaggatggattggagggtgtggtttagatgtgtatcatggtgggcttctaagtagttctatcccagatttgaccttgaccagccaccatcaaaactgcagagtccaccccagtaaacttaccacacagtggcagaggagaccagaatgggccttctctgcaggcaggcaggcaggcaggcaggcagagagactcacagaaactctgagctgagcatggtttccttctttatctcacacttactaatgggagcctttgttacttttttttttcttctttgcaggtttaatatgaatttgtctgaaatgcctgtataaggagaagactctattcttagccttttattcctttgatgcacaaagagatgtatattttattattctttcctgagttgtcgactgtagtcgtaataaatattttaggctcctgtaacccaagttcttattttttcaaaataaacatggaggatatgaaaatttaagagtacatttataatattataaataattcattgacatatgttttccataccatatgcttctctgtttgtttcaaacattgaatattggtactgaagaatttatgaattttggttttaaaatgttttttttctagaacgattctttttttgaacagataaaataatgcagtattcagagccttctgacttattttggaagtgttctaagtatatgatctctttaagtatagattcgcattctcaagtctccacaagaggtaaaacctggtgaaaagcactacaacatggcaaaaagttacccaaatgaagaaaaggatgcttgggatgtgaagatgttgctagagcaatttagctttgatatagctgaggaagcatctaaagtttgcttggcacaccttttcacataccaagattttgatatgggaactcttggattagcttatgttggctctcccagagcaaacagccatggaggtgtttgtccaaaggcttattatagcccagttgggaagaaaaatatctatttgaatagtggtttgacgagcacaaagaattatggtaaaaccatccttacaaaggaagctgacctggttacaactcatgaattgggacataattttggagcagaacatgatccggatggtctagcagaatgtgccccgaatgaggaccagggagggaaatatgtcatgtatcccatagctgtgagtggcgatcacgagaacaataagtgacaggaacagtccttgctgtaaaaactgtcagtttgagactgcccagaagaagtgccaggaggcgattaatgctacttgcaaaggcgtgtcctactgcacaggttcgtgttcttgttgcttccttggaatgctgtgggtcaagtgtgtgtgtgtctttgaaaaacaagattatgttttgttcagatgagagacaccttatttttaatctcatatgccgggttgagtttctggcactccttagtttgtgacacttggctttggtgggtttaagacctgtttctatttctctttcatttccatcactctcctctttctcctcacagacatccactctactgtggttaatatttgcctggatatgtgtatatccttgaaagatcatatagtgttattttgtgcatgtatgtgtttttaatgtgccaaaatgatattctaccttaaatttacttttaaaaaattcagtatcatgttttaaagaattacccatattgtgctacagataatataacaaggtttttaatggctacatcctaatagcaaaattttggaaacaatcaaaatgacaatcttgggataatgaatgttatcatgaatctatgcactggaatagtgtggaggaagcaggatacaagttagaagggtaaccagtttttctatatgtatctatatgtatttcactgttggggacacctacatattgtttagttatatgattggctgtgttttacttacaagtcaccaagtggtagctacttccattgccttcatccccttgatattccagataggacacagatcacatcctcctacgtcccttcaggaacctgtgtgtttctctgggtactgaggagtgtcattgtgtagtcacagaggcaggatgtgctggtctctagagcaccactgctaggttgcctgtgtctgaggactccttatcctgacgttctggccaacgcttggaattaccctgctgtcctattagcatgatgagtataaagtaatctcttgttcttacttttttttttaacagcccttgtcctaatgcacttacttacatttttcttgagcatctctttatatttttcagctattcagatttctcctgtgaatagccagttcatatatttggttcattttttaaaaattgggtttcatgttatttcactactgtgaatttggaggagttcttatgtaatcatccatttgggcatacgtctcctatctgttgccattctcagaacagaaatctttaacgtaatcaaatccatcattttgttgtgtgtgtgtattttttaaacacatggttcagaaaagccatggcggatggttaaaaagatattttccacagctgcttctattagcttcataagttgtccttttacattcaggacttgaatctttctggagctaacctttccaggtgtccagtatcttttgttcggtcaattgttgctttaaaaatttcaaagctatgttattactaggtatataaacggacatatctctacatctttatctgctgttccttaccagtatataatgttccttttttacccttgcgatgttttttgacttaaattgtcaaaaagcaatattcagtttgctattctagtttttttgttcctctgatatatctatctgtcccattcttatatttttcaaaatttgtctctcttggttggttggtttgattttgtaatagctttattgatacataattcacactcatgtagtttgcccatttaaagtgtacagtttaatgatttttagtatattcagatttatgcagtcatcacaattaattttagaacatttacattactccagaaagaaaccctgtatcctttagctatgatcctccaatccccccattccccacaactcagagcaaccactaaccaccctattctttatggagttgtctgttttgaacatttcatataaatggaattatacaatatggtttcgtgaccacatattgtatgactggcttctttcactgaacatagcatttttaaggttcatgtatgttgtagcatgtatcagtacttcatgtacttttattgctgggtaaattccattgcatggatatgccacattttgtttattcattcattggttgatagacatttgggttgcttccacttttttgctataacaaataatgctgctgtgaacatttatctatgagtttttgtgtggacagttcctttggatattattcaggaatagaatttctgggtcatgtggtaactatgcttaatcttttgaggagctgtcagactgttttccaaaatggctacaccattttacagtctcagcagcattgtatgagggtcccagcttctccatatcctcaccaacacttgttatcttttttattgtaactatcctaggttttgtgataaggatgcaaacagaaagctggaggtcttcagggacctagtgaatgaagttgtgtcctattttggcttgattttggttttccgtgtgcatagtatgacatgttgcccatgtttttatcttttgggatctgtcactatcacattactttgccaaatgttaggaacctgatggcccggcacagtggctcacacctgtaatcctagcactttgggaggccgaggtgggcagatcacgagatcaggagatcgagaccatcctggctaacacggtgaaaccctgtgtctactaaaagatacaaaaaattagctgggcgtggtggcgggcgcctgtagtcccagctacttgggaggctgaggcaggagaatggcgtgaacccgggaggcggagcttgcagtgagccgagatcacgccactgcactccagcctgggcaacagagcaagactccatctcaaaaaaaaaccaaaaaaacaaatgttaggaacctgaatatctaaatcaagctttaaagaagcatttgctagctatgctcaatgtttcatcttcactgtaataataaaatagattgagaaaaatgctttcttttaaataaacgtaagtaaaacaatttgaaaacgtttgttcttatcaaacagccttttgttcccttgatattttatacaaaat

SEQ ID NO: 10573 - DNA, 2839 bp, Homo sapiens
gcgggagggaaaagaggattgaggggctaggccgggcggatcccgtcctcccccgatgtgagcagttttccgaaaccccgtcaggcgaaggctgcccagagaggtggagtcggtagcggggccgggaacatgaggcagtctctcctattcctgaccagcgtggttcctttcgtgctggcgccgcgacctccggatgacccgggcttcggcccccaccagagactcgccactttggagatttgttaatgataccaaagacaaaagaatgttagtttataaatctgaagatatcaagaatgtttcacgtttgcagtctccaaaagtgtgtggttatttaaaagtggataatgaagagttgctcccaaaagggttagtagacagagaaccacctgaagagcttgttcatcgagtgaaaagaagagctgacccagatcccatgaagaacacgtgtaaattattggtggtagcagatcatcgcttctacagatacatgggcagaggggaagagagtacaactacaaattacttaatagagctaattgacagagttgatgacatctatcggaacacttcatgggataatgcaggttttaaaggctatggaatacagatagagcagattcgcattctcaagtctccacaagaggtaaaacctggtgaaaagcactacaacatggcaaaaagttacccaaatgaagaaaaggatgcttgggatgtgaagatgttgctagagcaatttagctttgatatagctgaggaagcatctaaagtttgcttggcacaccttttcacataccaagattttgatatgggaactcttggattagcttatgttggctctcccagagcaaacagccatggaggtgtttgtccaaaggcttattatagcccagttgggaagaaaaatatctatttgaatagtggtttgacgagcacaaagaattatggtaaaaccatccttacaaaggaagctgacctggttacaactcatgaattgggacataattttggagcagaacatgatccggatggtctagcagaatgtgccccgaatgaggaccagggagggaaatatgtcatgtatcccatagctgtgagtggcgatcacgagaacaataagatgttttcaaactgcagtaaacaatcaatctataagaccattgaaagtaaggcccaggagtgttttcaagaacgcagcaataaagtttgtgggaactcgagggtggatgaaggagaagagtgtgatcctggcatcatgtatctgaacaacgacacctgctgcaacagcgactgcacgttgaaggaaggtgtccagtgcagtgacaggaacagtccttgctgtaaaaactgtcagtttgagactgcccagaagaagtgccaggaggcgattaatgctacttgcaaaggcgtgtcctactgcacaggtaatagcagtgagtgcccgcctccaggaaatgctgaagatgacactgtttgcttggatcttggcaagtgtaaggatgggaaatgcatccctttctgcgagagggaacagcagctggagtcctgtgcatgtaatgaaactgacaactcctgcaaggtgtgctgcagggacctttctggccgctgtgtgccctatgtcgatgctgaacaaaagaacttatttttgaggaaaggaaagccctgtacagtaggattttgtgacatgaatggcaaatgtgagaaacgagtacaggatgtaattgaacgattttgggatttcattgaccagctgagcatcaatacttttggaaagtttttagcagacaacatcgttgggtctgtcctggttttctccttgatattttggattcctttcagcattcttgtccattgtgtggataagaaattggataaacagtatgaatctctgtctctgtttcaccccagtaacgtcgaaatgctgagcagcatggattctgcatcggttcgcattatcaaaccctttcctgcgccccagactccaggccgcctgcagcctgcccctgtgatcccttcggcgccagcagctccaaaactggaccaccagagaatggacaccatccaggaagaccccagcacagactcacatatggacgaggatgggtttgagaaggaccccttcccaaatagcagcacagctgccaagtcatttgaggatctcacggaccatccggtcaccagaagtgaaaaggctgcctcctttaaactgcagcgtcagaatcgtgttgacagcaaagaaacagagtgctaatttagttctcagctcttctgacttaagtgtgcaaaatatttttatagatttgacctacaaatcaatcacagcttgtattttgtgaagactgggaagtgacttagcagatgctggtcatgtgtttgaacttcctgcaggtaaacagttcttgtgtggtttggcccttctccttttgaaaaggtaaggtgaaggtgaatctagcttattttgaggctttcaggttttagtttttaaaatatcttttgacctgtggtgcaaaagcagaaaatacagctggattgggttatgaatatttacgtttttgtaaattaatcttttatattgataacagcactgactagggaaatgatcagtttttttttatacactgtaatgaaccgctgaatatgaggcatttggcatttatttgtgatgacaactggaatagttttttttttttttttttttttttgccttcaactaaaaacaaaggagataaatctagtatacattgtctctaaattgtgggtctatttctagttattacccagagtttttatgtagcagggaaaatatatatctaaatttagaaatcatttgggttaatat

SEQ ID NO: 10574 - DNA, 13784 bp, Homo sapiens
ttgctctcagactacgatattctctctttatctaatatccagcagcattcggtaagaaaaagagatctacagacttcaacacatgtagaaacactactaactttttcagctttgaaaaggtaatttgaattattcatggaataatgttggggcactgggggcttggtttggcaaaaacaaaaaagtaagggtatctactgaaatcttgggaaattacattttaaagatttgtaattaatttccagtataatgcttattctaaaattcatactggggctgggtgcagtggctcacgcctataatccgagcactttggggggccaagacatgtggattgcttgagctcaggagtttgcccaagctcagcctgggcaacatggcaaaaccccgtctctactaaaagtacaaaaattaggcatggtgacacgtgcctgtaatcccagctacttgggaggctgaggcaggagaatcacttgaaccagggaggtggaggctgcactagccgagatggtgccactgcactccagactgggcaacagagtgagactctgtctcaaaaaataaataaataaaataaataaagttcatactgatgagtatttttaaaaaagtaaatagatattgcagaggtgttaatgatggtaacgatgtttagaaaattctaacataatttaaattaattgaatgcttataaaaccttttgtttttggtgctactttataaccatcaatcatgtgctaaatattatctttatatatgaagagataaagattttgttcaggaccccacagcctggtggtgagctgggtctagattttactgttctatttatttatttagctaactagttacttagtttccaggattctttaacctgcttcatatttatttatttttaaaaacagggtcttgccatgttgccaaggctgatcttgaacttctgggctcaggtggtctttccatcttggcctcccaaagtgctgggattacaggtgtgagccaccatgcctggcccaaatttaatattctttctacattgagttcctcttacttcttagcataaattgatggatatgttctatttcagtagtaattttaataccacgtattgttttgcacattgaaatgttaaataattgcaggcctctttttaaagtctttaggaagctttattcagtatcaaaaaacagacacatggagaattgactgaattattctttatttatttatttttttgagagtcttgctctgtcgtccaggctggagtgcagttgtgtgatcttggctcactgcaacctctgcctcctgggttcaagcgattcttgtgcctcagcctctcaagtagctgggactacaggtgcacagcaccacgcctgggtgatttttgttatttttagtagagacagagtttcaccatgttggccaggctggtcttgaactcctcacctcaagtgatccacgatctcggcctcccaaagtgctgggattacagacaggggccactgcatctggccatctttattctttatataggacaagccttctcaactatgttaaaaaataaaaggaatatgtgcgtctggtttaaaaaacaagccatggaggatatgcaaagtttttacttctaactcagttagacttctcagacccagagaggtttcctttgtaaacttccaattttttgttttgttttgttttttgttttttgagacagagtttttgctcttgtcgcccagactggagtgcaatggcacgatcttagctcactgaagcctccacctctcgggttcaagcagttctcctgcctcagcttcccgagtagctgggattacaggagcccactgccatgctcagctaatttttgtatttttagtagagatgaggtttcaccatgttggccaggatggtcttgaactcctgacctcaggtgatccacctgcctcaggctcccaatgtgatgggattacaggtgtgagccaccgtgcccgacccaaaatattttaatgcatgttttttgcctataggtctctgtgtgtgtataggtgatatagatagcatatttacctcattttaaacagctgcataaatattcctattgcatagaattgtaacaacatactgactaatacactacagatggatattgtttaaccaaagtgatttttttaatacaacaaacagtgctctagtgagtatctttgtaaatgtgtaccttgatgaggtgtttttataggatatattcctggaaggagaattactgggtcaaggatatgtatactatgtttattgatattgctctttcctcccaaagagatttgacaaatttattcttccagcagcaatatatgagtttacctgtttcctgttatctttgccaatagtaggtttatcagcctttaactgtcacccctctaaagggcatggcattttatagttgttttgattttcattttgtgtgacattgagcatctttttatatatttgtaagtaatttgttttatatttctgtaaactgcctttttatctcttttgactatttttctattgaatttgtctttctaactactgaattgtagcagtgcttagtatattaaggagattggttcattgtcatgtggttattttaggcaaatttttaatgcaaattaatttttcctagctattgcaattatccttaggttattttttaatgacttctttttattcgattttatgtcagaatattatagtattggttattagctttcaacttacaccaaatttgagcagattggtaatattaatagctacagttaatcaggtacttattttctgtaatttactggcattttacataagttatctctaaaagtgattccttttttgaaggaacaaaaaaaaaaaaattaaggcttagacagcttagtaacttgcccaagattactcagctagtaaatgacagatacaagatttgaacaaaggttggactccaaaacttgtgttatttctgctatactggtggagagtttggtgaagaagtggatatagtagcaagaaataagtaggagcgaaggaagagtgaggaaactataaaatgaaaagaactcaaagtttagctttttgggtttctttggatttgaagtggcctgtagaatccgtattctagaggcaaaaacttccatagccttacatatttctctttcaagtttcgtagatgacattgattccctaagaaaatattaaatcgtagccacttgttatcttttctctgtgtaagaaagcagggaagtatgtaatttattttacaaagtttccatactaaatatttaatgggaaatttatctaacagtctatggaattttataccaggtgttttaaaataggttatttcctttaatccccaaaaccgttcagttattaggtgatattatttccatttgtagataaatacttaggattcaaagattgaggccaaggtcggacagtgagtaaatgaaagtaggacttaagccaagtttgtcagactccaaagcccataccctttcttttctatcatattgcgtcattaaagtttaaaacaagaacaaaaacaaagatagctgaagtaatcagtttgtatcagggctgaattaactctatgaaacccctcattacttgatggtaaatgagaagattccgtttttcgatagcagtggaaggcaaagtaatttaaaccaagatcattgcattaaatttggatgtaactattagaggttgaaaaagcatagaaacactgagaggttgtatgaagagttgaagtaacttaagaaaaaaagaaacttgtttaaaatttgccttacaagtttcatttcctttttgttataaatcaagaaattatcagctaggcgtggtgactcacacatgtaatcccagcactttgggaggccgagctggatggatcatgaggtcatgaggtcaggagatcgagaccatcctggctaacacggtgaaaccccgtctctactaaaaatacaaaaaattagccaggcgtggtagcaggcgcctgtagtcccagctatttgggaggctgaggcaggggaatggcgtgaacccaggaggtggagcttgcagttagccgagattgcgccactgcactccagcctgggcgacagagtgagactccgtctcaaaaaaaaaaaaaaatcaagaaattatcttatttttaaataacgaaaaagctgcggagtatatactgttttgatacttttttgatgttgcctgaatttttttggaaaaagttaaatgtttctcctaaaagtgaaatatatcagattacttgagaaggtctagaactgataaagaaatgaaagtgatatacctgactaaatggaccattaaaaatggttagggtaataatgttaattcaaactggttagctggtctttagttactgtaaattcttaagtcaaaagtcagaaagataaaacgttaaagaaatctgtaagaaaatgacttcacataattttgggaggataaagtaaaagaaattttgacattctgttggacgttttataactcaaaagctaatattggaaaatcaaaaaacatgaattttataatcgcttggtctttatctttagaaaagattcttaatgtagcaaatgaaaaatgcaattccactgatttctttctgaaaagaacattaagtaatgttgcaactcttagctttaaaacaaaataataagacatttataataagtatgcttttgaaagttctcagcataactggagggaaaaatcataactgagaatgtgtgggaagatatgttttaggatagcagaagaaaatgttccaaggatttacgaaataatgttctattgtcttttccctttgaccattaaaaaaccacaagcaaactaaaattaccttgttatgctcaaaaagttaaaaatatttgttgccatggagatagtcccagtctagatttctttccggtagtttaaagacttttgcaatcccatggggaagtaatatattttcagtacaacagctgacaaaatttgtttctgtgggtgagatgaataatatacctttctttgtctttggtgttcatggacacattgaaagactataaataatacttgagaaagtcttgctcaccactcctagttttcatgtaaggatggaaagtcatagaaaacaaaaagaatagtaagccaattaaagaactggactgaaactcaacaaaaagaatagtaagcccactaaagaactgaagtgtataccccctcccctctcctcccctcccttcccctcccctcccttcccctcccttccccttcccttcccctctcttccccctccccttcccctctcctccccctctcctcccctctcctccccctctcctcccctcccctcccctcccctcccctcttttcctgtcttctggtgccaatggagtctatattctaatgtctgtcttagataccttgtatttattttcctaactgtaattgtgggttacttttttgcaagatatgttgttttgaggaggaaaaaaagcacgagtactttttttttttcttattttgagcgggagtctcgcgctgtcaaccaggctggcgatctcggctcacagcaggctccgcctcccgggttcactccattctcctgcctcagcctcccaagtagctgggactataggcacccgccaccatgcctggctaatttttgtatttttagtagagatggggtttcgctgtgttagccaggatggtctcgatctcctgacctcgtgatccgcccagctcaacctcccaaagtgctgggattacaggcgtgagccactacgcacggccgcatgagtacttttaaatatagaaagcagcatttattaattttgcacagcaataagaattttctcatagtccacccagcttgatagagacagcatagtacagggttttgaaataaaccaggtttatttcccagtttcaccatttactagctgtgtaactttgagtaggttgattagcttccaagcctcaatttgtacttgtgtgaagtggggataatagatgcatagtacctaacaccaagtaggtgttcaataaatggtatataataggattagtttttgataataatttttttagataatcaggattccaacttaactacgcagtcatgtgtgtttccttattcttcagtgttttccaggagagatgaatgtataagttctttgaatatctttaccctagtgtgagtttattgtgatctgctgtttttatagctaaataaattagttcatttgtcgttacaggagatatattgctctaagtacctaataagactttagttgtaacttgcatagtgttttattaatgtcaatgcttctggctttttaagaaagtttaattatgtgaaaatgagacttaaaatttgtgtgcttagagtaaaatatgaatgcatttttcttcaggcattttaaattatacctgacatcaagtactgaacgtttttcacaaaatttcaaggtcgtggtggtggatggtaaaaacgaaagcgagtacactgtaaaatggcaggacttcttcactggacacgtggttggttagtatggagcttgttggtttgcccctgtgtctggtgtattaggtctccaaatctaacttgattgcatattcttttctggtgcaggatagtggggacggggtgtcatagaagtgctattctttgacttttctttgaggtatataagtttagaggcaggaacattctaatagaaggaaatgagtattatctaaatgtcatactagctggctggtttaatgattaaaattaaattcttcttaagtgataggaatttaacctttcttttcctcagtgactgtaagctttctttatgatattttaaacagggaagcttggagataaaatacttggtgatcctattacgtatgtatttgagaaaatttatcaaacaagcaattgcagtttactttttgacctttttctgcaatgagaaaaaaaaatgtcattgaaatccacaaatagtatagttcctaggcctgtacattctaaatcatgctttctgtctctcttagttcttcctttacctagaagtagataaaattattccagaagaaaatcttagcagttttgtttgttttgggaaagggataggtttcaagtgactaaacttgaggctaccccttaggagttgagattatctagcttctttctggagcctttgtttcttgttttgcagagctctcacagtactaggcaaattccaccctgaaggatttaatttttattgagagtaatgcatagtttcttatttgatgtaagtatttttaaataataattttttttttctcttaaggtgagcctgactctagggttctagcccacataagagatgatgatgttataatcagaatcaacacagatggggccgaatataacatagaggtaaatttatatgtgaattttttttcagtagcttatatctctgattttcaaaaagctgctcagttctgcaaaggtgaaaagtaattatacttatttctttcctcttcgtatttgaagttttttactaggaaagtagactttttaaaaaaggataatctctaagaagctgtgttatgatacaccctgtatttctaagtaccataattgagagagttacatgtgggatggataataggaagagaaaactttctttccctcctgactcattttttaattctttctcaaataataaatgtaaacatcctcagaaatgaaaagtgaagtattatttttcaatttctctgtttttctgctagacacactggaaatgctagatcaatgaaaggtggtagttcatagtctgagaagttaaagaggaagctaggaaagtcaggctgtggtcactcttccattgaaagagtagcaatagaaatcaagaccacagtggctgcattggttaagacacatatctatctgtcagatattagtctacaaaacaaaacgtttcctcataattgtgaattgaagttgattctgtgtttcctgaaaaatgagaagactctgggtggtggtggtgatatcactaaaatagatcacctgtgggaaaactgagtaagattggtcaaaatgaaatgttcaggtgtatttgagtgcttaataggggtaaaacagtctgctggagctatatatactatatgttttaattatatccaatctacatgactgttagtcctttgactgtccattattgtgaaaaagaaacctatggccttgcagtatgttatagtttgttaatgtttaagctatttaatgtcaatgttttgaggagtctggcctaccagaaagagtcagaaatttagtagaaagtaaaggaactaatattataaatgcattcattctagaataggcaaagcatcactggaatgtcttaaatttgcctgttctttcaaatcaatttattttttaagaatacctttattttaaaatatatgctcattgcaaaattcggaaaatagattatctgtacttggacagataactactattgacattttgacagacatccttccaaatttttttttctatgtgtaaatacacaaataaatatagttatacccactattttttcctgcaaaactaggaccatacaatatgtacagtttgtcttcacacatttttcgtttaacaatatgattatgaaccttttcgtgttaatatagatctaaattagggttttgtttgtttgtttgtttgttttttgagacggagtcttgctctgtcacccaggctagagtgcaatggcgtgatcttggctcactataacctctgcctccccggttcaggcgattctcctgccttagcctcccaagtagctgggactgcaggtgtgcgccatgatgtccggctaattttttttcttttttttgagatggagtatcactctgtcactcaggctagagtgcactggcgtggtctcggctcactgcaacctctggctcctgggttcaggcggttctcccgccttagacccttgagtagctcagactacaggcacatgctacctcacctggctaatttttgtatttttagtagagacggggtttcaccatgttggccaggatggtctcgatctcctgacctcatgatctgccagcctcggcctctgaaaagtgctgggattataggcgtgagccactgtgcctggcctcaactgttttgtttctaacttttgaaataaaaggtattgtagtgaacagccttgggcacaccttttggtgcatgtgtttagttggaatagtctggatgataggtaatagtctgggaagttaaatgaagaaactgtaggaagctctgtctaggctgtgcgagggcttcagataaactcccatagctgagtagcttaacacaagcaaagttttttcttactctcctgtggcttgatgtgggttaggtggttctcctctactttgtggctttgacttttggacacatgtcctctgtagttctcacagaaagaaaacagagctagagaattatacaggatattaagggccaggcttggaaatggccttccgttcaatacattctagaacactttatctctgacctgctacaaaggagaatggaaaagatagtcgtaatttgagctcagaaagagaaaatagtgtggtaaatgcacagcattgtttttgctgcagtgcatatgtctgcttatttccttagaataatttattcttttttgtttttttgagactgagtctcactctgttaccaggctggagtgcagtggcgtgatctcagctcactgcagactctgcctcctgggttcaagccattctcctgcctcagcctcccgagtagctgggattacaggtgcgcaccaccacacccagctaatttttgtatttttggtagagacagggtttcacaatgttggccaggatggtctcgatctcctgacctcatgatctgccagcctcggcctctgaaagtgctgagattaaaggcgtgagccactgtgcctggccagcttattaattcttaagccaaaatatgtgtctttaggatccaagttaaatttgctcagattacatttttttttttttaagatggcatctcgccctgtcacccagactggagtgcaatggcgcgatctcggctcaccacatcctctgcctcccaggttaaagcgattctcctgcctcagtcccttgagtagctggaattacaggcgtgtgccaccatgccccgttaatttttgtagttttagtagagatggggtttcactgtgttggccaggctggtcttgaactcctgacctcgtgatctgcccatcttggcctcccaaagtgctgagattataggcatgagccaccacgcccagctagattactcatttttttcaaatacttccttttggaaaaataggaattctgtttccatccatacctttgtttcactaagtacaaaaatgagtataactaatatttcattgtaagatatttacttagccaggcacagtggctcacacttgtaatcagcactttgggaggctgaggcgggtggactgcttgagcccaggaatttgagaccagcccaggcaatatagggagaccttgtctctactcctccacaaaaaaaaaaaaaaaaaaaaaattagctgggcatggtggcacatgcctgtggtctcagctacttagaatgctgaagcagtaggatcagttgaattcggaaggcggagactgcagtgagctgagattgtactgctgcactccagcctgggtgacagagcgagaccctatctcacacatacacacacacaaagatgtttacttacaagtatactcatcagataccttgagggacttttgcatgaaattaataatgtttattgaaaaaatgatttactacttacaggggtgattttcatactctttataattcttttgatacttttatagttcataagtgtggtgattggctgttcacacacacatatgagatgtaccaccctagaaccttgttacaatgttagcacattaccagtctgacatgaaaaaaaataattctttacacttaccttgatgcaaaaacattgtctatctgcactaatatcttaggaatataagtgagcaggaaaaaatatatatcttatttttaacacatcatcattaaatattttgtttatgacagtcttacttggtcactcaggctgaagtgcagtggtgccatcatagctcactgcagccttgacctcctgggctcaaacaatccctcttttctgcctcctgagtagctgggactacaggtgcatgccaccatgcccaactaatttgttaaatttttgtagagtgtatcagatttttgatgaggtctcactgtgttgcccaggctgatctcaaatgtctgactgtaagcaatcctcttgcttggcctcccaaagtgctgggattacaggtgtgagccactgtgcgcagccgttaaatattttaaaccgtcactgactttaccatagcttactatttatataaataatcctgggttaaacttgcatagtgagataatatttcccccaacttttatttatttatttgagatggagtcttgctctgtcgcccaggctggagtgcagtggcgcaatctcggctcactgcagtctccgcctcccaggttcaagcatttctcctgcctcagcctcccaagtagctgggattacaggcacacgccactgtgcccggctagtttttatatttttggtagagacagggttttgccacgttggccaggctggtcttgaactcctggtctcaggtgatccacccgcgtcggcctcccaaggtgctgggattacaggcatgagccactgcatccggcctaatttttgtatttttagtagagacggggtttcaccatgttagtgaggctggtcttgaacttctgaccttgtgatctgcccacctcggcctcccaaagtgctgggatgacagacgtgagccaccatgcttggcctcccccagcttctagttttaaaaatgttcagctggtgcagtggctcatgcctgtcatcccagcactttgggaagctgaggtgggtggatcacttcaggccaggagttcgaggccagcctggccaacatggtgaaacctcgtctctactaaaaatacaaaaattagccaggcttggtggcttgcgcccgtaatcccaactgctcgggaggcctaggtgggagaatcgcttgaacctgggagacagaggttgcagtgagctgagatcgctccactgtactccaatgtgggtgacagggtgaaactctgtctcagaaaaaaataaaaaagaaaatgtgcaaatctacagaaagattaaaaagtaccctgtagttacagaaagatttttttaaaaaataccctgtagcccttaaacaatttctaacataatgtcctgttagctttctctctttttttcgtgaatcatatgaaaatcatttgcaaacatcatgacccttcacccctaaatacttctgtatgcatccttaggaataaaggcactcttttctatagctgtaataaaagtaacatacctgagaaaatgacaagaattctacaatattatctaataatcatgccatagtcaaaatctctagtcatcctcaaaatctcctttgtagattttttttggttttccagtccaggatccaatccagttttctgccttttagtcaattactcatcaaattattttttccagcaacttactagtaataatggtaatagccttagcttttattaataacaaccacttttcttttgaaatgttaatataaaactagatttattacctacataatcttcataatcttcaagttaggtattatcactactttacctaatgagggaggttatgctcagggtacttgtccaaggcacatagtgaggtatggttgaggtttgaactcagatatatctgatcccaaagccagctgtctttttctgtgctggactgactatactaggaaacaatcaatgtgaacttagaaatgtttgacccaaaagaaaaaaaatttcactcctattcataggctaaatgaactttactaaatatggaagattcctgtagcccggaagttgggttagttaacttttgagatctctgccaaccctgaaattctgtaacccttgtttcttacatctgcctcatacatggattaccaaagatgtatatgcatataatatttaacagttttattgagataaaattcacatactatattattcacccacttaatgtatacaattttgtagttttgtgtgtgtgtgtgtgtgtgtgtatttttgagatggagtctcactctgtcacccaggctggagtgcagtggcacgatcactgcaacctctgcctcctgggttcaagtgattctgtggcctcagcctgttgagtagctgggattacaggcgcccaccaccatgcccggctgatttttgtgtttcagtagagatggggtttcaccgtgttggtcaggctgttctcgaactcctggactcaagttatctgcccaccatggcctccccaaagtgctgagattacaggcgtgagccatcgcgcccggcagttttcgtatattgatggagttgtgcaaacaccacctcattcaattttagaacatttttatcacctgaaaaagaaacgctgtatcctttagccatacttcccccttcctccctaactcccccagctctaggcaaccagggatctactgtctatttagatttgtctgtttgggtcatctcatataaatggaattacataaca

SEQ ID NO: 10575 - DNA, 656 bp, Homo sapiens
ttgctctcagactacgatattctctctttatctaatatccagcagcattcggtaagaaaaagagatctacagacttcaacacatgtagaaacactactaactttttcagctttgaaaaggcattttaaattatacctgacatcaagtactgaacgtttttcacaaaatttcaaggtcgtggtggtggatggtaaaaacgaaagcgagtacactgtaaaatggcaggacttcttcactggacacgtggttggtgagcctgactctagggttctagcccacataagagatgatgatgttataatcagaatcaacacagatggggccgaatataacatagagagatggggtttcaccgtgttggtcaggctgttctcgaactcctggactcaagttatctgcccaccatggcctccccaaagtgctgagattacaggcgtgagccatcgcgcccggcagttttcgtatattgatggagttgtgcaaacaccacctcattcaattttagaacatttttatcacctgaaaaagaaacgctgtatcctttagccatacttcccccttcctccctaactcccccagctctaggcaaccagggatctactgtctatttagatttgtctgtttgggtcatctcatataaatggaattacataaca

SEQ ID NO: 10576 - DNA, 4242 bp, Homo sapiens
gggatctgaactttggtggaagccaggcgcggtggctcatgcctgtaatcccagcactttgggaggccgagctgggtggatcacgaggtcaggagatcgagaccatcctggctaacatggtgaaaccctgtctgtactaaaaatacaaaaaattagccaggtgtggtagcaggcgcctgtagtcccagctactcgggaggctgaggcaggagaatggtgtgaacctgggaggtggagcttgcagtgagccgagatcgcgccactgcactccagcctgggcgacagagcaagactccatctcaaaagaagcttgattctttgctctcagactacgatattctctctttatctaatatccagcagcattcggtaagaaaaagagatctacagacttcaacacatgtagaaacactactaactttttcagctttgaaaaggcattttaaattatacctgacatcaagtactgaacgtttttcacaaaatttcaaggtcgtggtggtggatggtaaaaacgaaagcgagtacactgtaaaatggcaggacttcttcactggacacgtggttggtgagcctgactctagggttctagcccacataagagatgatgatgttataatcagaatcaacacagatggggccgaatataacatagagccactttggagatttgttaatgataccaaagacaaaagaatgttagtttataaatctgaagatatcaagaatgtttcacgtttgcagtctccaaaagtgtgtggttatttaaaagtggataatgaagagttgctcccaaaagggttagtagacagagaaccacctgaagtgcatacaaattcatattagagcttgttcatcgagtgaaaagaagagctgacccagatcccatgaagaacacgtgtaaattattggtggtagcagatcatcgcttctacagatacatgggcagaggggaagagagtacaactacaaattacttaatagagctaattgacagagttgatgacatctatcggaacacttcatgggataatgcaggttttaaaggctatggaatacagatagagcagattcgcattctcaagtctccacaagaggtaaaacctggtgaaaagcactacaacatggcaaaaagttacccaaatgaagaaaaggatgcttgggatgtgaagatgttgctagagcaatttagctttgatatagctgaggaagcatctaaagtttgcttggcacaccttttcacataccaagattttgatatgggaactcttggattagcttatgttggctctcccagagcaaacagccatggaggtgtttgtccaaaggcttattatagcccagttgggaagaaaaatatctatttgaatagtggtttgacgagcacaaagaattatggtaaaaccatccttacaaaggaagctgacctggttacaactcatgaattgggacataattttggagcagaacatgatccggatggtctagcagaatgtgccccgaatgaggaccagggagggaaatatgtcatgtatcccatagctgtgagtggcgatcacgagaacaataagatgttttcaaactgcagtaaacaatcaatctataagaccattgaaagtaaggcccaggagtgttttcaagaacgcagcaataaagtttgtgggaactcgagggtggatgaaggagaagagtgtgatcctggcatcatgtatctgaacaacgacacctgctgcaacagcgactgcacgttgaaggaaggtgtccagtgcagtgacaggaacagtccttgctgtaaaaactgtcagtttgagactgcccagaagaagtgccaggaggcgattaatgctacttgcaaaggcgtgtcctactgcacaggtaatagcagtgagtgcccgcctccaggaaatgctgaagatgacactgtttgcttggatcttggcaagtgtaaggatgggaaatgcatccctttctgcgagagggaacagcagctggagtcctgtgcatgtaatgaaactgacaactcctgcaaggtgtgctgcagggacctttctggccgctgtgtgccctatgtcgatgctgaacaaaagaacttatttttgaggaaaggaaagccctgtacagtaggattttgtgacatgaatggcaaatgtgagaaacgagtacaggatgtaattgaacgattttgggatttcattgaccagctgagcatcaatacttttggaaagtttttagcagacaacatcgttgggtctgtcctggttttctccttgatattttggattcctttcagcattcttgtccattgtgtggataagaaattggataaacagtatgaatctctgtctctgtttcaccccagtaacgtcgaaatgctgagcagcatggattctgcatcggttcgcattatcaaaccctttcctgcgccccagactccaggccgcctgcagcctgcccctgtgatcccttcggcgccagcagctccaaaactggaccaccagagaatggacaccatccaggaagaccccagcacagactcacatatggacgaggatgggtttgagaaggaccccttcccaaatagcagcacagctgccaagtcatttgaggatctcacggaccatccggtcaccagaagtgaaaaggctgcctcctttaaactgcagcgtcagaatcgtgttgacagcaaagaaacagagtgctaatttagttctcagctcttctgacttaagtgtgcaaaatatttttatagatttgacctacaaatcaatcacagcttgtattttgtgaagactgggaagtgacttagcagatgctggtcatgtgtttgaacttcctgcaggtaaacagttcttgtgtggtttggcccttctccttttgaaaaggtaaggtgaaggtgaatctagcttattttgaggctttcaggttttagtttttaaaatatcttttgacctgtggtgcaaaagcagaaaatacagctggattgggttatgaatatttacgtttttgtaaattaatcttttatattgataacagcactgactagggaaatgatcagtttttttttatacactgtaatgaaccgctgaatatgaggcatttggcatttatttgtgatgacaactggaatagttttttttttttttttttttttttgccttcaactaaaaacaaaggagataaatctagtatacattgtctctaaattgtgggtctatttctagttattacccagagtttttatgtagcagggaaaatatatatctaaatttagaaatcatttgggttaatatggctcttcataattctaagactaatgctctctagaaacctaaccacctaccttacagtgagggctatacatggtagccagttgaatttatggaatctaccaactgtttagggccctgatttgctgggcagtttttctgtattttataagtatcttcatgtatccctgttactgatagggatacatgctcttagaaaattcactattggctgggagtggtggctcatgcctgtaatcccagcacttggagaggctgaggttgcgccactacactccagcctgggtgacagagtgagactctgcctcaaaaaaaaaaaaaaaaaaaaaaaattcactatctacaaacctagaatatttaaaatacaaagattgcctgttttcaaacactattgaataagagggtgagatatttcttaacaacaacaacaacaaaaaaaacaggttgttttgaatgtgatgagccagccaggagatagaatactacctgcccttagggttgggggctgtccccacaagacttgatacttcagaaaccctttttattgacccacaagcagatatttgaattacttcttactttattgctccaggattctggatgggctgcatttactgtgtgaaggataaaaatcattagcctggattctgatttctataaattgccattaaaagctttttttcccctaagaactgaaatgtgctcaccagccaaaacattttaacttgtaaattttgagggcagttaaccaaacctgtgactaatcatatctcctcctaccccccatttccaaggacatttgttactcagatacttgttatactaatacttgaacttgtaccttatggtatttgctatcttttaactagtcatgatattcttatactttagttacacttttggaatttgatacaaggttgagtggggtgtgtgggtgtatgtatgagtgaaacag

SEQ ID NO: 10577 - DNA, 3327 bp, Homo sapiens
cactaaactatacagagctaaaatcatgcaaaagattgcaaaacaaactgccttgggaaatttccagtctaagctaaatggaccaagtataggattgaattttaagaagttggtgggaagattccagctcttgtactcacagagaagcttgattctttgctctcagactacgatattctctctttatctaatatccagcagcattcggtaagaaaaagagatctacagacttcaacacatgtagaaacactactaactttttcagctttgaaaaggcattttaaattatacctgacatcaagtactgaacgtttttcacaaaatttcaaggtcgtggtggtggatggtaaaaacgaaagcgagtacactgtaaaatggcaggacttcttcactggacacgtggttggtgagcctgactctagggttctagcccacataagagatgatgatgttataatcagaatcaacacagatggggccgaatataacatagagccactttggagatttgttaatgataccaaagacaaaagaatgttagtttataaatctgaagatatcaagaatgtttcacgtttgcagtctccaaaagtgtgtggttatttaaaagtggataatgaagagttgctcccaaaagggttagtagacagagaaccacctgaagtgcatacaaattcatattagagcttgttcatcgagtgaaaagaagagctgacccagatcccatgaagaacacgtgtaaattattggtggtagcagatcatcgcttctacagatacatgggcagaggggaagagagtacaactacaaattacttaatagagctaattgacagagttgatgacatctatcggaacacttcatgggataatgcaggttttaaaggctatggaatacagatagagcagtatagattcgcattctcaagtctccacaagaggtaaaacctggtgaaaagcactacaacatggcaaaaagttacccaaatgaagaaaaggatgcttgggatgtgaagatgttgctagagcaatttagctttgatatagctgaggaagcatctaaagtttgcttggcacaccttttcacataccaagattttgatatgggaactcttggattagcttatgttggctctcccagagcaaacagccatggaggtgtttgtccaaaggcttattatagcccagttgggaagaaaaatatctatttgaatagtggtttgacgagcacaaagaattatggtaaaaccatccttacaaaggaagctgacctggttacaactcatgaattgggacataattttggagcagaacatgatccggatggtctagcagaatgtgccccgaatgaggaccagggagggaaatatgtcatgtatcccatagctgtgagtggcgatcacgagaacaataagatgttttcaaactgcagtaaacaatcaatctataagaccattgaaagtaaggcccaggagtgttttcaagaacgcagcaataaagtttgtgggaactcgagggtggatgaaggagaagagtgtgatcctggcatcatgtatctgaacaacgacacctgctgcaacagcgactgcacgttgaaggaaggtgtccagtgcagtgacaggaacagtccttgctgtaaaaactgtcagtttgagactgcccagaagaagtgccaggaggcgattaatgctacttgcaaaggcgtgtcctactgcacaggtaatagcagtgagtgcccgcctccaggaaatgctgaagatgacactgtttgcttggatcttggcaagtgtaaggatgggaaatgcatccctttctgcgagagggaacagcagctggagtcctgtgcatgtaatgaaactgacaactcctgcaaggtgtgctgcagggacctttctggccgctgtgtgccctatgtcgatgctgaacaaaagaacttatttttgaggaaaggaaagccctgtacagtaggattttgtgacatgaatggcaaatgtgagaaacgagtacaggatgtaattgaacgattttgggatttcattgaccagctgagcatcaatacttttggaaagtttttagcagacaacatcgttgggtctgtcctggttttctccttgatattttggattcctttcagcattcttgtccattgtgtggataagaaattggataaacagtatgaatctctgtctctgtttcaccccagtaacgtcgaaatgctgagcagcatggattctgcatcggttcgcattatcaaaccctttcctgcgccccagactccaggccgcctgcagcctgcccctgtgatcccttcggcgccagcagctccaaaactggaccaccagagaatggacaccatccaggaagaccccagcacagactcacatatggacgaggatgggtttgagaaggaccccttcccaaatagcagcacagctgccaagtcatttgaggatctcacggaccatccggtcaccagaagtgaaaaggctgcctcctttaaactgcagcgtcagaatcgtgttgacagcaaagaaacagagtgctaatttagttctcagctcttctgacttaagtgtgcaaaatatttttatagatttgacctacaaatcaatcacagcttgtattttgtgaagactgggaagtgacttagcagatgctggtcatgtgtttgaacttcctgcaggtaaacagttcttgtgtggtttggcccttctccttttgaaaaggtaaggtgaaggtgaatctagcttattttgaggctttcaggttttagtttttaaaatatcttttgacctgtggtgcaaaagcagaaaatacagctggattgggttatgaatatttacgtttttgtaaattaatcttttatattgataacagcactgactagggaaatgatcagtttttttttatacactgtaatgaaccgctgaatatgaggcatttggcatttatttgtgatgacaactggaatagttttttttttttttttttttttttgccttcaactaaaaacaaaggagataaatctagtatacattgtctctaaattgtgggtctatttctagttattacccagagtttttatgtagcagggaaaatatatatctaaatttagaaatcatttgggttaatatggctcttcataattctaagactaatgctctctagaaacctaaccacctaccttacagtgagggctatacatggtagccagttgaatttatggaatctaccaactgtttagggccctgatttgctgggcagtttttctgtattttataagtatcttcatgtatccctgttactgatagggatacatgctcttaga

SEQ ID NO: 10578 - DNA, 8314 bp, Homo sapiens
taaggcccaggagtgttttcaagaacgcagcaataaagtttgtgggaactcgagggtggatgaaggagaagagtgtgatcctggcatcatgtatctgaacaacgacacctgctgcaacagcgactgcacgttgaaggaaggtgtccagtgcaggtgaggagtctctccacagggattttgggaagttggtataacaagatgtccaaaataagagaagactgaacttgcaggggctttagaatcaactgaaaggggtgtgagtgtgtttgtttacatctacctcttttgcccttcacagcaagaaattgctttctgggcctggcacggtggctcactcctgtcatcccagcactctgggaggctgaggtgggagaaatgcttgagaacagcctgggcaacatagtgagacactatctcttaaaaaacaaaaaacaaataagaaaagaagaagctttctggaaagcagtgtgacattatgtaacaaaatccttgaccttgcatgctccttggtttagcagtcctatagttaaaagaatcttttttttttttttttttcctgagacagagtcttgctctgtcgccaggctggagtgcagtggcgcgatcttggcttactgcaatctttgtctcccgggttcaagtgattcccctgccttagcctcctgagtagtgggactacaggcacgcaccaccatgcccggctaattttttgtattagtagagacgaggtttcactacggtggccaggatggtctccaactcctgaccttgtgatccatccaccttggcctcccaaagtgctgggattacaggtgtgaggcaccgtgcctggcaaaataatcttttttatttaatttaatttatttatttattttgagacggcgtctcgctctgttgccaggctggagtgcagtggcgcgatctcagcgcactgcaatctccgcctcccaggttcaagcgattcccctgcctcagcctccccaataactgggactacaggtacgcaccatcacgcctggctgattttttgtattttagtagagacggagttttagcatgttggccaggatggtctcgatctcctgacttcatgatctgcccaccttggcctcccaaagtgctgggattacagaggggagccaccgtgcctggcctttattttctttttgagacagggtctcagtctgttgcccaagatggagtgcagtggcatgatcatggctcactgcagcctcaacctcccaggctcaatcagtccttccacctcagcctcccggatagacaggactacaggtgtgtgccacctggctaattttttttgtattttttatagagatggggttttgccatgttgcccaagcttgttgtaaagtcctgggctcaagtgatccacccttctaagcctcctaaagtgtggagattctaggtatgaggcaccatgcctggcccaaataatcttttatttctttttttttttttttgagacggagtcttgctctgtcgcccaggctggagtgcagtggcgtgatcttggctcactgcaacctccgcctcctgggttcaagccattcccctgcctcagcctccccagtagctgggattacagtgtgcaccaccacgcccagctaatttttgtgtttttagtagagatggggtttcaccatgttggccaggctggtctcgaactcctgacttcgtgatctgcctgcctcagcctcccaaagtgttgggattacaggcgtgagccactgctcctggctgcccaaagaatcttttgggcaacagagataagatttaacaagggtataagatttaacaaggtttttttatggctacatcctaatagcaaaattttggaaacaatcaaaatgacagtcttgggatatgaatgttatcatgattctatatactggaatagtgtggaggaagtaggttacaagttagaaagttacccaggttttcattttttatatacactgatagaccagtgcctggcttagaagtaaaagggttaaacttcagttttctggtgaataattgagatttaactggatacagtgcatattaacgctgtaaatactgatggggagtagagttctggctgccgagtgtcttagctatggattgccttgtggccccaccttgtcttttttttttttccttgtctttttttttttttttgagagagtctcgccctgttgaccaggctggagtgcagtggcgcgatcttggctcaccgcaacctctgccttccaggttcaagctattctcctgccttagcctcccgagtagctgggattacaggcatgtagcaccatgcccggctaattttttgtatctttagtagagacggagtttcaccatgttggccaggctggtctcaaacccctaacctcgtggtccacctgcctcatcttttttttttttttttttttttttgagacagaatttctctcttgttgcctaggctggagtgcagtggtgcgatctcggctcactgcaacctctgtctccggggtccaggcgattctcctgcctcagccttctaagtagctgggattacaggagcgcaccaccacgcccagctaatttttgtatttttagtagagatggggtttcaccatgttggccaggctcatctcgaactctcctgacctcaggtgatccacccacctcggcctcccaaagtgttgggttgggattataggtgtgagccacctcgcccagcccatcttgtcttttttaaattaatgcgttaaatgaatgaaaaccaagggcaccaagatgtttcacaggtgattgctgtgttcccattcttttctcctatagtgtggcatttatgtgacctcacgcacattaggaagggacaaagtgtgtgcaggtagctctagcagcggagatgtctgatgatgtaggagtgggtgacggagccaggaggtcttccccggtgatcttcaggtcactgtaacgtaactgtagcgtttgatttgatatggggccataatttgaattgctctgttcctgtctgctgttcttctccagtgacaggaacagtccttgctgtaaaaactgtcagtttgagactgcccagaagaagtgccaggaggcgattaatgctacttgcaaaggcgtgtcctactgcacaggttcgtgttcttgttgcttccttggaatgctgtgggtcaagtgtgtgtgtgtctttgaaaaacaagattatgttttgttcagatgagagacaccttatttttaatctcatatgccgggttgagtttctggcactccttagtttgtgacacttggctttggtgggtttaagacctgtttctatttctctttcatttccatcactctcctctttctcctcacagacatccactctactgtggttaatatttgcctggatatgtgtatatccttgaaagatcatatagtgttattttgtgcatgtatgtgtttttaatgtgccaaaatgatattctaccttaaatttacttttaaaaaattcagtatcatgttttaaagaattacccatattgtgctacagataatataacaaggtttttaatggctacatcctaatagcaaaattttggaaacaatcaaaatgacaatcttgggataatgaatgttatcatgaatctatgcactggaatagtgtggaggaagcaggatacaagttagaagggtaaccagtttttctatatgtatctatatgtatttcactgttggggacacctacatattgtttagttatatgattggctgtgttttacttacaagtcaccaagtggtagctacttccattgccttcatccccttgatattccagataggacacagatcacatcctcctacgtcccttcaggaacctgtgtgtttctctgggtactgaggagtgtcattgtgtagtcacagaggcaggatgtgctggtctctagagcaccactgctaggttgcctgtgtctgaggactccttatcctgacgttctggccaacgcttggaattaccctgctgtcctattagcatgatgagtataaagtaatctcttgttcttacttttttttttaacagcccttgtcctaatgcacttacttacatttttcttgagcatctctttatatttttcagctattcagatttctcctgtgaatagccagttcatatatttggttcattttttaaaaattgggtttcatgttatttcactactgtgaatttggaggagttcttatgtaatcatccatttgggcatacgtctcctatctgttgccattctcagaacagaaatctttaacgtaatcaaatccatcattttgttgtgtgtgtgtattttttaaacacatggttcagaaaagccatggcggatggttaaaaagatattttccacagctgcttctattagcttcataagttgtccttttacattcaggacttgaatctttctggagctaacctttccaggtgtccagtatcttttgttcggtcaattgttgctttaaaaatttcaaagctatgttattactaggtatataaacggacatatctctacatctttatctgctgttccttaccagtatataatgttccttttttacccttgcgatgttttttgacttaaattgtcaaaaagcaatattcagtttgctattctagtttttttgttcctctgatatatctatctgtcccattcttatatttttcaaaatttgtctctcttggttggttggtttgattttgtaatagctttattgatacataattcacactcatgtagtttgcccatttaaagtgtacagtttaatgatttttagtatattcagatttatgcagtcatcacaattaattttagaacatttacattactccagaaagaaaccctgtatcctttagctatgatcctccaatccccccattccccacaactcagagcaaccactaaccaccctattctttatggagttgtctgttttgaacatttcatataaatggaattatacaatatggtttcgtgaccacatattgtatgactggcttctttcactgaacatagcatttttaaggttcatgtatgttgtagcatgtatcagtacttcatgtacttttattgctgggtaaattccattgcatggatatgccacattttgtttattcattcattggttgatagacatttgggttgcttccacttttttgctataacaaataatgctgctgtgaacatttatctatgagtttttgtgtggacagttcctttggatattattcaggaatagaatttctgggtcatgtggtaactatgcttaatcttttgaggagctgtcagactgttttccaaaatggctacaccattttacagtctcagcagcattgtatgagggtcccagcttctccatatcctcaccaacacttgttatcttttttattgtaactatcctaggttttgtgataaggatgcaaacagaaagctggaggtcttcagggacctagtgaatgaagttgtgtcctattttggcttgattttggttttccgtgtgcatagtatgacatgttgcccatgtttttatcttttgggatctgtcactatcacattactttgccaaatgttaggaacctgatggcccggcacagtggctcacacctgtaatcctagcactttgggaggccgaggtgggcagatcacgagatcaggagatcgagaccatcctggctaacacggtgaaaccctgtgtctactaaaagatacaaaaaattagctgggcgtggtggcgggcgcctgtagtcccagctacttgggaggctgaggcaggagaatggcgtgaacccgggaggcggagcttgcagtgagccgagatcacgccactgcactccagcctgggcaacagagcaagactccatctcaaaaaaaaaccaaaaaaacaaatgttaggaacctgaatatctaaatcaagctttaaagaagcatttgctagctatgctcaatgtttcatcttcactgtaataataaaatagattgagaaaaatgctttcttttaaataaacgtaagtaaaacaatttgaaaacgtttgttcttatcaaacagccttttgttcccttgatattttatacaaaatagtagatagcagaggataagttcctgataaggaatcagtattttctagcaggaaaagctagagaacaacaacctcaaaaaaaaaaaaaaaaaagaagaagaaagaaaaaaagcaattagcatttcacaaccagcagcagcagcatcacctgggagcttattagaaatggaaattgtcagtcccctccctggatctactgcatcaaaaaatgtgggaagggaggccagcagtctgtgctgtgtaaccttctgtcaggtgatttccatgcatgctaaactttggggaccatgctagatagatgataccattttcagaattattttcctacctgtctaatactctgactttagtcttttaagaacagatgctcaacagatatttattgagcattttttaatgtatcagggcagtatcatataccaaaaatacaataatgatccacaatataaaccttccctgagctcactggacatcatactttcagtaatagtttgttaaatgactgttgacatgatgaatgcccagtgctcatgaaaggttttatgagaaccagaggcaaagtgcctggttatctgttgggtacttaataaaccatcacttttgtttgaaactggccagattttctgtacattttgtgttactgctctgaaaccctctaagtcagaattcttttgattggcttcattcttcagctgaaaggccagtccagagctgtggatatatagtccattgctttcataaagtgttttttttctcctcctctatttgtgttgacttttagctacttgtgctattcattttccagaatgattcactcattccatcctgtctctcccagtttaactttctttggtgggttttctttggcattattggcctgggcacagtggctcatgcctatcattccagcacttggaaggccaaggtgggaggatcccttgagcccagcagttttacaccagcatggtcaacacagggagatctcgtctctcaaaaaaaaagaaagaaaattagccaggtatggtggcgtacgcctgaaatcctaggtacttgtgaggctgaggcaggaggattgccggaacctaggagtttgaggctgcagtaagctatgatcacacccctgccttccagcctgggtgacagactgagaccctgtctcaaaagaaaaataaaaagaataattgatttatttaagaaatatttgtagtatacctataatatgatagggattggagataacttaatagatttgatcattgctgtcatggggctttccagtctagtagagggaaaacagaaaataacattaaatatatatatataaattgcaaaacatatgcaatgaaggagagaaggagtgtgatagtgcataatggaagtgggaggccacatcaacttagcatcctcagggatatctcagaaaacctttgagacaaaacttaatccataagaaaagccagctaattgccccaaaagagtggaaacaccagcattccaggtagaaggaatagtatctgttaatattgaaggaactgaatggaggttgtcatagccaaagcagtgggctgtgggagagttgtgtgcgatgaagtcagggccagatagggaaggccgtggagttcttttaagccttcatacaaagtttgcaatttattctaagtaatagcacataggatattcttttatatatgactgtgagatgcagaagtggagaccatgcattctaactggggcttgggaggccagggactcatgcagcctagcctggcacatagccaggcactcccatttaaatgctgattgctggtgagatgcaggctcttgtcctagctctgtaggtcactttttgcttttgcaaggtaagatgctcacttgtatgagaaacagcgtattatgcacctgtagaactggtggacctgtgactcattctttttgttatgactggtgtttgcttccaggtaatagcagtgagtgcccgcctccaggaaatgctgaagatgacactgtttgcttggatcttggcaagtgtaaggatgggaaatgcatccctttctgcgagagggaacagcagctggagtcctgtgcatgtaatggtgagcagttttattcccagtccagcagcaggagaaaacatggcctttgtctgccaggctcccttcctccatttggaggttgtgcgaatgacagcagtggtgagatcca

SEQ ID NO: 10579 - DNA, 501 bp, Homo sapiens
taaggcccaggagtgttttcaagaacgcagcaataaagtttgtgggaactcgagggtggatgaaggagaagagtgtgatcctggcatcatgtatctgaacaacgacacctgctgcaacagcgactgcacgttgaaggaaggtgtccagtgcagtgacaggaacagtccttgctgtaaaaactgtcagtttgagactgcccagaagaagtgccaggaggcgattaatgctacttgcaaaggcgtgtcctactgcacaggtaatagcagtgagtgcccgcctccaggaaatgctgaagatgacactgtttgcttggatcttggcaagtgtaaggatgggaaatgcatccctttctgcgagagggaacagcagctggagtcctgtgcatgtaatggtgagcagttttattcccagtccagcagcaggagaaaacatggcctttgtctgccaggctcccttcctccatttggaggttgtgcgaatgacagcagtggtgagatcca

SEQ ID NO: 10580 - DNA, 3488 bp, Homo sapiens
acctgcacttctgggggcgtcgagcctggcggtagaatcttcccagtaggcggcgcgggagggaaaagaggattgaggggctaggccgggcggatcccgtcctcccccgatgtgagcagttttccgaaaccccgtcaggcgaaggctgcccagagaggtggagtcggtagcggggccgggaacatgaggcagtctctcctattcctgaccagcgtggttcctttcgtgctggcgccgcgacctccggatgacccgggcttcggcccccaccagagactcgcattcggtaagaaaaagagatctacagacttcaacacatgtagaaacactactaactttttcagctttgaaaaggcattttaaattatacctgacatcaagtactgaacgtttttcacaaaatttcaaggtcgtggtggtggatggtaaaaacgaaagcgagtacactgtaaaatggcaggacttcttcactggacacgtggttggtgagcctgactctagggttctagcccacataagagatgatgatgttataatcagaatcaacacagatggggccgaatataacatagagccactttggagatttgttaatgataccaaagacaaaagaatgttagtttataaatctgaagatatcaagaatgtttcacgtttgcagtctccaaaagtgtgtggttatttaaaagtggataatgaagagttgctcccaaaagggttagtagacagagaaccacctgaagagcttgttcatcgagtgaaaagaagagctgacccagatcccatgaagaacacgtgtaaattattggtggtagcagatcatcgcttctacagatacatgggcagaggggaagagagtacaactacaaattacttaatagagctaattgacagagttgatgacatctatcggaacacttcatgggataatgcaggttttaaaggctatggaatacagatagagcagattcgcattctcaagtctccacaagaggtaaaacctggtgaaaagcactacaacatggcaaaaagttacccaaatgaagaaaaggatgcttgggatgtgaagatgttgctagagcaatttagctttgatatagctgaggaagcatctaaagtttgcttggcacaccttttcacataccaagattttgatatgggaactcttggattagcttatgttggctctcccagagcaaacagccatggaggtgtttgtccaaaggcttattatagcccagttgggaagaaaaatatctatttgaatagtggtttgacgagcacaaagaattatggtaaaaccatccttacaaaggaagctgacctggttacaactcatgaattgggacataattttggagcagaacatgatccggatggtctagcagaatgtgccccgaatgaggaccagggagggaaatatgtcatgtatcccatagctgtgagtggcgatcacgagaacaataagatgttttcaaactgcagtaaacaatcaatctataagaccattgaaagtaaggcccaggagtgttttcaagaacgcagcaataaagtttgtgggaactcgagggtggatgaaggagaagagtgtgatcctggcatcatgtatctgaacaacgacacctgctgcaacagcgactgcacgttgaaggaaggtgtccagtgcagtgacaggaacagtccttgctgtaaaaactgtcagtttgagactgcccagaagaagtgccaggaggcgattaatgctacttgcaaaggcgtgtcctactgcacaggtaatagcagtgagtgcccgcctccaggaaatgctgaagatgacactgtttgcttggatcttggcaagtgtaaggatgggaaatgcatccctttctgcgagagggaacagcagctggagtcctgtgcatgtaatgaaactgacaactcctgcaaggtgtgctgcagggacctttctggccgctgtgtgccctatgtcgatgctgaacaaaagaacttatttttgaggaaaggaaagccctgtacagtaggattttgtgacatgaatggcaaatgtgagaaacgagtacaggatgtaattgaacgattttgggatttcattgaccagctgagcatcaatacttttggaaagtttttagcagacaacatcgttgggtctgtcctggttttctccttgatattttggattcctttcagcattcttgtccattgtgtggataagaaattggataaacagtatgaatctctgtctctgtttcaccccagtaacgtcgaaatgctgagcagcatggattctgcatcggttcgcattatcaaaccctttcctgcgccccagactccaggccgcctgcagcctgcccctgtgatcccttcggcgccagcagctccaaaactggaccaccagagaatggacaccatccaggaagaccccagcacagactcacatatggacgaggatgggtttgagaaggaccccttcccaaatagcagcacagctgccaagtcatttgaggatctcacggaccatccggtcaccagaagtgaaaaggctgcctcctttaaactgcagcgtcagaatcgtgttgacagcaaagaaacagagtgctaatttagttctcagctcttctgacttaagtgtgcaaaatatttttatagatttgacctacaaatcaatcacagcttgtattttgtgaagactgggaagtgacttagcagatgctggtcatgtgtttgaacttcctgcaggtaaacagttcttgtgtggtttggcccttctccttttgaaaaggtaaggtgaaggtgaatctagcttattttgaggctttcaggttttagtttttaaaatatcttttgacctgtggtgcaaaagcagaaaatacagctggattgggttatgaatatttacgtttttgtaaattaatcttttatattgataacagcactgactagggaaatgatcagtttttttttatacactgtaatgaaccgctgaatatgaggcatttggcatttatttgtgatgacaactggaatagttttttttttttttttttttttttgccttcaactaaaaacaaaggagataaatctagtatacattgtctctaaattgtgggtctatttctagttattacccagagtttttatgtagcagggaaaatatatatctaaatttagaaatcatttgggttaatatggctcttcataattctaagactaatgctctctagaaacctaaccacctaccttacagtgagggctatacatggtagccagttgaatttatggaatctaccaactgtttagggccctgatttgctgggcagtttttctgtattttataagtatcttcatgtatccctgttactgatagggatacatgctcttagaaaattcactattggctgggagtggtggctcatgcctgtaatcccagcacttggagaggctgaggttgcgccactacactccagcctgggtgacagagtgagactctg

SEQ ID NO: 10581 - DNA, 1761 bp, Homo sapiens
gaaactcaacaaaaagaatagcattttaaattatacctgacatcaagtactgaacgtttttcacaaaatttcaaggtcgtggtggtggatggtaaaaacgaaagcgagtacactgtaaaatggcaggacttcttcactggacacgtggttggtgagcctgactctagggttctagcccacataagagatgatgatgttataatcagaatcaacacagatggggccgaatataacatagagccactttggagatttgttaatgataccaaagacaaaagaatgttagtttataaatctgaagatatcaagaatgtttcacgtttgcagtctccaaaagtgtgtggttatttaaaagtggataatgaagagttgctcccaaaagggttagtagacagagaaccacctgaagtgcatacaaattcatattagagcttgttcatcgagtgaaaagaagagctgacccagatcccatgaagaacacgtgtaaattattggtggtagcagatcatcgcttctacagatacatgggcagaggggaagagagtacaactacaaattacttaatagagctaattgacagagttgatgacatctatcggaacacttcatgggataatgcaggttttaaaggctatggaatacagatagagcagattcgcattctcaagtctccacaagaggtaaaacctggtgaaaagcactacaacatggcaaaaagttacccaaatgaagaaaaggatgcttgggatgtgaagatgttgctagagcaatttagctttgatatagctgaggaagcatctaaagtttgcttggcacaccttttcacataccaagattttgatatgggaactcttggattagcttatgttggctctcccagagcaaacagccatggaggtgtttgtccaaaggcttattatagcccagttgggaagaaaaatatctatttgaatagtggtttgacgagcacaaagaattatggtaaaaccatccttacaaaggaagctgacctggttacaactcatgaattgggacataattttggagcagaacatgatccggatggtctagcagaatgtgccccgaatgaggaccagggagggaaatatgtcatgtatcccatagctgtgagtggcgatcacgagaacaataagatgttttcaaactgcagtaaacaatcaatctataagaccattgaaagtaaggcccaggagtgttttcaagaacgcagcaataaagtttgtgggaactcgagggtggatgaaggagaagagtgtgatcctggcatcatgtatctgaacaacgacacctgctgcaacagcgactgcacgttgaaggaaggtgtccagtgcagtgacaggaacagtccttgctgtaaaaactgtcagtttgagactgcccagaagaagtgccaggaggcgattaatgctacttgcaaaggcgtgtcctactgcacaggtaatagcagtgagtgcccgcctccaggaaatgctgaagatgacactgtttgcttggatcttggcaagtgtaaggatgggaaatgcatccctttctgcgagagggaacagcagctggagtcctgtgcatgtaatgaaactgacaactcctgcaaggtgtgctgcagggacctttctggccgctgtgtgccctatgtcgatgctgaacaaaagaacttatttttgaggaaaggaaagccctgtacagtaggattttgtgacatgaatggcaaatgtgagaaacgagtacaggatgtaattgaac

SEQ ID NO: 10582 - DNA, 2795 bp, Homo sapiens
atggagagatggtgtggtgtaatacaggcagcacagacattctgctctcggtagtatgtctagccagcagctctggcatttgacacaatggtaatatcctaagagcatttcactttagatttgtgaagtacttggtcaagacattaactgtttggaattgttcacaggaaagtttttagcagacaacatcgttgggtctgtcctggttttctccttgatattttggattcctttcagcattcttgtccattgtgtggtaagtcatcaacttttaagtaattaaatgttttatttaaattttgatcaactccaaccatgtaatctctggaaaaggtaaaacttgttcttagcaaagtttggcctgatatttccaatagctttttttgttgttattcctaggggaacatgtcttgtagaaagcttaactaatggtcttttaaaaaaaatactatttttgtgtgttggtgttttaatatataaatttcttaggaattttatacttttaagcataggagactgtttaactggatttgtccaggtcctttgatgagtaaagcccttattgaagagcattttcaggctgacttcgttgcaatagagcaaatatcaaacatcggcatttcagatgttccccatatatcatgtagattattggcagcagatggctatgtcttcagccttctgcacaaataggatgtagggactggggcccagctgtcatatagagtatttacatcttccccaaaaaataagagtaagcagtcttttctgttctcattcagaatcagtaacagctacaagttgaattgggctttgactaaggaactcctggtcctttataaatttgaggccctttttcataaatgttcttacgaatccattcacttgcatctgtggggaatggggatttgtctgctgtagagatgagaaagtcacacccaggcttccagacttgttttcccaaactctttcatagtggccttcctatgagcatttaaaaattccagcacaactctgatgacaaaggagtttttcctactgcctccttcctttcctttcctgctggcttctcctgcctaggggccatctcacagagcagctcttcctcagggtggtgagcatgatgggtataggaagatctctagggagcacttgtgctgaagaaagctgaaggtgacgtgcttgaagctttgacagatgtctctggatgacagtgccatccatcacgattgcttctattggaggatggaacctattttgtttacagggaagttgcacatgtggacaaggcacgacccttgatttcagagcaaagcctccgataggagggagggccatggcttgtttttggtcatagaatgcattgatggcacccagacaggaagcctagtcctggattcttggtccttgccctctgtcacctattatgcttcagccacaggcagggatggggcagcagatggccatgtggttagccttctgcagaagtaggatgtagggattgaggcccagttcctccagcagagcatggtccacagaaactgtggagacagctaagagagtgaggccatgggccggggcagtgcgaagaatgctgcaggcccagccacctgggtcttcctaccagttgcccttccagtcagtgcggtcctggtgtacccagcatctgggacatttgtcatttcatgcacaggaagatgcctttattattcccctgcccacagagggataaatttctcagaaaacatagcacttaaaccttgcctctttctgtacttaacgccaaaatgtatttcctttgagtgcaaaggaaacacttctagactggtggcataactaaagcttgggtgagaaatggattgtcatctgttgagcctgctatcactttctacaactcaggttctaagttcttcagttagtgttaggaatagcctgtgatgaaatagtactcactaactgaattgtatttgtagggaatgaccttcttgctgtttctttctaggataagaaattggataaacagtatgaatctctgtctctgtttcaccccagtgtaagtataccatatgaaagaaacataatcttcgcctggtctgaggccctgttaggcaaagaccttcacctgacccagcaagagctttcactggctgatggaaggtcatgttgcagcaggaagggtctaggttggaatgtttacccttctgacaacagtgatggtgaacttcgattagttgcatggatggacatttaaagagctgtgctgtccccttcccaagccataaggagtgatttagccattcaacacttagttaatattttgagttcaatttctctcttgggatcttaccttgagaggtttgaatcctcttttgggtcttcaaatggtaagtaagttttcaggatgcttgaaagctagtaattactgtttttgccattaaaagtaatggcattaattacttttgcaccaacctagtattttttagtcacttaggttgagtgagcctcacctagcacttttttcttagcatcacagtgccaacagaataagaggctgtttgatgggtaagggtggagctgtgaggacctccgattcatcttttattcctatcaatcaattgaacccatgtctttgcagaacgtcgaaatgctgagcagcatggattctgcatcggttcgcattatcaaaccctttcctgcgccccagactccaggccgcctgcagcctgcccctgtgatcccttcggcgccagcagctccaaaactggaccaccagagaatggacaccatccaggaag

SEQ ID NO: 10583 - DNA, 467 bp, Homo sapiens
atggagagatggtgtggtgtaatacaggcagcacagacattctgctctcggtagtatgtctagccagcagctctggcatttgacacaatggtaatatcctaagagcatttcactttagatttgtgaagtacttggtcaagacattaactgtttggaattgttcacaggaaagtttttagcagacaacatcgttgggtctgtcctggttttctccttgatattttggattcctttcagcattcttgtccattgtgtggataagaaattggataaacagtatgaatctctgtctctgtttcaccccagtaacgtcgaaatgctgagcagcatggattctgcatcggttcgcattatcaaaccctttcctgcgccccagactccaggccgcctgcagcctgcccctgtgatcccttcggcgccagcagctccaaaactggaccaccagagaatggacaccatccaggaag

SEQ ID NO: 10584 - DNA, 6573 bp, Homo sapiens
ctgggggcgtcgagcctggcggtagaatcttcccagtaggcggcgcgggagggaaaagaggattgaggggctaggccgggcggatcccgtcctcccccgatgtgagcagttttccgaaaccccgtcaggcgaaggctgcccagagaggtggagtcggtagcggggccgggaacatgaggcagtctctcctattcctgaccagcgtggttcctttcgtgctggcgccgcgacctccggatgacccgggcttcggcccccaccagagactcgcctctggtaaccaccattctgctgtctacctccacgagatccacttttttagcttccacacatgaagaagcttgattctttgctctcagactacgatattctctctttatctaatatccagcagcattcggtaagaaaaagagatctacagacttcaacacatgtagaaacactactaactttttcagctttgaaaaggcattttaaattatacctgacatcaagtactgaacgtttttcacaaaatttcaaggtcgtggtggtggatggtaaaaacgaaagcgagtacactgtaaaatggcaggacttcttcactggacacgtggttggtgagcctgactctagggttctagcccacataagagatgatgatgttataatcagaatcaacacagatggggccgaatataacatagagccactttggagatttgttaatgataccaaagacaaaagaatgttagtttataaatctgaagatatcaagaatgtttcacgtttgcagtctccaaaagtgtgtggttatttaaaagtggataatgaagagttgctcccaaaagggttagtagacagagaaccacctgaagtgcatacaaattcatattagagcttgttcatcgagtgaaaagaagagctgacccagatcccatgaagaacacgtgtaaattattggtggtagcagatcatcgcttctacagatacatgggcagaggggaagagagtacaactacaaattacttaatagagctaattgacagagttgatgacatctatcggaacacttcatgggataatgcaggttttaaaggctatggaatacagatagagcaggtatttatcaatagatatggcttatattacttaagttttgtaatgtaaatatttgtcacttgtattcaaaacctaaaaacttgtccttaacaataattgtaaataagttttctcagatgccaatgattttttatgatgaattgtgcagtatttttgatgttaattagttctagattgtgaagttttctgtccttagtctcgctttaggtagaaagccttttatgctgctgtgctttgttccttctttgaattcatggcctttatattctctgtagttttcttcccccctccgattatgcttaagtctttagttaaaactctggcatgcaccattgaatccttagtcagaaaatttactaaaaaatactgtgtacctttgcaaggctgtatttatatatacagaacctttaggttctttcctctcagatatctccttctgatttcttgtaatctgttaacagagtgtgtctagtaatgttatattaatgtcatcttaataatagctcatattaaaagttatttcaaattgctaggactaattaaaaaggcttctgacaaagggtattgctttgggcagagagacattttgatatgtaaattatataaattgttatctctatttttttccaagctttttgtagtaaaccatatttttataagttatatagtatagaatttagaggttgaaaaaatttttaaaaatcattcaccatgtttataaatgttaaactttgatattacttgtataaaactaagagaattatttttcccttttcattctctttcactgttacgcattttctttttaagttattatttgaataggtaacatgtacacagtacaaaagccagtgaaaagtaagtctctgcagcctgtttattgtcaaaccagttcctttccccaaagacattcatgtcactagtttcatatgtatctttctagagatgtcgtatgcaggtatagtgtatgtatatgtctgtatttgacacaacggtgctatgcagtacacttttacaccttgctttttcatttcacagtatgttggagagtacttcatgttcatgcatgtaaagctgcttcacttgttttattataaatagctgcatcatgtttgagtttcagggaacctgtaaattttctttttgctttaggcatttggaaccagtcgaagaaacaggaataatataggagattaaaacattaacttctttacatctgatgaaggatggattggagggtgtggtttagatgtgtatcatggtgggcttctaagtagttctatcccagatttgaccttgaccagccaccatcaaaactgcagagtccaccccagtaaacttaccacacagtggcagaggagaccagaatgggccttctctgcaggcaggcaggcaggcaggcaggcagagagactcacagaaactctgagctgagcatggtttccttctttatctcacacttactaatgggagcctttgttacttttttttttcttctttgcaggtttaatatgaatttgtctgaaatgcctgtataaggagaagactctattcttagccttttattcctttgatgcacaaagagatgtatattttattattctttcctgagttgtcgactgtagtcgtaataaatattttaggctcctgtaacccaagttcttattttttcaaaataaacatggaggatatgaaaatttaagagtacatttataatattataaataattcattgacatatgttttccataccatatgcttctctgtttgtttcaaacattgaatattggtactgaagaatttatgaattttggttttaaaatgttttttttctagaacgattctttttttgaacagataaaataatgcagtattcagagccttctgacttattttggaagtgttctaagtatatgatctctttaagtatagattcgcattctcaagtctccacaagaggtaaaacctggtgaaaagcactacaacatggcaaaaagttacccaaatgaagaaaaggatgcttgggatgtgaagatgttgctagagcaatttagctttgatatagctgaggaagcatctaaagtttgcttggcacaccttttcacataccaagattttgatatgggaactcttggattagcttatgttggctctcccagagcaaacagccatggaggtgtttgtccaaaggcttattatagcccagttgggaagaaaaatatctatttgaatagtggtttgacgagcacaaagaattatggtaaaaccatccttacaaaggaagctgacctggttacaactcatgaattgggacataattttggagcagaacatgatccggatggtctagcagaatgtgccccgaatgaggaccagggagggaaatatgtcatgtatcccatagctgtgagtggcgatcacgagaacaataagatgttttcaaactgcagtaaacaatcaatctataagaccattgaaagtaaggcccaggagtgttttcaagaacgcagcaataaagtttgtgggaactcgagggtggatgaaggagaagagtgtgatcctggcatcatgtatctgaacaacgacacctgctgcaacagcgactgcacgttgaaggaaggtgtccagtgcagtgacaggaacagtccttgctgtaaaaactgtcagtttgagactgcccagaagaagtgccaggaggcgattaatgctacttgcaaaggcgtgtcctactgcacaggttcgtgttcttgttgcttccttggaatgctgtgggtcaagtgtgtgtgtgtctttgaaaaacaagattatgttttgttcagatgagagacaccttatttttaatctcatatgccgggttgagtttctggcactccttagtttgtgacacttggctttggtgggtttaagacctgtttctatttctctttcatttccatcactctcctctttctcctcacagacatccactctactgtggttaatatttgcctggatatgtgtatatccttgaaagatcatatagtgttattttgtgcatgtatgtgtttttaatgtgccaaaatgatattctaccttaaatttacttttaaaaaattcagtatcatgttttaaagaattacccatattgtgctacagataatataacaaggtttttaatggctacatcctaatagcaaaattttggaaacaatcaaaatgacaatcttgggataatgaatgttatcatgaatctatgcactggaatagtgtggaggaagcaggatacaagttagaagggtaaccagtttttctatatgtatctatatgtatttcactgttggggacacctacatattgtttagttatatgattggctgtgttttacttacaagtcaccaagtggtagctacttccattgccttcatccccttgatattccagataggacacagatcacatcctcctacgtcccttcaggaacctgtgtgtttctctgggtactgaggagtgtcattgtgtagtcacagaggcaggatgtgctggtctctagagcaccactgctaggttgcctgtgtctgaggactccttatcctgacgttctggccaacgcttggaattaccctgctgtcctattagcatgatgagtataaagtaatctcttgttcttacttttttttttaacagcccttgtcctaatgcacttacttacatttttcttgagcatctctttatatttttcagctattcagatttctcctgtgaatagccagttcatatatttggttcattttttaaaaattgggtttcatgttatttcactactgtgaatttggaggagttcttatgtaatcatccatttgggcatacgtctcctatctgttgccattctcagaacagaaatctttaacgtaatcaaatccatcattttgttgtgtgtgtgtattttttaaacacatggttcagaaaagccatggcggatggttaaaaagatattttccacagctgcttctattagcttcataagttgtccttttacattcaggacttgaatctttctggagctaacctttccaggtgtccagtatcttttgttcggtcaattgttgctttaaaaatttcaaagctatgttattactaggtatataaacggacatatctctacatctttatctgctgttccttaccagtatataatgttccttttttacccttgcgatgttttttgacttaaattgtcaaaaagcaatattcagtttgctattctagtttttttgttcctctgatatatctatctgtcccattcttatatttttcaaaatttgtctctcttggttggttggtttgattttgtaatagctttattgatacataattcacactcatgtagtttgcccatttaaagtgtacagtttaatgatttttagtatattcagatttatgcagtcatcacaattaattttagaacatttacattactccagaaagaaaccctgtatcctttagctatgatcctccaatccccccattccccacaactcagagcaaccactaaccaccctattctttatggagttgtctgttttgaacatttcatataaatggaattatacaatatggtttcgtgaccacatattgtatgactggcttctttcactgaacatagcatttttaaggttcatgtatgttgtagcatgtatcagtacttcatgtacttttattgctgggtaaattccattgcatggatatgccacattttgtttattcattcattggttgatagacatttgggttgcttccacttttttgctataacaaataatgctgctgtgaacatttatctatgagtttttgtgtggacagttcctttggatattattcaggaatagaatttctgggtcatgtggtaactatgcttaatcttttgaggagctgtcagactgttttccaaaatggctacaccattttacagtctcagcagcattgtatgagggtcccagcttctccatatcctcaccaacacttgttatcttttttattgtaactatcctaggttttgtgataaggatgcaaacagaaagctggaggtcttcagggacctagtgaatgaagttgtgtcctattttggcttgattttggttttccgtgtgcatagtatgacatgttgcccatgtttttatcttttgggatctgtcactatcacattactttgccaaatgttaggaacctgatggcccggcacagtggctcacacctgtaatcctagcactttgggaggccgaggtgggcagatcacgagatcaggagatcgagaccatcctggctaacacggtgaaaccctgtgtctactaaaagatacaaaaaattagctgggcgtggtggcgggcgcctgtagtcccagctacttgggaggctgaggcaggagaatggcgtgaacccgggaggcggagcttgcagtgagccgagatcacgccactgcactccagcctgggcaac

SEQ ID NO: 10585 - DNA, 2813 bp, Homo sapiens
agttttccgaaaccccgtcaggcgaaggctgcccagagaggtggagtcggtagcggggccgggaacatgaggcagtctctcctattcctgaccagcgtggttcctttcgtgctggcgccgcgacctccggatgacccgggcttcggcccccaccagagactcgagaagcttgattctttgctctcagactacgatattctctctttatctaatatccagcagcattcggcattttaaattatacctgacatcaagtactgaacgtttttcacaaaatttcaaggtcgtggtggtggatggtaaaaacgaaagcgagtacactgtaaaatggcaggacttcttcactggacacgtggttggtgagcctgactctagggttctagcccacataagagatgatgatgttataatcagaatcaacacagatggggccgaatataacatagagccactttggagatttgttaatgataccaaagacaaaagaatgttagtttataaatctgaagatatcaagaatgtttcacgtttgcagtctccaaaagtgtgtggttatttaaaagtggataatgaagagttgctcccaaaagggttagtagacagagaaccacctgaagtgcatacaaattcatattagagcttgttcatcgagtgaaaagaagagctgacccagatcccatgaagaacacgtgtaaattattggtggtagcagatcatcgcttctacagatacatgggcagaggggaagagagtacaactacaaattacttaatagagctaattgacagagttgatgacatctatcggaacacttcatgggataatgcaggttttaaaggctatggaatacagatagagcagattcgcattctcaagtctccacaagaggtaaaacctggtgaaaagcactacaacatggcaaaaagttacccaaatgaagaaaaggatgcttgggatgtgaagatgttgctagagcaatttagctttgatatagctgaggaagcatctaaagtttgcttggcacaccttttcacataccaagattttgatatgggaactcttggattagcttatgttggctctcccagagcaaacagccatggaggtgtttgtccaaaggcttattatagcccagttgggaagaaaaatatctatttgaatagtggtttgacgagcacaaagaattatggtaaaaccatccttacaaaggaagctgacctggttacaactcatgaattgggacataattttggagcagaacatgatccggatggtctagcagaatgtgccccgaatgaggaccagggagggaaatatgtcatgtatcccatagctgtgagtggcgatcacgagaacaataagatgttttcaaactgcagtaaacaatcaatctataagaccattgaaagtaaggcccaggagtgttttcaagaacgcagcaataaagtttgtgggaactcgagggtggatgaaggagaagagtgtgatcctggcatcatgtatctgaacaacgacacctgctgcaacagcgactgcacgttgaaggaaggtgtccagtgcagtgacaggaacagtccttgctgtaaaaactgtcagtttgagactgcccagaagaagtgccaggaggcgattaatgctacttgcaaaggcgtgtcctactgcacaggtaatagcagtgagtgcccgcctccaggaaatgctgaagatgacactgtttgcttggatcttggcaagtgtaaggatgggaaatgcatccctttctgcgagagggaacagcagctggagtcctgtgcatgtaatgaaactgacaactcctgcaaggtgtgctgcagggacctttctggccgctgtgtgccctatgtcgatgctgaacaaaagaacttatttttgaggaaaggaaagccctgtacagtaggattttgtgacatgaatggcaaatgtgagaaacgagtacaggatgtaattgaacgattttgggatttcattgaccagctgagcatcaatacttttggaaagtttttagcagacaacatcgttgggtctgtcctggttttctccttgatattttggattcctttcagcattcttgtccattgtgtggataagaaattggataaacagtatgaatctctgtctctgtttcaccccagtaacgtcgaaatgctgagcagcatggattctgcatcggttcgcattatcaaaccctttcctgcgccccagactccaggccgcctgcagcctgcccctgtgatcccttcggcgccagcagctccaaaactggaccaccagagaatggacaccatccaggaagaccccagcacagactcacatatggacgaggatgggtttgagaaggaccccttcccaaatagcagcacagctgccaagtcatttgaggatctcacggaccatccggtcaccagaagtgaaaaggctgcctcctttaaactgcagcgtcagaatcgtgttgacagcaaagaaacagagtgctaatttagttctcagctcttctgacttaagtgtgcaaaatatttttatagatttgacctacaaatcaatcacagcttgtattttgtgaagactgggaagtgacttagcagatgctggtcatgtgtttgaacttcctgcaggtaaacagttcttgtgtggtttggcccttctccttttgaaaaggtaaggtgaaggtgaatctagcttattttgaggctttcaggttttagtttttaaaatatcttttgacctgtggtgcaaaagcagaaaatacagctggattgggttatgaatatttacgtttttgtaaattaatcttttat

SEQ ID NO: 10586 - DNA, 4055 bp, Homo sapiens
gcactccagcctgggcgacagagcaagactccatctcaaaagaagcttgattctttgctctcagactacgatattctctctttatctaatatccagcagcattcggtaagaaaaagagatctacagacttcaacacatgtagaaacactactaactttttcagctttgaaaaggcattttaaattatacctgacatcaagtactgaacgtttttcacaaaatttcaaggtcgtggtggtggatggtaaaaacgaaagcgagtacactgtaaaatggcaggacttcttcactggacacgtggttggtgagcctgactctagggttctagcccacataagagatgatgatgttataatcagaatcaacacagatggggccgaatataacatagagccactttggagatttgttaatgataccaaagacaaaagaatgttagtttataaatctgaagatatcaagaatgtttcacgtttgcagtctccaaaagtgtgtggttatttaaaagtggataatgaagagttgctcccaaaagggttagtagacagagaaccacctgaagagcttgttcatcgagtgaaaagaagagctgacccagatcccatgaagaacacgtgtaaattattggtggtagcagatcatcgcttctacagatacatgggcagaggggaagagagtacaactacaaattacttaatagagctaattgacagagttgatgacatctatcggaacacttcatgggataatgcaggttttaaaggctatggaatacagatagagcagtatagattcgcattctcaagtctccacaagaggtaaaacctggtgaaaagcactacaacatggcaaaaagttacccaaatgaagaaaaggatgcttgggatgtgaagatgttgctagagcaatttagctttgatatagctgaggaagcatctaaagtttgcttggcacaccttttcacataccaagattttgatatgggaactcttggattagcttatgttggctctcccagagcaaacagccatggaggtgtttgtccaaaggcttattatagcccagttgggaagaaaaatatctatttgaatagtggtttgacgagcacaaagaattatggtaaaaccatccttacaaaggaagctgacctggttacaactcatgaattgggacataattttggagcagaacatgatccggatggtctagcagaatgtgccccgaatgaggaccagggagggaaatatgtcatgtatcccatagctgtgagtggcgatcacgagaacaataagatgttttcaaactgcagtaaacaatcaatctataagaccattgaaagtaaggcccaggagtgttttcaagaacgcagcaataaagtttgtgggaactcgagggtggatgaaggagaagagtgtgatcctggcatcatgtatctgaacaacgacacctgctgcaacagcgactgcacgttgaaggaaggtgtccagtgcagtgacaggaacagtccttgctgtaaaaactgtcagtttgagactgcccagaagaagtgccaggaggcgattaatgctacttgcaaaggcgtgtcctactgcacagacatccactctactgtggttaatatttgcctggatatgtgtatatccttgaaagatcatatagtgttattttgtgcatgtatgtgtttttaatgtgccaaaatgatattctaccttaaatttacttttaaaaaattcagtatcatgttttaaagaattacccatattgtgctacagataatataacaaggtttttaatggctacatcctaatagcaaaattttggaaacaatcaaaatgacaatcttgggataatgaatgttatcatgaatctatgcactggaatagtgtggaggaagcaggatacaagttagaagggtaaccagtttttctatatgtatctatatgtatttcactgttggggacacctacatattgtttagttatatgattggctgtgttttacttacaagtcaccaagtggtagctacttccattgccttcatccccttgatattccagataggacacagatcacatcctcctacgtcccttcaggaacctgtgtgtttctctgggtactgaggagtgtcattgtgtagtcacagaggcaggatgtgctggtctctagagcaccactgctaggttgcctgtgtctgaggactccttatcctgacgttctggccaacgcttggaattaccctgctgtcctattagcatgatgagtataaagtaatctcttgttcttacttttttttttaacagcccttgtcctaatgcacttacttacatttttcttgagcatctctttatatttttcagctattcagatttctcctgtgaatagccagttcatatatttggttcattttttaaaaattgggtttcatgttatttcactactgtgaatttggaggagttcttatgtaatcatccatttgggcatacgtctcctatctgttgccattctcagaacagaaatctttaacgtaatcaaatccatcattttgttgtgtgtgtgtattttttaaacacatggttcagaaaagccatggcggatggttaaaaagatattttccacagctgcttctattagcttcataagttgtccttttacattcaggacttgaatctttctggagctaacctttccaggtgtccagtatcttttgttcggtcaattgttgctttaaaaatttcaaagctatgttattactaggtatataaacggacatatctctacatctttatctgctgttccttaccagtatataatgttccttttttacccttgcgatgttttttgacttaaattgtcaaaaagcaatattcagtttgctattctagtttttttgttcctctgatatatctatctgtcccattcttatatttttcaaaatttgtctctcttggttggttggtttgattttgtaatagctttattgatacataattcacactcatgtagtttgcccatttaaagtgtacagtttaatgatttttagtatattcagatttatgcagtcatcacaattaattttagaacatttacattactccagaaagaaaccctgtatcctttagctatgatcctccaatccccccattccccacaactcagagcaaccactaaccaccctattctttatggagttgtctgttttgaacatttcatataaatggaattatacaatatggtttcgtgaccacatattgtatgactggcttctttcactgaacatagcatttttaaggttcatgtatgttgtagcatgtatcagtacttcatgtacttttattgctgggtaaattccattgcatggatatgccacattttgtttattcattcattggttgatagacatttgggttgcttccacttttttgctataacaaataatgctgctgtgaacatttatctatgagtttttgtgtggacagttcctttggatattattcaggaatagaatttctgggtcatgtggtaactatgcttaatcttttgaggagctgtcagactgttttccaaaatggctacaccattttacagtctcagcagcattgtatgagggtcccagcttctccatatcctcaccaacacttgttatcttttttattgtaactatcctaggttttgtgataaggatgcaaacagaaagctggaggtcttcagggacctagtgaatgaagttgtgtcctattttggcttgattttggttttccgtgtgcatagtatgacatgttgcccatgtttttatcttttgggatctgtcactatcacattactttgccaaatgttaggaacctgatggcccggcacagtggctcacacctgtaatcctagcactttgggaggccgaggtgggcagatcacgagatcaggagatcgagaccatcctggctaacacggtgaaaccctgtgtctactaaaagatacaaaaaattagctgggcgtggtggcgggcgcctgtagtcccagctacttgggaggctgaggcaggagaatggcgtgaacccggg

SEQ ID NO: 10587 - DNA, 4442 bp, Homo sapiens
acactgcctaatcgtcccgcccagtagtgagcaggcctgtcccattccatactgaccagattcccagtcaccaaggccccctctcactccgctccactcctcgggctggctctcctgaggatgcaccagcgtcacccccgggcaagatgccctcccctctgtgtggccggaatccttgcctgtggctttctcctgggctgctggggaccctcccatttccagcagagttgtcttcaggctttggagccacaggccgtgtcttcttacttgagccctggtgctcccttaaaaggccgccctccttcccctggcttccagaggcagaggcagaggcagaggcgggctgcaggcggcatcctacacctggagctgctggtggccgtgggccccgatgtcttccaggctcaccaggaggacacagagcgctatgtgctcaccaacctcaacatcggggcagaactgcttcgggacccgtccctgggggctcagtttcgggtgcacctggtgaagatggtcattctgacagagcctgagggtgctccaaatatcacagccaacctcacctcgtccctgctgagcgtctgtgggtggagccagaccatcaaccctgaggacgacacggatcctggccatgctgacctggtcctctatatcactaggtttgacctggagttgcctgatggtaaccggcaggtgcggggcgtcacccagctgggcggtgcctgctccccaacctggagctgcctcattaccgaggacactggcttcgacctgggagtcaccattgcccatgagattgggcacagcttcggcctggagcacgacggcgcgcccggcagcggctgcggccccagcggacacgtgatggcttcggacggcgccgcgccccgcgccggcctcgcctggtccccctgcagccgccggcagctgctgagcctgctcagcgcaggacgggcgcgctgcgtgtgggacccgccgcggcctcaacccgggtccgcggggcacccgccggatgcgcagcctggcctctactacagcgccaacgagcagtgccgcgtggccttcggccccaaggctgtcgcctgcaccttcgccagggagcacctggatatgtgccaggccctctcctgccacacagacccgctggaccaaagcagctgcagccgcctcctcgttcctctcctggatgggacagaatgtggcgtggagaagtggtgctccaagggtcgctgccgctccctggtggagctgacccccatagcagcagtgcatgggcgctggtctagctggggtccccgaagtccttgctcccgctcctgcggaggaggtgtggtcaccaggaggcggcagtgcaacaaccccagacctgcctttggggggcgtgcatgtgttggtgctgacctccaggccgagatgtgcaacactcaggcctgcgagaagacccagctggagttcatgtcgcaacagtgcgccaggaccgacggccagccgctgcgctcctcccctggcggcgcctccttctaccactggggtgctgctgtaccacacagccaaggggatgctctgtgcagacacatgtgccgggccattggcgagagcttcatcatgaagcgtggagacagcttcctcgatgggacccggtgtatgccaagtggcccccgggaggacgggaccctgagcctgtgtgtgtcgggcagctgcaggacatttggctgtgatggtaggatggactcccagcaggtatgggacaggtgccaggtgtgtggtggggacaacagcacgtgcagcccacggaagggctctttcacagctggcagagcgagagaatatgtcacgtttctgacagttacccccaacctgaccagtgtctacattgccaaccacaggcctctcttcacacacttggcggtgaggatcggagggcgctatgtcgtggctgggaagatgagcatctcccctaacaccacctacccctccctcctggaggatggtcgtgtcgagtacagagtggccctcaccgaggaccggctgccccgcctggaggagatccgcatctggggacccctccaggaagatgctgacatccaggtttacaggcggtatggcgaggagtatggcaacctcacccgcccagacatcaccttcacctacttccagcctaagccacggcaggcctgggtgtgggccgctgtgcgtgggccctgctcggtgagctgtggggcagggctgcgctgggtaaactacagctgcctggaccaggccaggaaggagttggtggagactgtccagtgccaagggagccagcagccaccagcgtggccagaggcctgcgtgctcgaaccctgccctccctactgggcggtgggagacttcggcccatgcagcgcctcctgtgggggtggcctgcgggagcggccagtgcgctgcgtggaggcccagggcagcctcctgaagacattgcccccagcccggtgcagagcaggggcccagcagccagctgtggcgctggaaacctgcaacccccagccctgccctgccaggtgggaggtgtcagagcccagctcatgcacatcagctggtggagcaggcctggccttggagaacgagacctgtgtgccaggggcagatggcctggaggctccagtgactgaggggcctggctccgtagatgagaagctgcctgcccctgagccctgtgtcgggatgtcatgtcctccaggctggggccatctggatgccacctctgcaggggagaaggctccctccccatggggcagcatcaggacgggggctcaagctgcacacgtgtggacccctgcggcagggtcgtgctccgtctcctgcgggcgaggtctgatggagctgcgtttcctgtgcatggactctgccctcagggtgcctgtccaggaagagctgtgtggcctggcaagcaagcctgggagccggcgggaggtctgccaggctgtcccgtgccctgctcggtggcagtacaagctggcggcctgcagcgtgagctgtgggagaggggtcgtgcggaggatcctgtattgtgcccgggcccatggggaggacgatggtgaggagatcctgttggacacccagtgccaggggctgcctcgcccggaaccccaggaggcctgcagcctggagccctgcccacctaggtggaaagtcatgtcccttggcccatgttcggccagctgtggccttggcactgctagacgctcggtggcctgtgtgcagctcgaccaaggccaggacgtggaggtggacgaggcggcctgtgcggcgctggtgcggcccgaggccagtgtcccctgtctcattgccgactgcacctaccgctggcatgttggcacctggatggagtgctctgtttcctgtggggatggcatccagcgccggcgtgacacctgcctcggaccccaggcccaggcgcctgtgccagctgatttctgccagcacttgcccaagccggtgactgtgcgtggctgctgggctgggccctgtgtgggacagggtgcctgtggcaggcagcaccttgagccaacaggaaccattgacatgcgaggcccagggcaggcagactgtgcagtggccattgggcggcccctcggggaggtggtgaccctccgcgtccttgagagttctctcaactgcagtgcgggggacatgttgctgctttggggccggctcacctggaggaagatgtgcaggaagctgttggacatgactttcagctccaagaccaacacgctggtggtgaggcagcgctgcgggcggccaggaggtggggtgctgctgcggtatgggagccagcttgctcctgaaaccttctacagagaatgtgacatgcagctctttgggccctggggtgaaatcgtgagcccctcgctgagtccagccacgagtaatgcagggggctgccggctcttcattaatgtggctccgcacgcacggattgccatccatgccctggccaccaacatgggcgctgggaccgagggagccaatgccagctacatcttgatccgggacacccacagcttgaggaccacagcgttccatgggcagcaggtgctctactgggagtcagagagcagccaggctgagatggagttcagcgagggcttcctgaaggctcaggccagcctgcggggccagtactggaccctccaatcatgggtaccggagatgcaggaccctcagtcctggaagggaaaggaaggaacctgagggtcattgaacatttgttccgtgtctggccagccctggagggttgacccctggtctcagtgctttccaattcgaactttttccaatcttaggtatctactttagagtcttctccaatgtccaaaaggctagggggttggaggtggggactctggaaaagcagcccccatttcctcgggtaccaataaataaaacatgcaggctga

SEQ ID NO: 10588 - DNA, 4349 bp, Homo sapiens
acactgcctaatcgtcccgcccagtagtgagcaggcctgtcccattccatactgaccagattcccagtcaccaaggccccctctcactccgctccactcctcgggctggctctcctgaggatgcaccagcgtcacccccgggcaagatgccctcccctctgtgtggccggaatccttgcctgtggctttctcctgggctgctggggaccctcccatttccagcagagttgtcttcaggctttggagccacaggccgtgtcttcttacttgagccctggtgctcccttaaaaggccgccctccttcccctggcttccagaggcagaggcagaggcagaggcgggctgcaggcggcatcctacacctggagctgctggtggccgtgggccccgatgtcttccaggctcaccaggaggacacagagcgctatgtgctcaccaacctcaacatcggggcagaactgcttcgggacccgtccctgggggctcagtttcgggtgcacctggtgaagatggtcattctgacagagcctgagggtgctccaaatatcacagccaacctcacctcgtccctgctgagcgtctgtgggtggagccagaccatcaaccctgaggacgacacggatcctggccatgctgacctggtcctctatatcactaggtttgacctggagttgcctgatggtaaccggcaggtgcggggcgtcacccagctgggcggtgcctgctccccaacctggagctgcctcattaccgaggacactggcttcgacctgggagtcaccattgcccatgagattgggcacagcttcggcctggagcacgacggcgcgcccggcagcggctgcggccccagcggacacgtgatggcttcggacggcgccgcgccccgcgccggcctcgcctggtccccctgcagccgccggcagctgctgagcctgctcagcgccaacgagcagtgccgcgtggccttcggccccaaggctgtcgcctgcaccttcgccagggagcacctggatatgtgccaggccctctcctgccacacagacccgctggaccaaagcagctgcagccgcctcctcgttcctctcctggatgggacagaatgtggcgtggagaagtggtgctccaagggtcgctgccgctccctggtggagctgacccccatagcagcagtgcatgggcgctggtctagctggggtccccgaagtccttgctcccgctcctgcggaggaggtgtggtcaccaggaggcggcagtgcaacaaccccagacctgcctttggggggcgtgcatgtgttggtgctgacctccaggccgagatgtgcaacactcaggcctgcgagaagacccagctggagttcatgtcgcaacagtgcgccaggaccgacggccagccgctgcgctcctcccctggcggcgcctccttctaccactggggtgctgctgtaccacacagccaaggggatgctctgtgcagacacatgtgccgggccattggcgagagcttcatcatgaagcgtggagacagcttcctcgatgggacccggtgtatgccaagtggcccccgggaggacgggaccctgagcctgtgtgtgtcgggcagctgcaggacatttggctgtgatggtaggatggactcccagcaggtatgggacaggtgccaggtgtgtggtggggacaacagcacgtgcagcccacggaagggctctttcacagctggcagagcgagagaatatgtcacgtttctgacagttacccccaacctgaccagtgtctacattgccaaccacaggcctctcttcacacacttggcggtgaggatcggagggcgctatgtcgtggctgggaagatgagcatctcccctaacaccacctacccctccctcctggaggatggtcgtgtcgagtacagagtggccctcaccgaggaccggctgccccgcctggaggagatccgcatctggggacccctccaggaagatgctgacatccaggtttacaggcggtatggcgaggagtatggcaacctcacccgcccagacatcaccttcacctacttccagcctaagccacggcaggcctgggtgtgggccgctgtgcgtgggccctgctcggtgagctgtggggcagggctgcgctgggtaaactacagctgcctggaccaggccaggaaggagttggtggagactgtccagtgccaagggagccagcagccaccagcgtggccagaggcctgcgtgctcgaaccctgccctccctactgggcggtgggagacttcggcccatgcagcgcctcctgtgggggtggcctgcgggagcggccagtgcgctgcgtggaggcccagggcagcctcctgaagacattgcccccagcccggtgcagagcaggggcccagcagccagctgtggcgctggaaacctgcaacccccagccctgccctgccaggtgggaggtgtcagagcccagctcatgcacatcagctggtggagcaggcctggccttggagaacgagacctgtgtgccaggggcagatggcctggaggctccagtgactgaggggcctggctccgtagatgagaagctgcctgcccctgagccctgtgtcgggatgtcatgtcctccaggctggggccatctggatgccacctctgcaggggagaaggctccctccccatggggcagcatcaggacgggggctcaagctgcacacgtgtggacccctgcggcagggtcgtgctccgtctcctgcgggcgaggtctgatggagctgcgtttcctgtgcatggactctgccctcagggtgcctgtccaggaagagctgtgtggcctggcaagcaagcctgggagccggcgggaggtctgccaggctgtcccgtgccctgctcggtggcagtacaagctggcggcctgcagcgtgagctgtgggagaggggtcgtgcggaggatcctgtattgtgcccgggcccatggggaggacgatggtgaggagatcctgttggacacccagtgccaggggctgcctcgcccggaaccccaggaggcctgcagcctggagccctgcccacctaggtggaaagtcatgtcccttggcccatgttcggccagctgtggccttggcactgctagacgctcggtggcctgtgtgcagctcgaccaaggccaggacgtggaggtggacgaggcggcctgtgcggcgctggtgcggcccgaggccagtgtcccctgtctcattgccgactgcacctaccgctggcatgttggcacctggatggagtgctctgtttcctgtggggatggcatccagcgccggcgtgacacctgcctcggaccccaggcccaggcgcctgtgccagctgatttctgccagcacttgcccaagccggtgactgtgcgtggctgctgggctgggccctgtgtgggacagggtgcctgtggcaggcagcaccttgagccaacaggaaccattgacatgcgaggcccagggcaggcagactgtgcagtggccattgggcggcccctcggggaggtggtgaccctccgcgtccttgagagttctctcaactgcagtgcgggggacatgttgctgctttggggccggctcacctggaggaagatgtgcaggaagctgttggacatgactttcagctccaagaccaacacgctggtggtgaggcagcgctgcgggcggccaggaggtggggtgctgctgcggtatgggagccagcttgctcctgaaaccttctacagagaatgtgacatgcagctctttgggccctggggtgaaatcgtgagcccctcgctgagtccagccacgagtaatgcagggggctgccggctcttcattaatgtggctccgcacgcacggattgccatccatgccctggccaccaacatgggcgctgggaccgagggagccaatgccagctacatcttgatccgggacacccacagcttgaggaccacagcgttccatgggcagcaggtgctctactgggagtcagagagcagccaggctgagatggagttcagcgagggcttcctgaaggctcaggccagcctgcggggccagtactggaccctccaatcatgggtaccggagatgcaggaccctcagtcctggaagggaaaggaaggaacctgagggtcattgaacatttgttccgtgtctggccagccctggagggttgacccctggtctcagtgctttccaattcgaactttttccaatcttaggtatctactttagagtcttctccaatgtccaaaaggctagggggttggaggtggggactctggaaaagcagcccccatttcctcgggtaccaataaataaaacatgcaggctga

SEQ ID NO: 10589 - DNA, 3739 bp, Homo sapiens
ggtgggcaaaggcatcttcctctgggaaggactggcacaagcacttggtccctgggttgtgtgcctgggaggccgggatcagggctggccctctttctccctggcaaagcaaaacctcccttttactactatcaaggggaagtaacttgaaggtaggaacccagcttgtgagccccctagcctctgggctgctctgcatgtgccccctcttgctggatcatctggtagcagccctgtgccctgagggtgatgctctgacctatgcagcccccctccctgtcctgagaaggcttccagctgggccttggaggacagggtccacccctacctcctggtctccttcctcagcttggaagccccggagcctgccctgctgggaatcggggaagcactgcttacctgtctcctgctcccttttcaggtgcctgtggcaggcagcaccttgagccaacaggaaccattgacatgcgaggcccagggcaggcagactgtgcagtggccattgggcggcccctcggggaggtggtgaccctccgcgtccttgagagttctctcaactgcagtgcgggtatgtctagggccatgcaagcgatgctgccagttatgggccctgccaggagccagcacgacgctgcatgccccattcctggcaggagcccatgtgcattcccacctgtagtttgcatcccatctcatgactggggagtgatgatctgcattttacagatgaggaaactgaggctaggagagattaagtgatgtgcccagttacttagagtcacatagccagcagtgggagaggtgggacttgaactcggctcagtctaccctggagccactcctctgctgaccaggcgtgggagtgctggaccctcactgccctgccgcttcctaggggacatgttgctgctttggggccggctcacctggaggaagatgtgcaggaagctgttggacatgactttcagctccaagaccaacacgctggtggtgaggcagcgctgcgggcggccaggaggtggggtgctgctgcggtatgggagccagcttgctcctgaaaccttctacagaggtatggccaggccttctccacctcccttgggtgctccagtcctggcagggaggctgggtgggtgctgctggggatggggccagtcccagtggggcagtgggaagatacggagggaactgactgagatggaaggaactggggttggccagtgtcagtctgcacgtgccagggaggggtcacaggatgaatgctatatccctcctttttgggaccgtgcagcaagatggacggatgtgggacatggtccacatcctcagtcagtccctcaggcctctgccccacacccacctgccccgcccccacccctccagcctttcaagggcttttagggttttgtggaagccactgtccctcagccctgtttcagtgcactggtgtaagcagacatgcttgtacatgcatgtgcacccacaagcacacctcaggcagaggatgccacctcagggactccagccttgcccgtggccccctcgatatcctctgatagccctctcggttgtcctggggggcttgccctctcccaacagcccgagctggccgaagttggcttccctagctggttccagaggttcctcggctcccccaggtgtctggggcttagtggcaacaggggcttagcctctgcagagacctagtgcgccgcctccttgccccagacctgcccgggcagagagccgtgtatgtgtcccagtgcacaggcgctgctgggccctgccaaaaggccacaagcccactgtcaccgttcacattgcttctcgcttcccggcccagccccgcccacacaggcatctgccttgaaagaggtgcaggaggtacaggcaggtgggggctccagtgagctctgaggaacagcagtggccgccatgggtggagcctatctttgttgccagtttcagtgttaaacactcttgcacgtgtgacatcattgagtcctaaagaccactctgctcagtgcatgccattgtttccttcagttacagaggagggaaccagagcccagaacatttagcctttgcctaaagtcactgggccaggaagtggtagaggtggggttcagcaggatttgcctgggaaccccaatattgaccacagtgccatgctgccctgcacggctccctggctgtgagttgtcctggcctctggcaccaccggtctgtctgggttcctatgtccctatgtcccacctgcagaatgtgacatgcagctctttgggccctggggtgaaatcgtgagcccctcgctgagtccagccacgagtaatgcagggggctgccggctcttcattaatgtggctccgcacgcacggattgccatccatgccctggccaccaacatgggcgctgggaccgagggagccaatgccagctacatcttggtgaggcccagcatggggacttgtgctgtgattctggacagctttccctagggcgtgcagggctaggggacccccttcagtttatttcagactaaaaccctcaaaatcattagtgaaagaatgggagaagatagcttcctccacatattcaccaagaaatgttttttgagctacctacaagagtgaaatagtggctcacaactgtaatcccagcactttgggaggcccaggagggcagatcactcaaggtcaggagttcgagaccagcctggccaacatgatgaaaccttgtctctactaaaaatagaaaaagtagccaggcatggtggcgtgtgcctgtaatcccagctacttgggaggctgaggcacaagaatcacttgaacccgggaggtggaggttgcactaagcccagatcgcaccactgcactccagcctgggcaacagagtgagactctgtctcaaaaaaaaaaaaaaaaaaaaagcgaaatggtaaagaatggtaaagacctttctgatgtagactgacagctaacccaagactgaagcataattttacagtctgatataacttggacagaatagcaccctgcaccctccccgaggtttcaagtgtcctgggagaactgtgttctgcagggtatcagcttccccagaggaggcagcctggccccgctctggcaccctgactgtgtgtccttggggaagtgatgtaacgtccctggacctcggttttctgggtagagtaatggcgtattcctagtagggctttgtaagcattaaatgtgatccggaatctgtgagcccttgcacacgaaggcttccgtgagtgctaattattacttgtggccggtccttctgggctgccccttttctctcagatccgggacacccacagcttgaggaccacagcgttccatgggcagcaggtgctctactgggagtcagagagcagccaggctgagatggagttcagcgagggcttcctgaaggctcaggccagcctgcggggccagtactggaccctccaatcatgggtaccggagatgcaggaccctcagtcctggaagggaaaggaaggaacctgagggtcattgaacatttgttccgtgtctggccagccctggagggttgacccctggtctcagtgctttccaattcgaactttttccaatcttaggtatctactttagagtcttctccaatgtccaaaaggctagggggttggaggtggggactctggaaaagcagcccccatttcctcgggtaccaataaataaaacatgcaggctga

SEQ ID NO: 10590 - DNA, 1074 bp, Homo sapiens
ggtgggcaaaggcatcttcctctgggaaggactggcacaagcacttggtccctgggttgtgtgcctgggaggccgggatcagggctggccctctttctccctggcaaagcaaaacctcccttttactactatcaaggggaagtaacttgaaggtgcctgtggcaggcagcaccttgagccaacaggaaccattgacatgcgaggcccagggcaggcagactgtgcagtggccattgggcggcccctcggggaggtggtgaccctccgcgtccttgagagttctctcaactgcagtgcgggggacatgttgctgctttggggccggctcacctggaggaagatgtgcaggaagctgttggacatgactttcagctccaagaccaacacgctggtggtgaggcagcgctgcgggcggccaggaggtggggtgctgctgcggtatgggagccagcttgctcctgaaaccttctacagagaatgtgacatgcagctctttgggccctggggtgaaatcgtgagcccctcgctgagtccagccacgagtaatgcagggggctgccggctcttcattaatgtggctccgcacgcacggattgccatccatgccctggccaccaacatgggcgctgggaccgagggagccaatgccagctacatcttgatccgggacacccacagcttgaggaccacagcgttccatgggcagcaggtgctctactgggagtcagagagcagccaggctgagatggagttcagcgagggcttcctgaaggctcaggccagcctgcggggccagtactggaccctccaatcatgggtaccggagatgcaggaccctcagtcctggaagggaaaggaaggaacctgagggtcattgaacatttgttccgtgtctggccagccctggagggttgacccctggtctcagtgctttccaattcgaactttttccaatcttaggtatctactttagagtcttctccaatgtccaaaaggctagggggttggaggtggggactctggaaaagcagcccccatttcctcgggtaccaataaataaaacatgcaggctga

SEQ ID NO: 10591 - DNA, 7587 bp, Homo sapiens
acactgcctaatcgtcccgcccagtagtgagcaggcctgtcccattccatactgaccagattcccagtcaccaaggccccctctcactccgctccactcctcgggctggctctcctgaggatgcaccagcgtcacccccgggcaagatgccctcccctctgtgtggccggaatccttgcctgtggctttctcctgggctgctggggaccctcccatttccagcaggtgggctcatttgcaggagcgggggtattctgggagcctctgggtggggtattctgagctacctggggcgaggggagtgccaaatagctgactacatcagctttggggtttgcgctgggcaggggagtctgtacttggggctttgggggatgaagtgtgctcactgaagagggagttggtgtctcagtacgacctgctcattcggtgaagctgaacagacagatactagtttgtcccaaactgtgtaggttgctcttctctgcctctcccttcctctccctgtctctgatttccccctctccttcttggttggcctcacccacctcctgcctcctgtctccctcttcatccatctctttttgttcttttttctttctctctctctctttttttttttttttttttttttaagacatggggtcttgttatgttgccccagctggtctcaaactcctggactcaagtgatcctcccacctcggtctccccaagtgttaggattacaggccagagccactatgcccggccccatccatctctttttgtcttgcagagttgtcttcaggctttggagccacaggccgtgtcttcttacttgagccctggtgctcccttaaaaggtacttgtcctggtgtcttctctcccggggggagtttctcaggactttcaaggggtatctcaccactgagtcagtggtctgggatttttggtggatctggaaggagaaggtcagagaagctgctgtcaaccctgttaattaactctgttacttcctgccaagttgatataagctggtctgggtgttccagccaggccagggttctcaccctagcttctgttaaatatcacaagggaacggtcaccgattggctggcccctcctgccccatggcctctgctgagctggctgattttcaggagctcttgtggtttctgaccgtggatgtaaatatttattccttctgtgggaaacaagataggtactggctcaggctacctcctaaggccatggatttccttatgataaaggcctgtccccattgcccacaggcccatgtctgtgaccttctccggtgcgagcccccttcccagtagggccattggcaacttgactaatggctgatgggggccagaggcaggtgggctagtggtcaggggcaacaggagggcaaggcccactttgtgacctggttctttgtggtctaggccagaggcacactgaccagtgcctggggccacgctgggggctggatgcagccgacgctgtctgggtatcccatagcctgggtccttccagcgctgccgctcctgaaaggctgggagatcattgcccagggtccctgaccctctaagggctcccttgggagaggacagtgagggctggcctgggcccctgcttcccaagagaccactgggctccactcgtgttcagtttcctgtcggggtccatgatgttacttgtgaaacacctgtgcccagagcagggtccaggaggcagggcaggggctttcccctttgggcagagccaccagggcagtgggaatcttgtcttgatggggtgacccaaagcacacaatagcccaacagctcctcctgggccctgccctttgcgtgcctagtcactaatggggtctggctcttggggtgggggtgacacgcaatgtcttgacttcggaaggccatccttccaagacctgccagcccctttcctgttagctttccactgcttgctctctagaaccatcgccctctgctctccctctccccctccaggccgccctccttcccctggcttccagaggcagaggcagaggcagaggcgggctgcaggcggcatcctacacctggagctgctggtggccgtgggccccgatgtcttccaggctcaccaggaggacacagagcgctatgtgctcaccaacctcaacatcgtgagtgccccacgctggactgtgcaggtccccacggccagggctggtgaccaatgtctgtgggctggtgtatctggtagtctgaatacagtgggttaaactcaggtagaatggctcggggttcttcctcttctccctccctcccctgggtggaggtgggtgaggtcccacaccctctctaggctccatggcacatgcacaccctgcagcctctcactactcaagtcccttcacctggggccaccctcaagcctggcctcttccccagtatccatttgacccccacaaagctcagctaaagcaaccctggcaaatgggatacgggctgctcacactgccctctgcaccccgaccctgccctctctccattctcttgtcccccgctcagagtggcgaggacaggtcacccgtctgaagtctaaacagagactgctggcaaaggagatgcccaccttcatttcttgctagcacctgaatccctgcagccccccttcacttgaaagctggggaagggcgggcagggaagcactcccccactagccgccgtctcagaaagacaaacaaggccaggcgcggtggctcatgcctataatcccagcactttgggaggccaaggcgggtggatcacccgaagtcaggagttcaagaccagcctggccaacatggtgaaaccccgtagctactaaaaatacaaaacttagctgggcatggtggcaggcgcctgtaatctgagaggagcctgcgatctgagaggagcagcgtttgaccggaatatccgactcgtgaccatctgtgtgctctcatccccttgctttggagtttgttttccttgcgttagttggccttcctgagccatgagctgaggagcaacagaggcacggctgactgtgcagcacattttaggagccccccgccccgcccggttcccacacatgctggtggagtagcctctccagctcttcacactccgggggcccctgggagtcagcagctgcctggggctggcaatgcccacccgacgggttacctctctcatctgcccttgcacagggggcagaactgcttcgggacccgtccctgggggctcagtttcgggtgcacctggtgaagatggtcattctgacagagcctgaggtaggcatggagctggaactcagcacaccatacagagcgggaagcccaagtcatcgcatctccatcctctttaacctcttgtcccggatgccccaagcagcatggatcacagaatgcattcagccagacagaccagctgccctcccagctctacccagcactcagcacaggctgcctgactacttctctgagcctcagttgtctcatccctaacacgggctagtcatagggttgttaggaggactaactgggaaacaaaccgaccgcagtcagcaccgtgcctggttggggtgtcctaaatgcaggctttgctgtgggtccgcagggtgctccaaatatcacagccaacctcacctcgtccctgctgagcgtctgtgggtggagccagaccatcaaccctgaggacgacacggatcctggccatgctgacctggtcctctatatcactaggtagccgagctttctgatgggtgctggccagccagcctgggaaggctgctccctcagcctcctgccctctgcaaaggtgaccccagggcaggcacgtgccttggcaccacccaagtgactgttttctctcaccgaggtttgacctggagttgcctgatggtaaccggcaggtgcggggcgtcacccagctgggcggtgcctgctccccaacctggagctgcctcattaccgaggacactggcttcgacctgggagtcaccattgcccatgagattgggcacaggtatgtagccccaccagctgtccccaggatctggcaaggagctgacctgggtacccagggtggaggtggtcttggcaagcagtgggtccttgtagagtttctccagaggagcctgtacccctcaccccgacagactcaggtgtgaggacaggggaacctgatactgtttgattaaaagaactttttttccaaaagacgagcaagacacctttagcaggtagaaaataacttctgtagaaaattcaggtaaagaaagagcaggctgtaaaaattatctcaaatcccaccatttagagataatgtctcttcacattttgtatttaatttcagtcttttctttacatacacacacatatttcttatttgcaaaattgggatttagtttggatccctgaaaaaaaggaaaattgtgattatgctgtgcattgctttgttacctgctatttctttttcttttcttttcttttttttttttgagatgaagtttcgctcttgttgcccaggctggagggcaatgacgtgatctcagctcattgcaacctccacctcctgggtgcaagtgattctcccacctcagcctcccaagtagctgggattacaggcatgtgccaccacgcccagctaattttgtatttttagtagagacagggtttctccatgttggtcaggctggtctcgaactcccaacctcaggtgatccacctgcctcggtctcccacagtgctgggattacaggcgtgagccactgcatccagcctttcttttttcttcctagggtaagtgcaggatttacctgttctttatgtaataatatatcccaaacattatcccaggtatcttagaggtgtgcaccgtaatttatttaatcagtcccctcttcttggatgtctaggttgtctgaacacgtcttcctgttgtgaatgttatgcattcttgtgggcaaaccttcactcttacctataaccatttacctagagtgatgggtttcttttcatttctttagttttttaagtatgaaaataatacccaattgttgtaaaaattcaaacagtgcagagatttctaaagtaaaaagtgaatttccacattccttgcccaccaacccccacccgacccctttcaacccctctgagcctgggagggttgaggcagggttcctgggtgtgggacaaggcagggctccttctccctcagagggagcatagttcccttctgctcctgtgatgcagaagacgtgagcccccaaactggggcttagcctgggagggttcttggcttcaccgaggaaagaattcaagagggagcaggtggtgttagacagcaactttgattgatgtggcagtgggcagagtgtacagccctgtgactgtatacagcacagcatagccccttttgaagccaggctaccccatagacactgtgcccaaaagagcagctcaaaggcagggctgcagtcctagttaatacccacttctaattatatgcaaattaaggggccagattatgcagaaatttctagaaaaagggcagtaacttctaggttttcgtcatggaaaaggggcagtaacttctgggttttgccatggcaatggcaaactggtatggcacactggtgggcgtgtcttatggaaaggggcttcccacccctccctgttttagctagtcctctggtccagtgtccaagcggggcctccagagtggagtccacctcctacctcaccggtgcctggcctctcccaccccattaggagtcctccatcagttccgctttgggtaaagcaagctctgttgtgacagtttggaaacggttcaccttcctggcctaggaatgcaaacaatggccaagggcaagcacgttttaactgaactttaaaatcgtgctttcctcacagtaggtgaatttcacgctcaacacatccatgtaaacagtccccagagcagcccttcaaggccccggccagtccccacctccccacagactcctaacaccatgatttaatgtggcttgcacatttttaaaggcttttgatatttattagcaaaagatgcgagagccaccctgctgggctagcgctcccttctgggggaaactgaggcagggcgcacgcgaccctctccactgcgcccagttagcagatggcggcgtcaggggtcgacccgggtcggaaaactcgctggcgctgcggcactagggcgccgggccgctgactcgccgacccccgtcccgcccccacccccgcccccgcccctgccggccgccttagcgcaactccccgccccccgaccagcttcggcctggagcacgacggcgcgcccggcagcggctgcggccccagcggacacgtgatggcttcggacggcgccgcgccccgcgccggcctcgcctggtccccctgcagccgccggcagctgctgagcctgctcaggtagcggccgccccgtgggaggggcgcgcgagcctccagccagcccgctgggccgccagcgccacctctctctacgtccgtccccactccgcattcagccctccttcctgtcccacccctccgtccaacccacccctccgtccaaccccgcgcccaccgctccgtccgtggaggggcgggcgcgcgagcctccagccagcccgctgggccgcccgcgccacccctccctacgtccgtccccacctctccctacgtccgtccccactccgcattcagccctccttcctgtcctacctctccatcctgacccactcctccgtccaaccccgcgcccacagctccgtcccatcccgctgcgcccactcctgcgcccacccctccgtcccaacccctgcacccacccccccgtcccacccacctgccccaccccctgcacctccccccgtgctgtcccactctgcggccacccttctgtccaacccctgcgcccaccgctccgttccaccccctccctgcgcccacccctgcgtcctccctcgcccccttgcgcccacactttcgttccagccaatctgggcacgcacccctccgtccatccccatcccgccccttgactccacatacactccctggttctctcccacttgcctacacccacccctgcatcctaccctcctccatccacccctccatctcagccccctgcacccaccccgttcctgggcccaccctgttcctgcacccaccccctcacttcacccccttacccttcgtctgcctccacccgcccctacccctccgtccactctccacgctccatcagtcccacacccctatctcccccacccgcgtacatgtatccctgcgtccccttcccgccgaccgcaccgctcccgggcctaacctgcatctgctccatcccactcagacccgtccctccgtcgccgctccctctgctggccacccacctctgcgccggcaggagccttagtcttggtcccagccaagagccggctcctggtggggggcgcgggccgagaactcctgttcccactcacaaaaggccacgcttccaaacgcttccatcctcgtgcccactcctccgtcccgcctcctcccggtgtacaccccgggactga

SEQ ID NO: 10592 - DNA, 1155 bp, Homo sapiens
acactgcctaatcgtcccgcccagtagtgagcaggcctgtcccattccatactgaccagattcccagtcaccaaggccccctctcactccgctccactcctcgggctggctctcctgaggatgcaccagcgtcacccccgggcaagatgccctcccctctgtgtggccggaatccttgcctgtggctttctcctgggctgctggggaccctcccatttccagcagagttgtcttcaggctttggagccacaggccgtgtcttcttacttgagccctggtgctcccttaaaaggccgccctccttcccctggcttccagaggcagaggcagaggcagaggcgggctgcaggcggcatcctacacctggagctgctggtggccgtgggccccgatgtcttccaggctcaccaggaggacacagagcgctatgtgctcaccaacctcaacatcggggcagaactgcttcgggacccgtccctgggggctcagtttcgggtgcacctggtgaagatggtcattctgacagagcctgagggtgctccaaatatcacagccaacctcacctcgtccctgctgagcgtctgtgggtggagccagaccatcaaccctgaggacgacacggatcctggccatgctgacctggtcctctatatcactaggtttgacctggagttgcctgatggtaaccggcaggtgcggggcgtcacccagctgggcggtgcctgctccccaacctggagctgcctcattaccgaggacactggcttcgacctgggagtcaccattgcccatgagattgggcacagcttcggcctggagcacgacggcgcgcccggcagcggctgcggccccagcggacacgtgatggcttcggacggcgccgcgccccgcgccggcctcgcctggtccccctgcagccgccggcagctgctgagcctgctcagacccgtccctccgtcgccgctccctctgctggccacccacctctgcgccggcaggagccttagtcttggtcccagccaagagccggctcctggtggggggcgcgggccgagaactcctgttcccactcacaaaaggccacgcttccaaacgcttccatcctcgtgcccactcctccgtcccgcctcctcccggtgtacaccccgggactga

SEQ ID NO: 10593 - DNA, 4330 bp, Homo sapiens
aaccacgatgtctttggcacagcctctcatctgtcagatgggagcggggaccccggagagggagtcagccgaggtcctggcattccttgtgaacccccgtctgtgggtttctggtccagtgtcccttctccagattagatggcttaggcctcctctaagggggtgggcgtgcacatccggagagctgtctggtgtgcaggactgggctgcaggttaccctgaactgcaaccatcttagagcaaggcccagcttgcagcaggaggagctgcaggccgcccaccctagccacggcccctgccctggcaggaagcttccaagagtaaacactgcctaatcgtcccgcccagtagtgagcaggcctgtcccattccatactgaccagattcccagtcaccaaggccccctctcactccgctccactcctcgggctggctctcctgaggatgcaccagcgtcacccccgggcaagatgccctcccctctgtgtggccggaatccttgcctgtggctttctcctgggctgctggggaccctcccatttccagcagagttgtcttcaggctttggagccacaggccgtgtcttcttacttgagccctggtgctcccttaaaaggccgccctccttcccctggcttccagaggcagaggcagaggcagaggcgggctgcaggcggcatcctacacctggagctgctggtggccgtgggccccgatgtcttccaggctcaccaggaggacacagagcgctatgtgctcaccaacctcaacatcggggcagaactgcttcgggacccgtccctgggggctcagtttcgggtgcacctggtgaagatggtcattctgacagagcctgagggtgctccaaatatcacagccaacctcacctcgtccctgctgagcgtctgtgggtggagccagaccatcaaccctgaggacgacacggatcctggccatgctgacctggtcctctatatcactaggtttgacctggagttgcctgatggtaaccggcaggtgcggggcgtcacccagctgggcggtgcctgctccccaacctggagctgcctcattaccgaggacactggcttcgacctgggagtcaccattgcccatgagattgggcacagcttcggcctggagcacgacggcgcgcccggcagcggctgcggccccagcggacacgtgatggcttcggacggcgccgcgccccgcgccggcctcgcctggtccccctgcagccgccggcagctgctgagcctgctcagcgcaggacgggcgcgctgcgtgtgggacccgccgcggcctcaacccgggtccgcggggcacccgccggatgcgcagcctggcctctactacagcgccaacgagcagtgccgcgtggccttcggccccaaggctgtcgcctgcaccttcgccagggagcacctggatatgtgccaggccctctcctgccacacagacccgctggaccaaagcagctgcagccgcctcctcgttcctctcctggatgggacagaatgtggcgtggagaagtggtgctccaagggtcgctgccgctccctggtggagctgacccccatagcagcagtgcatgggcgctggtctagctggggtccccgaagtccttgctcccgctcctgcggaggaggtgtggtcaccaggaggcggcagtgcaacaaccccagacctgcctttggggggcgtgcatgtgttggtgctgacctccaggccgagatgtgcaacactcaggcctgcgagaagacccagctggagttcatgtcgcaacagtgcgccaggaccgacggccagccgctgcgctcctcccctggcggcgcctccttctaccactggggtgctgctgtaccacacagccaaggggatgctctgtgcagacacatgtgccgggccattggcgagagcttcatcatgaagcgtggagacagcttcctcgatgggacccggtgtatgccaagtggcccccgggaggacgggaccctgagcctgtgtgtgtcgggcagctgcaggacatttggctgtgatggtaggatggactcccagcaggtatgggacaggtgccaggtgtgtggtggggacaacagcacgtgcagcccacggaagggctctttcacagctggcagagcgagagaatatgtcacgtttctgacagttacccccaacctgaccagtgtctacattgccaaccacaggcctctcttcacacacttggcggtgaggatcggagggcgctatgtcgtggctgggaagatgagcatctcccctaacaccacctacccctccctcctggaggatggtcgtgtcgagtacagagtggccctcaccgaggaccggctgccccgcctggaggagatccgcatctggggacccctccaggaagatgctgacatccaggtgggaggtgtcagagcccagctcatgcacatcagctggtggagcaggcctggccttggagaacgagacctgtgtgccaggggcagatggcctggaggctccagtgactgaggggcctggctccgtagatgagaagctgcctgcccctgagccctgtgtcgggatgtcatgtcctccaggctggggccatctggatgccacctctgcaggggagaaggctccctccccatggggcagcatcaggacgggggctcaagctgcacacgtgtggacccctgcggcagggtcgtgctccgtctcctgcgggcgaggtctgatggagctgcgtttcctgtgcatggactctgccctcagggtgcctgtccaggaagagctgtgtggcctggcaagcaagcctgggagccggcgggaggtctgccaggctgtcccgtgccctgctcggtggcagtacaagctggcggcctgcagcgtgagctgtgggagaggggtcgtgcggaggatcctgtattgtgcccgggcccatggggaggacgatggtgaggagatcctgttggacacccagtgccaggggctgcctcgcccggaaccccaggaggcctgcagcctggagccctgcccacctaggtggaaagtcatgtcccttggcccatgttcggccagctgtggccttggcactgctagacgctcggtggcctgtgtgcagctcgaccaaggccaggacgtggaggtggacgaggcggcctgtgcggcgctggtgcggcccgaggccagtgtcccctgtctcattgccgactgcacctaccgctggcatgttggcacctggatggagtgctctgtttcctgtggggatggcatccagcgccggcgtgacacctgcctcggaccccaggcccaggcgcctgtgccagctgatttctgccagcacttgcccaagccggtgactgtgcgtggctgctgggctgggccctgtgtgggacagggtgcctgtggcaggcagcaccttgagccaacaggaaccattgacatgcgaggcccagggcaggcagactgtgcagtggccattgggcggcccctcggggaggtggtgaccctccgcgtccttgagagttctctcaactgcagtgcgggggacatgttgctgctttggggccggctcacctggaggaagatgtgcaggaagctgttggacatgactttcagctccaagaccaacacgctggtggtgaggcagcgctgcgggcggccaggaggtggggtgctgctgcggtatgggagccagcttgctcctgaaaccttctacagagaatgtgacatgcagctctttgggccctggggtgaaatcgtgagcccctcgctgagtccagccacgagtaatgcagggggctgccggctcttcattaatgtggctccgcacgcacggattgccatccatgccctggccaccaacatgggcgctgggaccgagggagccaatgccagctacatcttgatccgggacacccacagcttgaggaccacagcgttccatgggcagcaggtgctctactgggagtcagagagcagccaggctgagatggagttcagcgagggcttcctgaaggctcaggccagcctgcggggccagtactggaccctccaatcatgggtaccggagatgcaggaccctcagtcctggaagggaaaggaaggaacctgagggtcattgaacatttgttccgtgtctggccagccctggagggttgacccctggtctcagtgctttccaattcgaactttttccaatcttaggtatctactttagagtcttctccaatgtccaaaaggctagggggttggaggtggggactctggaaaagcagcccccatttcctcgggtaccaataaataaaacatgcaggctgaccggcgtttttttctt

SEQ ID NO: 10594 - DNA, 4934 bp, Homo sapiens
aaccacgatgtctttggcacagcctctcatctgtcagatgggagcggggaccccggagagggagtcagccgaggtcctggcattccttgtgaacccccgtctgtgggtttctggtccagtgtcccttctccagattagatggcttaggcctcctctaagggggtgggcgtgcacatccggagagctgtctggtgtgcaggactgggctgcaggttaccctgaactgcaaccatcttagagcaaggcccagcttgcagcaggaggagctgcaggccgcccaccctagccacggcccctgccctggcaggaagcttccaagagtaaacactgcctaatcgtcccgcccagtagtgagcaggcctgtcccattccatactgaccagattcccagtcaccaaggccccctctcactccgctccactcctcgggctggctctcctgaggatgcaccagcgtcacccccgggcaagatgccctcccctctgtgtggccggaatccttgcctgtggctttctcctgggctgctggggaccctcccatttccagcagagttgtcttcaggctttggagccacaggccgtgtcttcttacttgagccctggtgctcccttaaaaggccgccctccttcccctggcttccagaggcagaggcagaggcagaggcgggctgcaggcggcatcctacacctggagctgctggtggccgtgggccccgatgtcttccaggctcaccaggaggacacagagcgctatgtgctcaccaacctcaacatcggggcagaactgcttcgggacccgtccctgggggctcagtttcgggtgcacctggtgaagatggtcattctgacagagcctgagggtgctccaaatatcacagccaacctcacctcgtccctgctgagcgtctgtgggtggagccagaccatcaaccctgaggacgacacggatcctggccatgctgacctggtcctctatatcactaggtttgacctggagttgcctgatggtaaccggcaggtgcggggcgtcacccagctgggcggtgcctgctccccaacctggagctgcctcattaccgaggacactggcttcgacctgggagtcaccattgcccatgagattgggcacagcttcggcctggagcacgacggcgcgcccggcagcggctgcggccccagcggacacgtgatggcttcggacggcgccgcgccccgcgccggcctcgcctggtccccctgcagccgccggcagctgctgagcctgctcagcgcaggacgggcgcgctgcgtgtgggacccgccgcggcctcaacccgggtccgcggggcacccgccggatgcgcagcctggcctctactacagcgccaacgagcagtgccgcgtggccttcggccccaaggctgtcgcctgcaccttcgccagggagcacctggatatgtgccaggccctctcctgccacacagacccgctggaccaaagcagctgcagccgcctcctcgttcctctcctggatgggacagaatgtggcgtggagaagtggtgctccaagggtcgctgccgctccctggtggagctgacccccatagcagcagtgcatgggcgctggtctagctggggtccccgaagtccttgctcccgctcctgcggaggaggtgtggtcaccaggaggcggcagtgcaacaaccccagacctgcctttggggggcgtgcatgtgttggtgctgacctccaggccgagatgtgcaacactcaggcctgcgagaagacccagctggagttcatgtcgcaacagtgcgccaggaccgacggccagccgctgcgctcctcccctggcggcgcctccttctaccactggggtgctgctgtaccacacagccaaggggatgctctgtgcagacacatgtgccgggccattggcgagagcttcatcatgaagcgtggagacagcttcctcgatgggacccggtgtatgccaagtggcccccgggaggacgggaccctgagcctgtgtgtgtcgggcagctgcaggacatttggctgtgatggtaggatggactcccagcaggtatgggacaggtgccaggtgtgtggtggggacaacagcacgtgcagcccacggaagggctctttcacagctggcagagcgagagaatatgtcacgtttctgacagttacccccaacctgaccagtgtctacattgccaaccacaggcctctcttcacacacttggcggtgaggatcggagggcgctatgtcgtggctgggaagatgagcatctcccctaacaccacctacccctccctcctggaggatggtcgtgtcgagtacagagtggccctcaccgaggaccggctgccccgcctggaggagatccgcatctggggacccctccaggaagatgctgacatccaggtttacaggcggtatggcgaggagtatggcaacctcacccgcccagacatcaccttcacctacttccagcctaagccacggcaggcctgggtgtgggccgctgtgcgtgggccctgctcggtgagctgtggggcagggctgcgctgggtaaactacagctgcctggaccaggccaggaaggagttggtggagactgtccagtgccaagggagccagcagccaccagcgtggccagaggcctgcgtgctcgaaccctgccctccctactgggcggtgggagacttcggcccatgcagcgcctcctgtgggggtggcctgcgggagcggccagtgcgctgcgtggaggcccagggcagcctcctgaagacattgcccccagcccggtgcagagcaggggcccagcagccagctgtggcgctggaaacctgcaacccccagccctgccctgccaggtgggaggtgtcagagcccagctcatgcacatcagctggtggagcaggcctggccttggagaacgagacctgtgtgccaggggcagatggcctggaggctccagtgactgaggggcctggctccgtagatgagaagctgcctgcccctgagccctgtgtcgggatgtcatgtcctccaggctggggccatctggatgccacctctgcaggggagaaggctccctccccatggggcagcatcaggacgggggctcaagctgcacacgtgtggacccctgcggcagggtcgtgctccgtctcctgcgggcgaggtctgatggagctgcgtttcctgtgcatggactctgccctcagggtgcctgtccaggaagagctgtgtggcctggcaagcaagcctgggagccggcgggaggtctgccaggctgtcccgtgccctgctcggtggcagtacaagctggcggcctgcagcgtgagctgtgggagaggggtcgtgcggaggatcctgtattgtgcccgggcccatggggaggacgatggtgaggagatcctgttggacacccagtgccaggggctgcctcgcccggaaccccaggaggcctgcagcctggagccctgcccacctaggtggaaagtcatgtcccttggcccatgttcggccagctgtggccttggcactgctagacgctcggtggcctgtgtgcagctcgaccaaggccaggacgtggaggtggacgaggcggcctgtgcggcgctggtgcggcccgaggccagtgtcccctgtctcattgccgactgcacctaccgctggcatgttggcacctggatggagtgctctgtttcctgtggggatggcatccagcgccggcgtgacacctgcctcggaccccaggcccaggcgcctgtgccagctgatttctgccagcacttgcccaagccggtgactgtgcgtggctgctgggctgggccctgtgtgggacagggtacgcccagcctggtgccccacgaagaagccgctgctccaggacggaccacagccacccctgctggtgcctccctggagtggtcccaggcccggggcctgctcttctccccggctccccagcctcggcggctcctgcccgggccccaggaaaactcagtgcagtccagtgcctgtggcaggcagcaccttgagccaacaggaaccattgacatgcgaggcccagggcaggcagactgtgcagtggccattgggcggcccctcggggaggtggtgaccctccgcgtccttgagagttctctcaactgcagtgcgggggacatgttgctgctttggggccggctcacctggaggaagatgtgcaggaagctgttggacatgactttcagctccaagaccaacacgctggtggtgaggcagcgctgcgggcggccaggaggtggggtgctgctgcggtatgggagccagcttgctcctgaaaccttctacagagaatgtgacatgcagctctttgggccctggggtgaaatcgtgagcccctcgctgagtccagccacgagtaatgcagggggctgccggctcttcattaatgtggctccgcacgcacggattgccatccatgccctggccaccaacatgggcgctgggaccgagggagccaatgccagctacatcttgatccgggacacccacagcttgaggaccacagcgttccatgggcagcaggtgctctactgggagtcagagagcagccaggctgagatggagttcagcgagggcttcctgaaggctcaggccagcctgcggggccagtactggaccctccaatcatgggtaccggagatgcaggaccctcagtcctggaagggaaaggaaggaacctgagggtcattgaacatttgttccgtgtctggccagccctggagggttgacccctggtctcagtgctttccaattcgaactttttccaatcttaggtatctactttagagtcttctccaatgtccaaaaggctagggggttggaggtggggactctggaaaagcagcccccatttcctcgggtaccaataaataaaacatgcaggctga

SEQ ID NO: 10595 - DNA, 26285 bp, Homo sapiens
cactgcctaatcgtcccgcccagtagtgagcaggcctgtcccattccatactgaccagattcccagtcaccaaggccccctctcactccgctccactcctcgggctggctctcctgaggatgcaccagcgtcacccccgggcaagatgccctcccctctgtgtggccggaatccttgcctgtggctttctcctgggctgctggggaccctcccatttccagcaggtgggctcatttgcaggagcgggggtattctgggagcctctgggtggggtattctgagctacctggggcgaggggagtgccaaatagctgactacatcagctttggggtttgcgctgggcaggggagtctgtacttggggctttgggggatgaagtgtgctcactgaagagggagttggtgtctcagtacgacctgctcattcggtgaagctgaacagacagatactagtttgtcccaaactgtgtaggttgctcttctctgcctctcccttcctctccctgtctctgatttccccctctccttcttggttggcctcacccacctcctgcctcctgtctccctcttcatccatctctttttgttcttttttctttctctctctctctttttttttttttttttttttttaagacatggggtcttgttatgttgccccagctggtctcaaactcctggactcaagtgatcctcccacctcggtctccccaagtgttaggattacaggccagagccactatgcccggccccatccatctctttttgtcttgcagagttgtcttcaggctttggagccacaggccgtgtcttcttacttgagccctggtgctcccttaaaaggtacttgtcctggtgtcttctctcccggggggagtttctcaggactttcaaggggtatctcaccactgagtcagtggtctgggatttttggtggatctggaaggagaaggtcagagaagctgctgtcaaccctgttaattaactctgttacttcctgccaagttgatataagctggtctgggtgttccagccaggccagggttctcaccctagcttctgttaaatatcacaagggaacggtcaccgattggctggcccctcctgccccatggcctctgctgagctggctgattttcaggagctcttgtggtttctgaccgtggatgtaaatatttattccttctgtgggaaacaagataggtactggctcaggctacctcctaaggccatggatttccttatgataaaggcctgtccccattgcccacaggcccatgtctgtgaccttctccggtgcgagcccccttcccagtagggccattggcaacttgactaatggctgatgggggccagaggcaggtgggctagtggtcaggggcaacaggagggcaaggcccactttgtgacctggttctttgtggtctaggccagaggcacactgaccagtgcctggggccacgctgggggctggatgcagccgacgctgtctgggtatcccatagcctgggtccttccagcgctgccgctcctgaaaggctgggagatcattgcccagggtccctgaccctctaagggctcccttgggagaggacagtgagggctggcctgggcccctgcttcccaagagaccactgggctccactcgtgttcagtttcctgtcggggtccatgatgttacttgtgaaacacctgtgcccagagcagggtccaggaggcagggcaggggctttcccctttgggcagagccaccagggcagtgggaatcttgtcttgatggggtgacccaaagcacacaatagcccaacagctcctcctgggccctgccctttgcgtgcctagtcactaatggggtctggctcttggggtgggggtgacacgcaatgtcttgacttcggaaggccatccttccaagacctgccagcccctttcctgttagctttccactgcttgctctctagaaccatcgccctctgctctccctctccccctccaggccgccctccttcccctggcttccagaggcagaggcagaggcagaggcgggctgcaggcggcatcctacacctggagctgctggtggccgtgggccccgatgtcttccaggctcaccaggaggacacagagcgctatgtgctcaccaacctcaacatcgtgagtgccccacgctggactgtgcaggtccccacggccagggctggtgaccaatgtctgtgggctggtgtatctggtagtctgaatacagtgggttaaactcaggtagaatggctcggggttcttcctcttctccctccctcccctgggtggaggtgggtgaggtcccacaccctctctaggctccatggcacatgcacaccctgcagcctctcactactcaagtcccttcacctggggccaccctcaagcctggcctcttccccagtatccatttgacccccacaaagctcagctaaagcaaccctggcaaatgggatacgggctgctcacactgccctctgcaccccgaccctgccctctctccattctcttgtcccccgctcagagtggcgaggacaggtcacccgtctgaagtctaaacagagactgctggcaaaggagatgcccaccttcatttcttgctagcacctgaatccctgcagccccccttcacttgaaagctggggaagggcgggcagggaagcactcccccactagccgccgtctcagaaagacaaacaaggccaggcgcggtggctcatgcctataatcccagcactttgggaggccaaggcgggtggatcacccgaagtcaggagttcaagaccagcctggccaacatggtgaaaccccgtagctactaaaaatacaaaacttagctgggcatggtggcaggcgcctgtaatctgagaggagcctgcgatctgagaggagcagcgtttgaccggaatatccgactcgtgaccatctgtgtgctctcatccccttgctttggagtttgttttccttgcgttagttggccttcctgagccatgagctgaggagcaacagaggcacggctgactgtgcagcacattttaggagccccccgccccgcccggttcccacacatgctggtggagtagcctctccagctcttcacactccgggggcccctgggagtcagcagctgcctggggctggcaatgcccacccgacgggttacctctctcatctgcccttgcacagggggcagaactgcttcgggacccgtccctgggggctcagtttcgggtgcacctggtgaagatggtcattctgacagagcctgaggtaggcatggagctggaactcagcacaccatacagagcgggaagcccaagtcatcgcatctccatcctctttaacctcttgtcccggatgccccaagcagcatggatcacagaatgcattcagccagacagaccagctgccctcccagctctacccagcactcagcacaggctgcctgactacttctctgagcctcagttgtctcatccctaacacgggctagtcatagggttgttaggaggactaactgggaaacaaaccgaccgcagtcagcaccgtgcctggttggggtgtcctaaatgcaggctttgctgtgggtccgcagggtgctccaaatatcacagccaacctcacctcgtccctgctgagcgtctgtgggtggagccagaccatcaaccctgaggacgacacggatcctggccatgctgacctggtcctctatatcactaggtagccgagctttctgatgggtgctggccagccagcctgggaaggctgctccctcagcctcctgccctctgcaaaggtgaccccagggcaggcacgtgccttggcaccacccaagtgactgttttctctcaccgaggtttgacctggagttgcctgatggtaaccggcaggtgcggggcgtcacccagctgggcggtgcctgctccccaacctggagctgcctcattaccgaggacactggcttcgacctgggagtcaccattgcccatgagattgggcacaggtatgtagccccaccagctgtccccaggatctggcaaggagctgacctgggtacccagggtggaggtggtcttggcaagcagtgggtccttgtagagtttctccagaggagcctgtacccctcaccccgacagactcaggtgtgaggacaggggaacctgatactgtttgattaaaagaactttttttccaaaagacgagcaagacacctttagcaggtagaaaataacttctgtagaaaattcaggtaaagaaagagcaggctgtaaaaattatctcaaatcccaccatttagagataatgtctcttcacattttgtatttaatttcagtcttttctttacatacacacacatatttcttatttgcaaaattgggatttagtttggatccctgaaaaaaaggaaaattgtgattatgctgtgcattgctttgttacctgctatttctttttcttttcttttcttttttttttttgagatgaagtttcgctcttgttgcccaggctggagggcaatgacgtgatctcagctcattgcaacctccacctcctgggtgcaagtgattctcccacctcagcctcccaagtagctgggattacaggcatgtgccaccacgcccagctaattttgtatttttagtagagacagggtttctccatgttggtcaggctggtctcgaactcccaacctcaggtgatccacctgcctcggtctcccacagtgctgggattacaggcgtgagccactgcatccagcctttcttttttcttcctagggtaagtgcaggatttacctgttctttatgtaataatatatcccaaacattatcccaggtatcttagaggtgtgcaccgtaatttatttaatcagtcccctcttcttggatgtctaggttgtctgaacacgtcttcctgttgtgaatgttatgcattcttgtgggcaaaccttcactcttacctataaccatttacctagagtgatgggtttcttttcatttctttagttttttaagtatgaaaataatacccaattgttgtaaaaattcaaacagtgcagagatttctaaagtaaaaagtgaatttccacattccttgcccaccaacccccacccgacccctttcaacccctctgagcctgggagggttgaggcagggttcctgggtgtgggacaaggcagggctccttctccctcagagggagcatagttcccttctgctcctgtgatgcagaagacgtgagcccccaaactggggcttagcctgggagggttcttggcttcaccgaggaaagaattcaagagggagcaggtggtgttagacagcaactttgattgatgtggcagtgggcagagtgtacagccctgtgactgtatacagcacagcatagccccttttgaagccaggctaccccatagacactgtgcccaaaagagcagctcaaaggcagggctgcagtcctagttaatacccacttctaattatatgcaaattaaggggccagattatgcagaaatttctagaaaaagggcagtaacttctaggttttcgtcatggaaaaggggcagtaacttctgggttttgccatggcaatggcaaactggtatggcacactggtgggcgtgtcttatggaaaggggcttcccacccctccctgttttagctagtcctctggtccagtgtccaagcggggcctccagagtggagtccacctcctacctcaccggtgcctggcctctcccaccccattaggagtcctccatcagttccgctttgggtaaagcaagctctgttgtgacagtttggaaacggttcaccttcctggcctaggaatgcaaacaatggccaagggcaagcacgttttaactgaactttaaaatcgtgctttcctcacagtaggtgaatttcacgctcaacacatccatgtaaacagtccccagagcagcccttcaaggccccggccagtccccacctccccacagactcctaacaccatgatttaatgtggcttgcacatttttaaaggcttttgatatttattagcaaaagatgcgagagccaccctgctgggctagcgctcccttctgggggaaactgaggcagggcgcacgcgaccctctccactgcgcccagttagcagatggcggcgtcaggggtcgacccgggtcggaaaactcgctggcgctgcggcactagggcgccgggccgctgactcgccgacccccgtcccgcccccacccccgcccccgcccctgccggccgccttagcgcaactccccgccccccgaccagcttcggcctggagcacgacggcgcgcccggcagcggctgcggccccagcggacacgtgatggcttcggacggcgccgcgccccgcgccggcctcgcctggtccccctgcagccgccggcagctgctgagcctgctcaggtagcggccgccccgtgggaggggcgcgcgagcctccagccagcccgctgggccgccagcgccacctctctctacgtccgtccccactccgcattcagccctccttcctgtcccacccctccgtccaacccacccctccgtccaaccccgcgcccaccgctccgtccgtggaggggcgggcgcgcgagcctccagccagcccgctgggccgcccgcgccacccctccctacgtccgtccccacctctccctacgtccgtccccactccgcattcagccctccttcctgtcctacctctccatcctgacccactcctccgtccaaccccgcgcccacagctccgtcccatcccgctgcgcccactcctgcgcccacccctccgtcccaacccctgcacccacccccccgtcccacccacctgccccaccccctgcacctccccccgtgctgtcccactctgcggccacccttctgtccaacccctgcgcccaccgctccgttccaccccctccctgcgcccacccctgcgtcctccctcgcccccttgcgcccacactttcgttccagccaatctgggcacgcacccctccgtccatccccatcccgccccttgactccacatacactccctggttctctcccacttgcctacacccacccctgcatcctaccctcctccatccacccctccatctcagccccctgcacccaccccgttcctgggcccaccctgttcctgcacccaccccctcacttcacccccttacccttcgtctgcctccacccgcccctacccctccgtccactctccacgctccatcagtcccacacccctatctcccccacccgcgtacatgtatccctgcgtccccttcccgccgaccgcaccgctcccgggcctaacctgcatctgctccatcccactcagacccgtccctccgtcgccgctccctctgctggccacccacctctgcgccggcaggagccttagtcttggtcccagccaagagccggctcctggtggggggcgcgggccgagaactcctgttcccactcacaaaaggccacgcttccaaacgcttccatcctcgtgcccactcctccgtcccgcctcctcccggtgtacaccccgggactgagccgggcctgagccgggccttgtcgcagcgcaggacgggcgcgctgcgtgtgggacccgccgcggcctcaacccgggtccgcggggcacccgccggatgcgcagcctggcctctactacagcgccaacgagcagtgccgcgtggccttcggccccaaggctgtcgcctgcaccttcgccagggagcacctggtgagtctgccggcggtggcctgggattggctgtgaggtccctccgcatcacccagctcacgtcccccaaaacgtgcatggtgagaacctgctgggtgccgtgctaggctgaggtactaagccagggcggcttagtttaatgctgtctgtgccctctagaaattatttaaaatgtttgaacaaaagctccaacatttttgtttgactgggccccacaaattatgtagctagtcctgggagggcccctgtgcccaaggactcctggctgagtgaggacaccaatcttaaacagttaccaaggacttccccatctattgtggctggagtcagactggagggcttcctggaggaagtggcctctaaactgaacccacagcagaagtggggctggtagggggaggggagatgaaggagagcaggcaccccaaaagacagacttcctcgcaggattgcataggacattcatgggctccaggcacttttgccttgatgggccccttcctccacaaaaaaattgagaattatgttttaatattcttatacaatgtataaagttttatgtgttactataaatacaagtctttttttttcctatttttttttttttttgagacagagtctccctctctgctcactgcaggctccgcctgccagattcacaccattctcctgcctcagcctcccgagtagctgggactacaggcgcccgccaccacgcctggctaattttttgtatttttagtagagacggggtttcactgtgttagccaggatggtctcgatctcctgacctcgtgatccgcccgccctggcctcacaaagtgctgggattacaggcatgagccacagcgccccgccaagtctttttttttaaattcttttgagacagggcctcgttctgttgcccagggtggagtgcagtagcacaatcatagctcactgttgcctcaacttcttgggcacaaacgatcctcccacctcggccttggagtagctgggactacaggcacatgccacaatgcccagctaatttttaaattttttgtagagatggggtctccctttgttacccaggcttgtctaggactcctggcttcaagccatcctcccaccttggcgtcccaaagcactgggattacagacatgagccaccacccacgcctgatcagcaaatctattaatattatatattacaacattaattttgacctggaagttcattttttcatttttttttttttttgagacagagtctcactctgtcacccaggctggagtgcagtggcacaatcttggcttactgcaacctccgcctcccaggttcaagtgattcccgggcctacgcctcccgagtagctgggactacaggcatgtgccaccatgcccagctaagttttgtattttttagtagagacagggtttcatcatgttggccgggctggtctcgaattctgacctcaggtgatccgcccgccttggcctcccaaagtgctgggattacaggataagccaccacacccagcctagttcatttttttcttctgattttattttatttatttatttattttgagacggagtctcgctctgtcacccaggctggaatgcagtggctcaatcttggctcactgcaagctctgccttcagggttcaagccattctcctgcatcagcctcccgaatagctgggactacaggtgcctgccaccacacccggctaattttttgtatttttagtagagatggggtttcactgtgttagccaggatggtctcgctctcctgacctcgtgatttgcccgcctcggccttccaaattgctgggattacaggcgtgagccacagtgcccggcctttttccttctgattttaaaagaaattaggccaggtgtggtggctcacgcctgtaatcccagcactttgggaagccaaggcaggcggatcacctgaggtcgggagtttgagaccagcctgaccaacatggagaaatgccatctgtgctaaaaatacaaaaaattagccgggcgtggtggcgcatgcctgtaatcccagctactcggaaggctgaggtaggagaattgcttgaacccaggaggcagaggttgaggtgagccaagatcgcgccattgccctccagcctgggcaacaagagcgaaactgtctcaaaaaaaaacaagaaagaaaaataaattaaaacatttgcctcttgagcttcaagtcagtgacaagttaagaaggaaaaaaagaaaaaagacacaaaaaacacatttccatgggcccccaaaagtgtgacaggacctggtcatggtcccggttccccatcgatgggtcagtcatgccttgtcctctgagggcaccagtgcccacggtgcagagtgttggctgtgtcagtgtgtcctgcagtctgggagggacagttaaggttggacactggcctggaaggccctggtggcccctgagctcgccacccacctgtccaccctcctaggatatgtgccaggccctctcctgccacacagacccgctggaccaaagcagctgcagccgcctcctcgttcctctcctggatgggacagaatgtggcgtggagaaggtcagagccaagagtgaatgagtgggctcctgtgagcacgtgcacgtgggtgcctccagccaggccgccctattcctaggtcaggaggcaggaccagtatggggcagagagtcttggagttggccttggggactgtcctttgggttggtggtctgacctctttcctttagcatttgctcccatgcagaatgggaatgtgggctgcctgttgtatggggggtgcccatgggtgtggggttcctttgggtggggtccctgtgtgaaggtccttgtggatatggggtgtctcgggggggatccctgtgtaaggggtccctgtgagtgtagagtccctgtgggtggggtccttatgtgtgtgttggaggatccctgtgtgttgaggggtccctggggggttctgtgtgtatgttggggggtctctgggtgttggaggatccctgtgggtctgggggatccatgtggctggggtacctgtgtgttggggggtctctgtgtgtgttggagatccctgtgtgttgggggatccctatgggtgagttccttgtgtgtgtttgggggtcgctgtgggtggggtccctgtgtgtgttggggatccctgaggatgttgggggactctctgtgtgtgttgggagtcctgtggtggggtcactgtgggatgggagatgaagccatccttgccttgcagtggtgctccaagggtcgctgccgctccctggtggagctgacccccatagcagcagtgcatgggcgctggtctagctggggtccccgaagtccttgctcccgctcctgcggaggaggtgtggtcaccaggaggcggcagtgcaacaaccccaggtaccgcagggagggtgcttttctgtcagggagtgtggccataccatagtccctagttgaaggcagtggtcaccctgctctctcaccctcctgtctgctgggcattttcagacctgcctttggggggcgtgcatgtgttggtgctgacctccaggccgagatgtgcaacactcaggtaggcctgcttcctggggtaggagggggcagctggtggcaccgggccctgggggagccaaagtgaccatctgtggttcacaccaggacacatttgagaaggacattggggccaggtgaggtggcttatgcctgtaatcccagcactttgggaggccaaggcaggtggatcacctgaggtcaggggttcaagaccagcctggccaacatggtgaaatctcgtctctacagaaaatacaaaaattagccgggcgtggtggtgggcgcctgtagtcccagctactcgggaagctgaggcaggagaatcacttgaacccaggaggtagagcttgcagtgagccgagattgggccattgcactccagcctgggcgacagagtgagactctgtctcaaaaaaaaaataaaaattaaaaaagagagagaaggacattgggaccccagttcataaaccaggccagtcctgctgatgcccacagagcccctgaagcgtcccgcctccctccctgagtgccactttgccctccagagcgcatctctgcagggagaacctccccactaggaatacagtgcgctgctgcatgcctgcaaaggaattttttaaatattatttttatttttttagacagagtctctccctgtcacccagactggagtgcagtggtgctatctcagctcactgcaacctctgcctcccaggttcaagcgattctcctgcctcagtctcctgagtagctgggactacaggtgcccgccaccacgcccggctaattttttgtatttttagtagaggaggggtttcaccgtgttagccaggatggccttgatctcctgacctcgtgatccgcctgcctcggcctcccaaagtgctgggattacaggtgtcactgcgcctggccgaaggagtcttttatttataaattgaggtgacattcatgtagcatgaaatcaagcattttaaagtggcaactcagtggcctttagtacactcacaaggttgggcaagtactgcctctgtctagtttcagaacgtttccagtactctggagtactctggagtgaaccccatatggtaggctgtcactccccatttctcctccgccactcagcggccattggtttcccttctgtctctgtggattgacctgttctagacatgccacgtacctgaggccagacaacaggtgtgcttcctgcctgccttcctcccccagcggcacgtccccaaggctcacctgtgttgtagcctgtgtcagcgcctcattcctctttctggctgaatcatattccactgcagggatagaccacattttcatccagtcgtctgctgatggacatctgaggtgttttcaccttttggctcctgtgaacagagccgctgcgaatgtgcttgtacatgtttgaatccctgttttcaattcttttggcagtatgctgaagagcggagttactggatcgtatgggaattgtatgtttgacttttttttttcttttttttttttttgagacagagtcttgctctgtcgccaggctggagtgcagtggtgcaatctcagctccctgcaaccttcgcctcctgggttcaagcgattcccctgcctcaccttccggagtagctgggattacaggcacgcgccaccatgcctggctaattttttgtatttttagtagagatggagtttccaccacgtcagccaggatggtctggatctcctgacctcaggtgatctgcccgccttggcctcccaaactgttgggattacaggcatgagccaccgctcccggcctatgtttgactttttttttttcttatttttttctttctttctttatttttttttttttagagatggagtctcgctctgtcgcccaagctggagtgcggtggcgcgatctcggctcactctaagctccgcctcccaggttcaccccattctcctgcctcagcttcccgaatagctgggactacagacgcccgccaccacgcccggctaatttttttttgtatttttagtagaggcggggtttcaccatgttagccgggatggtcttgatctcctgacctcgtgatctgcctgcctcggcctcccaaagggctgagatcacaggcgtgagccaccgcgcccagcatgtttggcttttaaagaaactgccaaaccgttttccacagtgcctgaactgtttcacattcccaccagcattgcgccagggttccagtttccccacatccgctgcagcacttgctgttttctgttgttgttttttcttttctcttcttttttttttttttttttttaatagagatggggttttgtcatgttggccaggctggtcttgaactccgaccccaggtgatccgcccaccttagcctcccaaagtgctgggattacacgcgtgagccatggcgcccggcctgttttctgttttttgattttggccatctcggtggtatgaaatggtagaaagattctttttacattgagttaaattctatctcctgcttcgatggccctgggtgtgggtttgtccctggctgtattacagttctgcatgtggtgagaccctccctttcctccttctccaaatggaccaccaagacctccccagaccgtgaggggagggtctttggctggagcacagggtggtgggatttcgtggaggcagtgtggtcagtgtggctgtccagggagtcaactccggttatcttctgtcagcccataaaagtccaagacgcctgcctgagtgcagaggcttcggtggtgaggtctttgctccatgctttggttacctgcctctaggtgcactacctaaagaatacacatccccgtccctgttttattgagttcaggccttggaagcagaggctctgagcgtaatgctctttcctggctttcttcttcgttgctgccctgtgttctttacggattccccggggttttcccatcaatagagagaggcaggcacttttgtcaccccagtttacagagcagggaaccgaggcacggcctggagctgaggccacacccacatcttgatcctgtactgtagggtgccatgtagtctcccagtgacaacacccgccccccgccccaccgccatccccctcctctgcctcctcctggccaggcctgcgagaagacccagctggagttcatgtcgcaacagtgcgccaggaccgacggccagccgctgcgctcctcccctggcggcgcctccttctaccactggggtgctgctgtaccacacagccaaggtggggcctgcggagtgtggggttgggggaggagccagccctggagaccctcggacagggcagagtcataggggggttggcctactatccctccagcactgggcaaagtggttcaggctctggcatcccacagaccatggatgacatagtggccaggcctcgctggtagatcaggcactgacatcccatctctgagtctcaatttcccatctgtgaaatggagataatagcagtaggtccctccctgggcgctacaaggattcagggagataatcggaaaatgccaagtgtgttccttggttcatgatactttttttgtgagacagagtcttgctctgtcgcccaggctggagtgcaggggcgtaatctcagctcactgtaacctccgcctctgggattcaagggattcttgcccctcagcctctcgaatagctgggactacaggcttgcactaccatgccggctaatttttttgtatttttagtagagatggggtttcgccatgttggctaggctggtttcaaactcctgacgtcaggtgatccgcctgcctcggcttcccaaagttctgggattacaggcatgaaccattgcgcccagccttggttcctaattcaataccattaattattagattagattaggatcgtgattaggattattgccttaggaggtgggatgtggggaagatagaaacccttgccccagatgcaaaggatgaagctgggtgggggctgggggacttgcccctcctgctcggttcaggacaccctttttcactctgccctcccaggggatgctctgtgcagacacatgtgccgggccattggcgagagcttcatcatgaagcgtggagacagcttcctcgatgggacccggtgtatgccaagtggcccccgggaggacgggaccctgagcctgtgtgtgtcgggcagctgcagggtaggcgtgtgtggacattggcgatggccctggggcctacctgtcctatcggaaggctcctgggggcaggttggtgggtgctggccctgatggagctgcagtgccctctgcaggggagtggtgctggggaaaaggatctggacttggagtcagcctgggttaagggctgcagtgtgaccttgggcaagtcactgagccctctaagcttgcttcctgtgtagatggtggggtgctatagaagtgttgctggttttgtggatcccagaatctcagagctggcagggctgcagagtcattgaggccagcaccctccagtgacacgggccctctgtccttccctttgcatagacatttggctgtgatggtaggatggactcccagcaggtatgggacaggtgccaggtgtgtggtggggacaacagcacgtgcagcccacggaagggctctttcacagctggcagagcgagaggtaggcggcctccctcggggcagaggctgggcttcccccagcctccaagatggccacagcccagagcgttggtgcaggggctgctcaggtcacagggcctgcacactcactcagccctggatgcctcctgtggtgtcagcgtctccctcttccacttcgccacccttctgtggcaggctcaggttttggccttgatgctgctgggactgtggtgcctcagtaatggtcactcactgtagccgtgctgcaaaaaaaacacagacattggccgggcgctgtgctcacgcctgtactcccggcactttgggaggctgaggcgggtggatcacctgtagtcgggagatcacctacagcctggccagtatggtgaaaccccatctctactaaaaatacaaaaattagctgggcatgatggcgggcgcctgtagtcctagctactcaggaggctgaggcaggagaattgcttgaacccaggaggcagaggttgcagtgagccgagatccctctgcactccagcccgggcaacagagtgagacactgtctcaaaaaaaaaaaaaaaaaagtatggacgttgtgcattctgtggcagctaccctcttctctcctgctcaagaaatcccactgagagggacacaagtgaatgagagggttggtagttacatttggaaaatctttgactttggtgtatatatgaggtcaaaaaccatttgcaaatgccagtgcttctatggagagcagagacttgagccctgcctccctctggcttgccccactgtgctggagaaccttggacccggtcccttctcccagccagggcagagccttggcaggtggtcctccagcctgcttttaattgcccccatgacaggggactcactgctgctggagccagccccatggcattgttcaatttttcccgaccagctaagatcagctccctttgtctgtggtgtggtggctgtgaggtccacgcatctctccttcttttcttctttctagaatatgtcacgtttctgacagttacccccaacctgaccagtgtctacattgccaaccacaggcctctcttcacacacttgggtgagttgactggaggactcccacccagttagctagactgcaaaggtgcagagcactgttgccaagatgccctcacttctgacatcacccgcaagttcagggggttccccaaaccaccctcaggcttgatagttgactaggaagactcccagagctcactgagagctgtggcacatggctgcggctccttccagaagaacacaggttagaattgtccaagggaagagatgtaggcagagtctgggagggtccaaccaggaggcctgatgtctcagggatgtgacacccttctagcattggagcgtggccatacgcatggagtattgcccacacagaaagcccactgagtgggagttgagagtttttcctggggtttgagtgcaaagacatgattgactaattggccaggtggatactctcagtctcttggtgacccagcccctatcctaaatcacatagttggtctttctggtacagccagcccctgccctaaaggaggacacttctgcctggtgtgacccgtgtttcctcttggaagccaacagcaaaagctggacttctctttgggcaaggcccgcttctttgctattgagggccacagtgggtctttctggagtgtgtctgcacctaacctttgaagccttggttgccggcacttgccatggggtccctgagccctgagcctgttgagttctgtgcgtgagtgcacttggtcatagcactcaccaggttgtggaaagaggcctagagcctccgctgtggggaagcctctagctcagatgcctgtggctccttagaggagggctggggaccccgggaaggagagtcactgacatgtgcctgtgaggaggatgggtgctcagctccacacagctaacagggctggttccccgacagcggtgaggatcggagggcgctatgtcgtggctgggaagatgagcatctcccctaacaccacctacccctccctcctggaggatggtcgtgtcgagtacagagtggccctcaccgaggaccggctgccccgcctggaggagatccgcatctggggacccctccaggaagatgctgacatccaggtcagcaggagagcctgggggaggccagtgggggcttcttcttgggggctatggctgcttgctcgtttgtctatccatccattccctgattcgttcatttattcattcagcggtcacttacaggggacccactatgtgttgggccctgtgctaggcaaaatgtagctagctcctccaggggcttagggtcccacaaatatccaaatgtgcctgtgcccagagcccgtgggagaaggccctgcagttctgggatcaggtaaggttggagggcccaatgcaggggtccagggctccctgggaaagagtgatggagctgaggtgtcagatgagcagatgttgctgggccaagcagggaaggaagcgtatggctgagggaacagtgtcagtgtgggagggatgaaggaaggtcctactgtgtgggtttgtggggagatgaaggcatggacgcaggtgcagtggcatctggggagtaggccttggtgctgaggaagctgagaacagatgctggctctcactgcttctttggtgcagtgtgtgtgggaaccggaaggccttgttcaggcgtgtcctcagtgacgtgtgctcgcccatgtatgtccccattggtgcttcgctgaggaaggcacgtggagggtggagagacataagcgcaggctgaaacagacctgagaaccttgggagaggggcccagtctcagcggccggagcagcgtcctctgcccctacagcagccagagacaggagggcctcccacagatcaggccaggccgggccaaagcaagcccctgtgagcggcttatcccttctcttcccctgatatggttcccttcctcccctccccttgcctgggacattgtatccagatgctagctgccgagtggctctcccatcatcctctgcagtgtgtaaaaaagcagattcccgggtcctctgcatattccctgaatcaggacttccctgtgttgggcctgagaaaccgcaccgtaaccaacacaggcttgcggcactggccagatgtgggcatcgagggggcaggtgcggaatgtcacctcgccctgggctctggcctccaggctggcctctttcttgggctggtcttgggcacaggacccagttaccctcctgaagagccttaggcccaggaacctgctgaagttcttcctagtgctctccgggccagtcccaagccagtagctggccacaggtccccagggatccagtttcttcctgccgaccctaccacaggtccccagggatccagtttcttcctgccgaccctacgggcctcagctctggctccagaagcactttctgtgctggccctgccctagcccttcttgggctccttagcccagcctaaggtgggcctgcctcctccactgcactttatcctctacccagccagcttagggaaccttctctgtgctgcccaaataccctatcatgtaacccaccaatgacttggtaattacctccccgagccctctatcccaacccactgagagctccttgcagctcagccagtgtcctgtgcactgtgctatccccagagcctggtacaggtcagtgttggtgattgcttcccgttatttttgtctttgttgtttttttagagagggtctcactgttggccaggctggagtgctatgttgcccaggctgctctgaaactcctgggctcaagtgatctgcctgcctcaggctcccaaagttttgggtttacaggcatgagctaccgtgcctggccagtgattgcttgctgaacgaaagattatagggatgcaagaagaagttggaaggcttcccaggggaggtggccatgacagtgaccctcagggaacccactggacaaggcctgaagctctttgtctgcaggtttacaggcggtatggcgaggagtatggcaacctcacccgcccagacatcaccttcacctacttccagcctaagccacggcaggcctgggtgtgggccgctgtgcgtgggccctgctcggtgagctgtggggcaggtgagacctggggaaggctcatccacagcacggcttgcccctgcagggaggcggcctagccctccctcttccctcccagggctgcgctgggtaaactacagctgcctggaccaggccaggaaggagttggtggagactgtccagtgccaagggagccagcagccaccagcgtggccagaggcctgcgtgctcgaaccctgccctccctagtgagtgtggtgctgtctgcgcagctccaagggggagagagggttccgctggggctgctgggctctgtccctggcctatggggcccatgtggcagggccgggctgagctgctcctgtgcaggctctcattacccctgcccacagccctgcaaggggggctctgtgagtgcccccattctgcaggtgaggacactgaggcttggggcagacatggtgacaatgtcagcccagtgggacccacacctgctgccaccttgtctgggccaccgaggcctctcttgagctcaggtactcatggtgagatggaggtgattgcctacctggagggttgtagggagacttgcggagctcctggtgcaaagcccctggctgtcaccacacctgacggggcacactgttagggacgaggccattcctgctgggtgcaggacagggcagctgctcaccagcctgtgattcggttgtcctcaggctcagccgtctggcagcctgggaacacctggagaggctaggctggccgtagtgcccattgcttgtcccagaccgggggagtacatcagcacctgccaccccatcaccccaggccagcctgggacctggccagggtcccgacgctctgtctccttcctcagctgggcggtgggagacttcggcccatgcagcgcctcctgtgggggtggcctgcgggagcggccagtgcgctgcgtggaggcccagggcagcctcctgaagacattgcccccagcccggtgcagagcaggggcccagcagccagctgtggcgctggaaacctgcaacccccagccctgccctgccaggtgagcccagggctaggtggggctgggagagggccttcctggcagagctcgtccctgcgctgagcccccatccttctgagaatcccctcctcctgaggcctccggcggggcctcaccatccagggtgatgggcagtgtcacctggcggttgtaagtgctgctgtcagagttccttactacccaggagagcctgggcccattgtttccctctctgagcttccgagcccctgctctgaaatggggatgccgacctgcctggggagggggggcttcgaggatgaggtcaaactgaacggagtgggagatgtcactttctcatcaccaccatctcccccgtgcccacgtggctgcatctcatcccctcagtgtccaagttgacagtggcttatcatcctgccctgccactaacgagctgagtgacagggcaagtcccctcctctgtgggcttcagttttgcgacctgtccggtgggaggggattggtctggattgttggtggcccactcatagctctggactcctttccccgcctcgtcatccgtggcagacaaaacagtcaccactcttccccgctgaggccagatagggcctcagaatccttctcacacagctctccaggcagccactttagcgcagggctgactcacagctgaaacccattggccacccttgaacctggtgatccaattccatgtggcacctgtttctctgcacctgctatggtgcatggagtcagtgattacctggctggaggtcggcctctgcctctggagagtaggagggatgggttctcttttttttttttattaaaagacagagtcttgttctctcacccaggctggtatgcagtggcatgatcttggctcactgcaacctcctgcctcagcaagtgtgcgccaccaagcccaactaatttttgtattttttgtagaaacagggttttgccatgttgcccaggctggtctccaactcccgggctcaagcagtctgctcacctcagcctcctaaagtgctgagctaccgtgcctggccagggataggttctgtctctgcaccctgggtgcaggtggggtgcctgactgttgagcagcgagtgcttgttgaatgggaacctgctggctgatgaatggggaacccggtgcttcagggagagaccctgagcttcacttctctgtggggctcctctttgggctcctggatgttggggagcaggtccccttcctccctgcccctagcagctgggctataccttcccctgggtggcagaggcagggcctgatgactgtctcatgccatcctcaggtgggaggtgtcagagcccagctcatgcacatcagctggtggagcaggcctggccttggagaacgagacctgtgtgccaggggcagatggcctggaggctccagtgactgaggggcctggctccgtagatgagaagctgcctgcccctgagccctgtgtcgggatgtcatgtcctccaggctggggccatgtgagtgccctgggcatgagggtggctggggctgttgagtcctttacctggctgggagaacgaggagcacccattgccaccgtcctccaggccagagcaagaacaccatccttctgtgggaatgctgtctgagggccacccctgctcagaaaagaagcttagaaagagggctcagggcccctgggaaggctcccattccccttgcaagccgggctgagggaagcatctgaggagagtgtaatgcagctgctgtgcagagaaatgctgccaggctcccgcctggcgtccaggggctggaggctgactggccttgctctctggcctgggtgctggcaaccctcgcccctcatggctggggggattgcagggccaggcatgctcccatgtcccactcttggtccccagctctcggccaggcccacagtgagcactcatgctgctgaggagcctgcaaaggtggggtgtgcagcaaggatacccgctgcgagaccggggagccgatctcgccaagggaggaggggagggagcccctggtgcacacacgccacttcctggtctctctgctgctgcctgagaagatcgagacggggatcgctgggtcctcagaggaggcccagacccaccagcttgttgctattccccacagctggatgccacctctgcaggggagaaggctccctccccatggggcagcatcaggacgggggctcaagctgcacacgtgtggacccctgcggcagggtcgtgctccgtctcctgcgggcgaggtgagggcccccgggatgctcctggggaccagcactcatggtaactctcctgtccacttgcatcttgcctcgttctgaaaagcatttgaggtggattgcagaaaatccagactatatgggaacacgtggtaatacacaaggagactaagcatagtagctgacagccacttcaaatgtgggtgttgattggctgaaaggtaggaaaagacaataacgcccggcagtgtggcacgagagccattccttatggtcctagcagagcggccggggggtccccaattgatgacccgagcagagaaaccttagctttaagatacacagcgttcttctattttcccaatcttgttttattgcagtataacacagatattataaaatttaccatccaaactgtttctccctgtgcaggtcagtggcataaaagcacagtcacattgttgtgcggccatcaccaccaacctctccagaacttttccagtttcgcaaactggagctctgtccctgtgaaacacgaactcccatttccccctccgcagcccctggcaacctccattctcctttctgtctccagattccacaattctagggaccttgtagaagtggaatcatatagcatttgcctttttgttactagttttcactcagcatgatgtcctcacagttcatccatgttgtagcatgtgtgagtgtttccttcttaaggctgaaaaagattccattgtgagtgtatcctttacaggtttatccatttattcatcagtggacacttggcttccttccacactttggctattgtgaataatgcttctgtgaacatgggtgtgcaaatatctgtttgagttcctgctttcagttcttttgggtgtatatctagaagtgtggtagctgggtaagatgagaattctatgtttaatttttgtggaactgctggactgttttccccagtggctgcaccattttacatttccactaatggtgcataagagttccaatgtcctcccatccttgccaacactttttatttctatggttttttttgtttttgtttttgtttttgagacagagtctcattctgttgccgaggctggagtgcagtggcatgatcttggctcattgtaaccttcgcctccggggctcaagtgattctcgtgcttcagcctcccgagtagctaggactataggcgtctgccaccatgcctggctaattttttgtttagtagagatggggtttcaccatgttggccaggctggtcccaaactcttgacctcaggtgatctgcctgccttggcctcccaacgtgctgggattacaggcgtgagcccccacacctggcctatttctgtgttttttttataatggccatcctaatgggcttgagaagacacaccatgttcttaaacgaaaaccctgaccacttgctcagtaaaatgtcagcctgtttaaaaccgagaccaaaaagagatttctttttctctcttttcttttttgagacaaaaaagaaaacctctgtcaccaggttggagtgtagtggcacaatcttagctcactacaacctccaccacctgggctgaagccatcctcccccctcagcctcctgaatagctactataccctgctaatttttgtagttttggcagagatgggatctccctatgttgcccagcctgatctcctgagctcaagcgatccttctgcctcggcctctcaaagtgctgggattataggcatgagccactgtgcccaaccaagagattttttttctttttcttttttttcttttttttgagactaagagttttcctctgtcgcccaggctgaagtgcagtggtgtgatcttggctcactgcaacctccgcctcccatgttcaaacgattctcatgcctcagcctcctgagcagctgggactccagctatgtgccaccacacctggctaattttttgtattttattttattagagagggggtttcgccatgatggccacgctggtctcaaactcctgacctcaggtgatccacccgccttggcctcccaaagtgctgggattacaggcatgagccactgagcctatttcttttgaggatattcctaaaagagagacttgagaaaactggccctaataacatctttatgatagacacaatcagagattttcatattgtgatttttttttcttttttttttttttgagatggagtctcgctctgtcacccaggctggagtccagtggcgcagtcttggctcactgcaacctctgcctcctgggttcaagtgattctccgtctcagcctcctgagtagctgggattacaggtgcgcaccaccacgctcagctaatttttgtatttttagtagagacggggtttcaccatgttggtcaggctcgtctcgaactcctgaccttgtgatccgccgcccaaagtgctgtgattacaggcgtgagccactgtgcctggcccatattgcaattcttataatgcctctcggtcaacaataacagctaccatttgtcaagtgtctactgtgtgccaggcacttgttatcttcccttttaaaaatctttataaatgattctgcaaggtagatgccattatctttttttctaaatctaagattcagagggttaagtcagttgtctgaggtcacacagctggtaagtggcagagccgggattgaaacccatgcgggccttatgtgctagaggtgtccagtgagcctgggctgcagtccttgctgagcctgtcccttggggctctgggtctctgctttgtccacgcaggtctgatggag

SEQ ID NO: 10596 - DNA, 2230 bp, Homo sapiens
cactgcctaatcgtcccgcccagtagtgagcaggcctgtcccattccatactgaccagattcccagtcaccaaggccccctctcactccgctccactcctcgggctggctctcctgaggatgcaccagcgtcacccccgggcaagatgccctcccctctgtgtggccggaatccttgcctgtggctttctcctgggctgctggggaccctcccatttccagcagagttgtcttcaggctttggagccacaggccgtgtcttcttacttgagccctggtgctcccttaaaaggccgccctccttcccctggcttccagaggcagaggcagaggcagaggcgggctgcaggcggcatcctacacctggagctgctggtggccgtgggccccgatgtcttccaggctcaccaggaggacacagagcgctatgtgctcaccaacctcaacatcggggcagaactgcttcgggacccgtccctgggggctcagtttcgggtgcacctggtgaagatggtcattctgacagagcctgagggtgctccaaatatcacagccaacctcacctcgtccctgctgagcgtctgtgggtggagccagaccatcaaccctgaggacgacacggatcctggccatgctgacctggtcctctatatcactaggtttgacctggagttgcctgatggtaaccggcaggtgcggggcgtcacccagctgggcggtgcctgctccccaacctggagctgcctcattaccgaggacactggcttcgacctgggagtcaccattgcccatgagattgggcacaggatatgtgccaggccctctcctgccacacagacccgctggaccaaagcagctgcagccgcctcctcgttcctctcctggatgggacagaatgtggcgtggagaagtggtgctccaagggtcgctgccgctccctggtggagctgacccccatagcagcagtgcatgggcgctggtctagctggggtccccgaagtccttgctcccgctcctgcggaggaggtgtggtcaccaggaggcggcagtgcaacaaccccaggcctgcgagaagacccagctggagttcatgtcgcaacagtgcgccaggaccgacggccagccgctgcgctcctcccctggcggcgcctccttctaccactggggtgctgctgtaccacacagccaaggggatgctctgtgcagacacatgtgccgggccattggcgagagcttcatcatgaagcgtggagacagcttcctcgatgggacccggtgtatgccaagtggcccccgggaggacgggaccctgagcctgtgtgtgtcgggcagctgcaggacatttggctgtgatggtaggatggactcccagcaggtatgggacaggtgccaggtgtgtggtggggacaacagcacgtgcagcccacggaagggctctttcacagctggcagagcgagagaatatgtcacgtttctgacagttacccccaacctgaccagtgtctacattgccaaccacaggcctctcttcacacacttggcggtgaggatcggagggcgctatgtcgtggctgggaagatgagcatctcccctaacaccacctacccctccctcctggaggatggtcgtgtcgagtacagagtggccctcaccgaggaccggctgccccgcctggaggagatccgcatctggggacccctccaggaagatgctgacatccagctgggcggtgggagacttcggcccatgcagcgcctcctgtgggggtggcctgcgggagcggccagtgcgctgcgtggaggcccagggcagcctcctgaagacattgcccccagcccggtgcagagcaggggcccagcagccagctgtggcgctggaaacctgcaacccccagccctgccctgccaggtgggaggtgtcagagcccagctcatgcacatcagctggtggagcaggcctggccttggagaacgagacctgtgtgccaggggcagatggcctggaggctccagtgactgaggggcctggctccgtagatgagaagctgcctgcccctgagccctgtgtcgggatgtcatgtcctccaggctggggccatctggatgccacctctgcaggggagaaggctccctccccatggggcagcatcaggacgggggctcaagctgcacacgtgtggacccctgcggcagggtcgtgctccgtctcctgcgggcgaggtctgatggag

SEQ ID NO: 10597 - DNA, 2953 bp, Homo sapiens
caactggcgagaagcagggacaggcctcatacttgggtctttctggcttcagcacgctttccttccacacacgtgtactggcacccactaaatgctgagctctgctcaacgctcggaagaagcaggccctgccttatcatgcgcacactctaggggaaaacaagtaacagcgagtaaacaaaggaacagacgacatcagggtaaagtgatggagagactgcggtgaggccaccagcctccataaggagacaggccttggtgaagtcgctgtgcctcggttctcagtgagttgtcttcaggctttggagccacaggccgtgtcttcttacttgagccctggtgctcccttaaaaggccgccctccttcccctggcttccagaggcagaggcagaggcagaggcgggctgcaggcggcatcctacacctggagctgctggtggccgtgggccccgatgtcttccaggctcaccaggaggacacagagcgctatgtgctcaccaacctcaacatcggggcagaactgcttcgggacccgtccctgggggctcagtttcgggtgcacctggtgaagatggtcattctgacagagcctgagggtgctccaaatatcacagccaacctcacctcgtccctgctgagcgtctgtgggtggagccagaccatcaaccctgaggacgacacggatcctggccatgctgacctggtcctctatatcactaggtttgacctggagttgcctgatggtaaccggcaggtgcggggcgtcacccagctgggcggtgcctgctccccaacctggagctgcctcattaccgaggacactggcttcgacctgggagtcaccattgcccatgagattgggcacaggatatgtgccaggccctctcctgccacacagacccgctggaccaaagcagctgcagccgcctcctcgttcctctcctggatgggacagaatgtggcgtggagaagaatatgtcacgtttctgacagttacccccaacctgaccagtgtctacattgccaaccacaggcctctcttcacacacttggcggtgaggatcggagggcgctatgtcgtggctgggaagatgagcatctcccctaacaccacctacccctccctcctggaggatggtcgtgtcgagtacagagtggccctcaccgaggaccggctgccccgcctggaggagatccgcatctggggacccctccaggaagatgctgacatccaggtgggaggtgtcagagcccagctcatgcacatcagctggtggagcaggcctggccttggagaacgagacctgtgtgccaggggcagatggcctggaggctccagtgactgaggggcctggctccgtagatgagaagctgcctgcccctgagccctgtgtcgggatgtcatgtcctccaggctggggccatctggatgccacctctgcaggggagaaggctccctccccatggggcagcatcaggacgggggctcaagctgcacacgtgtggacccctgcggcagggtcgtgctccgtctcctgcgggcgaggtctgatggagctgcgtttcctgtgcatggactctgccctcagggtgcctgtccaggaagagctgtgtggcctggcaagcaagcctgggagccggcgggaggtctgccaggctgtcccgtgccctgctcggtggcagtacaagctggcggcctgcagcgtgagctgtgggagaggggtcgtgcggaggatcctgtattgtgcccgggcccatggggaggacgatggtgaggagatcctgttggacacccagtgccaggggctgcctcgcccggaaccccaggaggcctgcagcctggagccctgcccacctaggtggaaagtcatgtcccttggcccatgttcggccagctgtggccttggcactgctagacgctcggtggcctgtgtgcagctcgaccaaggccaggacgtggaggtggacgaggcggcctgtgcggcgctggtgcggcccgaggccagtgtcccctgtctcattgccgactgcacctaccgctggcatgttggcacctggatggagtgctctgtttcctgtggggatggcatccagcgccggcgtgacacctgcctcggaccccaggcccaggcgcctgtgccagctgatttctgccagcacttgcccaagccggtgactgtgcgtggctgctgggctgggccctgtgtgggacagggtgcctgtggcaggcagcaccttgagccaacaggaaccattgacatgcgaggcccagggcaggcagactgtgcagtggccattgggcggcccctcggggaggtggtgaccctccgcgtccttgagagttctctcaactgcagtgcgggggacatgttgctgctttggggccggctcacctggaggaagatgtgcaggaagctgttggacatgactttcagctccaagaccaacacgctggtggtgaggcagcgctgcgggcggccaggaggtggggtgctgctgcggtatgggagccagcttgctcctgaaaccttctacagagatccgggacacccacagcttgaggaccacagcgttccatgggcagcaggtgctctactgggagtcagagagcagccaggctgagatggagttcagcgagggcttcctgaaggctcaggccagcctgcggggccagtactggaccctccaatcatgggtaccggagatgcaggaccctcagtcctggaagggaaaggaaggaacctgagggtcattgaacatttgttccgtgtctggccagccctggagggttgacccctggtctcagtgctttccaattcgaactttttccaatcttaggtatctactttagagtcttctccaatgtccaaaaggctagggggttggaggtggggactctggaaaagcagcccccatttcctcgggtaccaataaataaaacatgcaggctga

SEQ ID NO: 10598 - DNA, 27633 bp, Homo sapiens
acactgcctaatcgtcccgcccagtagtgagcaggcctgtcccattccatactgaccagattcccagtcaccaaggccccctctcactccgctccactcctcgggctggctctcctgaggatgcaccagcgtcacccccgggcaagatgccctcccctctgtgtggccggaatccttgcctgtggctttctcctgggctgctggggaccctcccatttccagcaggtgggctcatttgcaggagcgggggtattctgggagcctctgggtggggtattctgagctacctggggcgaggggagtgccaaatagctgactacatcagctttggggtttgcgctgggcaggggagtctgtacttggggctttgggggatgaagtgtgctcactgaagagggagttggtgtctcagtacgacctgctcattcggtgaagctgaacagacagatactagtttgtcccaaactgtgtaggttgctcttctctgcctctcccttcctctccctgtctctgatttccccctctccttcttggttggcctcacccacctcctgcctcctgtctccctcttcatccatctctttttgttcttttttctttctctctctctctttttttttttttttttttttttaagacatggggtcttgttatgttgccccagctggtctcaaactcctggactcaagtgatcctcccacctcggtctccccaagtgttaggattacaggccagagccactatgcccggccccatccatctctttttgtcttgcagagttgtcttcaggctttggagccacaggccgtgtcttcttacttgagccctggtgctcccttaaaaggtacttgtcctggtgtcttctctcccggggggagtttctcaggactttcaaggggtatctcaccactgagtcagtggtctgggatttttggtggatctggaaggagaaggtcagagaagctgctgtcaaccctgttaattaactctgttacttcctgccaagttgatataagctggtctgggtgttccagccaggccagggttctcaccctagcttctgttaaatatcacaagggaacggtcaccgattggctggcccctcctgccccatggcctctgctgagctggctgattttcaggagctcttgtggtttctgaccgtggatgtaaatatttattccttctgtgggaaacaagataggtactggctcaggctacctcctaaggccatggatttccttatgataaaggcctgtccccattgcccacaggcccatgtctgtgaccttctccggtgcgagcccccttcccagtagggccattggcaacttgactaatggctgatgggggccagaggcaggtgggctagtggtcaggggcaacaggagggcaaggcccactttgtgacctggttctttgtggtctaggccagaggcacactgaccagtgcctggggccacgctgggggctggatgcagccgacgctgtctgggtatcccatagcctgggtccttccagcgctgccgctcctgaaaggctgggagatcattgcccagggtccctgaccctctaagggctcccttgggagaggacagtgagggctggcctgggcccctgcttcccaagagaccactgggctccactcgtgttcagtttcctgtcggggtccatgatgttacttgtgaaacacctgtgcccagagcagggtccaggaggcagggcaggggctttcccctttgggcagagccaccagggcagtgggaatcttgtcttgatggggtgacccaaagcacacaatagcccaacagctcctcctgggccctgccctttgcgtgcctagtcactaatggggtctggctcttggggtgggggtgacacgcaatgtcttgacttcggaaggccatccttccaagacctgccagcccctttcctgttagctttccactgcttgctctctagaaccatcgccctctgctctccctctccccctccaggccgccctccttcccctggcttccagaggcagaggcagaggcagaggcgggctgcaggcggcatcctacacctggagctgctggtggccgtgggccccgatgtcttccaggctcaccaggaggacacagagcgctatgtgctcaccaacctcaacatcgtgagtgccccacgctggactgtgcaggtccccacggccagggctggtgaccaatgtctgtgggctggtgtatctggtagtctgaatacagtgggttaaactcaggtagaatggctcggggttcttcctcttctccctccctcccctgggtggaggtgggtgaggtcccacaccctctctaggctccatggcacatgcacaccctgcagcctctcactactcaagtcccttcacctggggccaccctcaagcctggcctcttccccagtatccatttgacccccacaaagctcagctaaagcaaccctggcaaatgggatacgggctgctcacactgccctctgcaccccgaccctgccctctctccattctcttgtcccccgctcagagtggcgaggacaggtcacccgtctgaagtctaaacagagactgctggcaaaggagatgcccaccttcatttcttgctagcacctgaatccctgcagccccccttcacttgaaagctggggaagggcgggcagggaagcactcccccactagccgccgtctcagaaagacaaacaaggccaggcgcggtggctcatgcctataatcccagcactttgggaggccaaggcgggtggatcacccgaagtcaggagttcaagaccagcctggccaacatggtgaaaccccgtagctactaaaaatacaaaacttagctgggcatggtggcaggcgcctgtaatctgagaggagcctgcgatctgagaggagcagcgtttgaccggaatatccgactcgtgaccatctgtgtgctctcatccccttgctttggagtttgttttccttgcgttagttggccttcctgagccatgagctgaggagcaacagaggcacggctgactgtgcagcacattttaggagccccccgccccgcccggttcccacacatgctggtggagtagcctctccagctcttcacactccgggggcccctgggagtcagcagctgcctggggctggcaatgcccacccgacgggttacctctctcatctgcccttgcacagggggcagaactgcttcgggacccgtccctgggggctcagtttcgggtgcacctggtgaagatggtcattctgacagagcctgaggtaggcatggagctggaactcagcacaccatacagagcgggaagcccaagtcatcgcatctccatcctctttaacctcttgtcccggatgccccaagcagcatggatcacagaatgcattcagccagacagaccagctgccctcccagctctacccagcactcagcacaggctgcctgactacttctctgagcctcagttgtctcatccctaacacgggctagtcatagggttgttaggaggactaactgggaaacaaaccgaccgcagtcagcaccgtgcctggttggggtgtcctaaatgcaggctttgctgtgggtccgcagggtgctccaaatatcacagccaacctcacctcgtccctgctgagcgtctgtgggtggagccagaccatcaaccctgaggacgacacggatcctggccatgctgacctggtcctctatatcactaggtagccgagctttctgatgggtgctggccagccagcctgggaaggctgctccctcagcctcctgccctctgcaaaggtgaccccagggcaggcacgtgccttggcaccacccaagtgactgttttctctcaccgaggtttgacctggagttgcctgatggtaaccggcaggtgcggggcgtcacccagctgggcggtgcctgctccccaacctggagctgcctcattaccgaggacactggcttcgacctgggagtcaccattgcccatgagattgggcacaggtatgtagccccaccagctgtccccaggatctggcaaggagctgacctgggtacccagggtggaggtggtcttggcaagcagtgggtccttgtagagtttctccagaggagcctgtacccctcaccccgacagactcaggtgtgaggacaggggaacctgatactgtttgattaaaagaactttttttccaaaagacgagcaagacacctttagcaggtagaaaataacttctgtagaaaattcaggtaaagaaagagcaggctgtaaaaattatctcaaatcccaccatttagagataatgtctcttcacattttgtatttaatttcagtcttttctttacatacacacacatatttcttatttgcaaaattgggatttagtttggatccctgaaaaaaaggaaaattgtgattatgctgtgcattgctttgttacctgctatttctttttcttttcttttcttttttttttttgagatgaagtttcgctcttgttgcccaggctggagggcaatgacgtgatctcagctcattgcaacctccacctcctgggtgcaagtgattctcccacctcagcctcccaagtagctgggattacaggcatgtgccaccacgcccagctaattttgtatttttagtagagacagggtttctccatgttggtcaggctggtctcgaactcccaacctcaggtgatccacctgcctcggtctcccacagtgctgggattacaggcgtgagccactgcatccagcctttcttttttcttcctagggtaagtgcaggatttacctgttctttatgtaataatatatcccaaacattatcccaggtatcttagaggtgtgcaccgtaatttatttaatcagtcccctcttcttggatgtctaggttgtctgaacacgtcttcctgttgtgaatgttatgcattcttgtgggcaaaccttcactcttacctataaccatttacctagagtgatgggtttcttttcatttctttagttttttaagtatgaaaataatacccaattgttgtaaaaattcaaacagtgcagagatttctaaagtaaaaagtgaatttccacattccttgcccaccaacccccacccgacccctttcaacccctctgagcctgggagggttgaggcagggttcctgggtgtgggacaaggcagggctccttctccctcagagggagcatagttcccttctgctcctgtgatgcagaagacgtgagcccccaaactggggcttagcctgggagggttcttggcttcaccgaggaaagaattcaagagggagcaggtggtgttagacagcaactttgattgatgtggcagtgggcagagtgtacagccctgtgactgtatacagcacagcatagccccttttgaagccaggctaccccatagacactgtgcccaaaagagcagctcaaaggcagggctgcagtcctagttaatacccacttctaattatatgcaaattaaggggccagattatgcagaaatttctagaaaaagggcagtaacttctaggttttcgtcatggaaaaggggcagtaacttctgggttttgccatggcaatggcaaactggtatggcacactggtgggcgtgtcttatggaaaggggcttcccacccctccctgttttagctagtcctctggtccagtgtccaagcggggcctccagagtggagtccacctcctacctcaccggtgcctggcctctcccaccccattaggagtcctccatcagttccgctttgggtaaagcaagctctgttgtgacagtttggaaacggttcaccttcctggcctaggaatgcaaacaatggccaagggcaagcacgttttaactgaactttaaaatcgtgctttcctcacagtaggtgaatttcacgctcaacacatccatgtaaacagtccccagagcagcccttcaaggccccggccagtccccacctccccacagactcctaacaccatgatttaatgtggcttgcacatttttaaaggcttttgatatttattagcaaaagatgcgagagccaccctgctgggctagcgctcccttctgggggaaactgaggcagggcgcacgcgaccctctccactgcgcccagttagcagatggcggcgtcaggggtcgacccgggtcggaaaactcgctggcgctgcggcactagggcgccgggccgctgactcgccgacccccgtcccgcccccacccccgcccccgcccctgccggccgccttagcgcaactccccgccccccgaccagcttcggcctggagcacgacggcgcgcccggcagcggctgcggccccagcggacacgtgatggcttcggacggcgccgcgccccgcgccggcctcgcctggtccccctgcagccgccggcagctgctgagcctgctcaggtagcggccgccccgtgggaggggcgcgcgagcctccagccagcccgctgggccgccagcgccacctctctctacgtccgtccccactccgcattcagccctccttcctgtcccacccctccgtccaacccacccctccgtccaaccccgcgcccaccgctccgtccgtggaggggcgggcgcgcgagcctccagccagcccgctgggccgcccgcgccacccctccctacgtccgtccccacctctccctacgtccgtccccactccgcattcagccctccttcctgtcctacctctccatcctgacccactcctccgtccaaccccgcgcccacagctccgtcccatcccgctgcgcccactcctgcgcccacccctccgtcccaacccctgcacccacccccccgtcccacccacctgccccaccccctgcacctccccccgtgctgtcccactctgcggccacccttctgtccaacccctgcgcccaccgctccgttccaccccctccctgcgcccacccctgcgtcctccctcgcccccttgcgcccacactttcgttccagccaatctgggcacgcacccctccgtccatccccatcccgccccttgactccacatacactccctggttctctcccacttgcctacacccacccctgcatcctaccctcctccatccacccctccatctcagccccctgcacccaccccgttcctgggcccaccctgttcctgcacccaccccctcacttcacccccttacccttcgtctgcctccacccgcccctacccctccgtccactctccacgctccatcagtcccacacccctatctcccccacccgcgtacatgtatccctgcgtccccttcccgccgaccgcaccgctcccgggcctaacctgcatctgctccatcccactcagacccgtccctccgtcgccgctccctctgctggccacccacctctgcgccggcaggagccttagtcttggtcccagccaagagccggctcctggtggggggcgcgggccgagaactcctgttcccactcacaaaaggccacgcttccaaacgcttccatcctcgtgcccactcctccgtcccgcctcctcccggtgtacaccccgggactgagccgggcctgagccgggccttgtcgcagcgcaggacgggcgcgctgcgtgtgggacccgccgcggcctcaacccgggtccgcggggcacccgccggatgcgcagcctggcctctactacagcgccaacgagcagtgccgcgtggccttcggccccaaggctgtcgcctgcaccttcgccagggagcacctggtgagtctgccggcggtggcctgggattggctgtgaggtccctccgcatcacccagctcacgtcccccaaaacgtgcatggtgagaacctgctgggtgccgtgctaggctgaggtactaagccagggcggcttagtttaatgctgtctgtgccctctagaaattatttaaaatgtttgaacaaaagctccaacatttttgtttgactgggccccacaaattatgtagctagtcctgggagggcccctgtgcccaaggactcctggctgagtgaggacaccaatcttaaacagttaccaaggacttccccatctattgtggctggagtcagactggagggcttcctggaggaagtggcctctaaactgaacccacagcagaagtggggctggtagggggaggggagatgaaggagagcaggcaccccaaaagacagacttcctcgcaggattgcataggacattcatgggctccaggcacttttgccttgatgggccccttcctccacaaaaaaattgagaattatgttttaatattcttatacaatgtataaagttttatgtgttactataaatacaagtctttttttttcctatttttttttttttttgagacagagtctccctctctgctcactgcaggctccgcctgccagattcacaccattctcctgcctcagcctcccgagtagctgggactacaggcgcccgccaccacgcctggctaattttttgtatttttagtagagacggggtttcactgtgttagccaggatggtctcgatctcctgacctcgtgatccgcccgccctggcctcacaaagtgctgggattacaggcatgagccacagcgccccgccaagtctttttttttaaattcttttgagacagggcctcgttctgttgcccagggtggagtgcagtagcacaatcatagctcactgttgcctcaacttcttgggcacaaacgatcctcccacctcggccttggagtagctgggactacaggcacatgccacaatgcccagctaatttttaaattttttgtagagatggggtctccctttgttacccaggcttgtctaggactcctggcttcaagccatcctcccaccttggcgtcccaaagcactgggattacagacatgagccaccacccacgcctgatcagcaaatctattaatattatatattacaacattaattttgacctggaagttcattttttcatttttttttttttttgagacagagtctcactctgtcacccaggctggagtgcagtggcacaatcttggcttactgcaacctccgcctcccaggttcaagtgattcccgggcctacgcctcccgagtagctgggactacaggcatgtgccaccatgcccagctaagttttgtattttttagtagagacagggtttcatcatgttggccgggctggtctcgaattctgacctcaggtgatccgcccgccttggcctcccaaagtgctgggattacaggataagccaccacacccagcctagttcatttttttcttctgattttattttatttatttatttattttgagacggagtctcgctctgtcacccaggctggaatgcagtggctcaatcttggctcactgcaagctctgccttcagggttcaagccattctcctgcatcagcctcccgaatagctgggactacaggtgcctgccaccacacccggctaattttttgtatttttagtagagatggggtttcactgtgttagccaggatggtctcgctctcctgacctcgtgatttgcccgcctcggccttccaaattgctgggattacaggcgtgagccacagtgcccggcctttttccttctgattttaaaagaaattaggccaggtgtggtggctcacgcctgtaatcccagcactttgggaagccaaggcaggcggatcacctgaggtcgggagtttgagaccagcctgaccaacatggagaaatgccatctgtgctaaaaatacaaaaaattagccgggcgtggtggcgcatgcctgtaatcccagctactcggaaggctgaggtaggagaattgcttgaacccaggaggcagaggttgaggtgagccaagatcgcgccattgccctccagcctgggcaacaagagcgaaactgtctcaaaaaaaaacaagaaagaaaaataaattaaaacatttgcctcttgagcttcaagtcagtgacaagttaagaaggaaaaaaagaaaaaagacacaaaaaacacatttccatgggcccccaaaagtgtgacaggacctggtcatggtcccggttccccatcgatgggtcagtcatgccttgtcctctgagggcaccagtgcccacggtgcagagtgttggctgtgtcagtgtgtcctgcagtctgggagggacagttaaggttggacactggcctggaaggccctggtggcccctgagctcgccacccacctgtccaccctcctaggatatgtgccaggccctctcctgccacacagacccgctggaccaaagcagctgcagccgcctcctcgttcctctcctggatgggacagaatgtggcgtggagaaggtcagagccaagagtgaatgagtgggctcctgtgagcacgtgcacgtgggtgcctccagccaggccgccctattcctaggtcaggaggcaggaccagtatggggcagagagtcttggagttggccttggggactgtcctttgggttggtggtctgacctctttcctttagcatttgctcccatgcagaatgggaatgtgggctgcctgttgtatggggggtgcccatgggtgtggggttcctttgggtggggtccctgtgtgaaggtccttgtggatatggggtgtctcgggggggatccctgtgtaaggggtccctgtgagtgtagagtccctgtgggtggggtccttatgtgtgtgttggaggatccctgtgtgttgaggggtccctggggggttctgtgtgtatgttggggggtctctgggtgttggaggatccctgtgggtctgggggatccatgtggctggggtacctgtgtgttggggggtctctgtgtgtgttggagatccctgtgtgttgggggatccctatgggtgagttccttgtgtgtgtttgggggtcgctgtgggtggggtccctgtgtgtgttggggatccctgaggatgttgggggactctctgtgtgtgttgggagtcctgtggtggggtcactgtgggatgggagatgaagccatccttgccttgcagtggtgctccaagggtcgctgccgctccctggtggagctgacccccatagcagcagtgcatgggcgctggtctagctggggtccccgaagtccttgctcccgctcctgcggaggaggtgtggtcaccaggaggcggcagtgcaacaaccccaggtaccgcagggagggtgcttttctgtcagggagtgtggccataccatagtccctagttgaaggcagtggtcaccctgctctctcaccctcctgtctgctgggcattttcagacctgcctttggggggcgtgcatgtgttggtgctgacctccaggccgagatgtgcaacactcaggtaggcctgcttcctggggtaggagggggcagctggtggcaccgggccctgggggagccaaagtgaccatctgtggttcacaccaggacacatttgagaaggacattggggccaggtgaggtggcttatgcctgtaatcccagcactttgggaggccaaggcaggtggatcacctgaggtcaggggttcaagaccagcctggccaacatggtgaaatctcgtctctacagaaaatacaaaaattagccgggcgtggtggtgggcgcctgtagtcccagctactcgggaagctgaggcaggagaatcacttgaacccaggaggtagagcttgcagtgagccgagattgggccattgcactccagcctgggcgacagagtgagactctgtctcaaaaaaaaaataaaaattaaaaaagagagagaaggacattgggaccccagttcataaaccaggccagtcctgctgatgcccacagagcccctgaagcgtcccgcctccctccctgagtgccactttgccctccagagcgcatctctgcagggagaacctccccactaggaatacagtgcgctgctgcatgcctgcaaaggaattttttaaatattatttttatttttttagacagagtctctccctgtcacccagactggagtgcagtggtgctatctcagctcactgcaacctctgcctcccaggttcaagcgattctcctgcctcagtctcctgagtagctgggactacaggtgcccgccaccacgcccggctaattttttgtatttttagtagaggaggggtttcaccgtgttagccaggatggccttgatctcctgacctcgtgatccgcctgcctcggcctcccaaagtgctgggattacaggtgtcactgcgcctggccgaaggagtcttttatttataaattgaggtgacattcatgtagcatgaaatcaagcattttaaagtggcaactcagtggcctttagtacactcacaaggttgggcaagtactgcctctgtctagtttcagaacgtttccagtactctggagtactctggagtgaaccccatatggtaggctgtcactccccatttctcctccgccactcagcggccattggtttcccttctgtctctgtggattgacctgttctagacatgccacgtacctgaggccagacaacaggtgtgcttcctgcctgccttcctcccccagcggcacgtccccaaggctcacctgtgttgtagcctgtgtcagcgcctcattcctctttctggctgaatcatattccactgcagggatagaccacattttcatccagtcgtctgctgatggacatctgaggtgttttcaccttttggctcctgtgaacagagccgctgcgaatgtgcttgtacatgtttgaatccctgttttcaattcttttggcagtatgctgaagagcggagttactggatcgtatgggaattgtatgtttgacttttttttttcttttttttttttttgagacagagtcttgctctgtcgccaggctggagtgcagtggtgcaatctcagctccctgcaaccttcgcctcctgggttcaagcgattcccctgcctcaccttccggagtagctgggattacaggcacgcgccaccatgcctggctaattttttgtatttttagtagagatggagtttccaccacgtcagccaggatggtctggatctcctgacctcaggtgatctgcccgccttggcctcccaaactgttgggattacaggcatgagccaccgctcccggcctatgtttgactttttttttttcttatttttttctttctttctttatttttttttttttagagatggagtctcgctctgtcgcccaagctggagtgcggtggcgcgatctcggctcactctaagctccgcctcccaggttcaccccattctcctgcctcagcttcccgaatagctgggactacagacgcccgccaccacgcccggctaatttttttttgtatttttagtagaggcggggtttcaccatgttagccgggatggtcttgatctcctgacctcgtgatctgcctgcctcggcctcccaaagggctgagatcacaggcgtgagccaccgcgcccagcatgtttggcttttaaagaaactgccaaaccgttttccacagtgcctgaactgtttcacattcccaccagcattgcgccagggttccagtttccccacatccgctgcagcacttgctgttttctgttgttgttttttcttttctcttcttttttttttttttttttttaatagagatggggttttgtcatgttggccaggctggtcttgaactccgaccccaggtgatccgcccaccttagcctcccaaagtgctgggattacacgcgtgagccatggcgcccggcctgttttctgttttttgattttggccatctcggtggtatgaaatggtagaaagattctttttacattgagttaaattctatctcctgcttcgatggccctgggtgtgggtttgtccctggctgtattacagttctgcatgtggtgagaccctccctttcctccttctccaaatggaccaccaagacctccccagaccgtgaggggagggtctttggctggagcacagggtggtgggatttcgtggaggcagtgtggtcagtgtggctgtccagggagtcaactccggttatcttctgtcagcccataaaagtccaagacgcctgcctgagtgcagaggcttcggtggtgaggtctttgctccatgctttggttacctgcctctaggtgcactacctaaagaatacacatccccgtccctgttttattgagttcaggccttggaagcagaggctctgagcgtaatgctctttcctggctttcttcttcgttgctgccctgtgttctttacggattccccggggttttcccatcaatagagagaggcaggcacttttgtcaccccagtttacagagcagggaaccgaggcacggcctggagctgaggccacacccacatcttgatcctgtactgtagggtgccatgtagtctcccagtgacaacacccgccccccgccccaccgccatccccctcctctgcctcctcctggccaggcctgcgagaagacccagctggagttcatgtcgcaacagtgcgccaggaccgacggccagccgctgcgctcctcccctggcggcgcctccttctaccactggggtgctgctgtaccacacagccaaggtggggcctgcggagtgtggggttgggggaggagccagccctggagaccctcggacagggcagagtcataggggggttggcctactatccctccagcactgggcaaagtggttcaggctctggcatcccacagaccatggatgacatagtggccaggcctcgctggtagatcaggcactgacatcccatctctgagtctcaatttcccatctgtgaaatggagataatagcagtaggtccctccctgggcgctacaaggattcagggagataatcggaaaatgccaagtgtgttccttggttcatgatactttttttgtgagacagagtcttgctctgtcgcccaggctggagtgcaggggcgtaatctcagctcactgtaacctccgcctctgggattcaagggattcttgcccctcagcctctcgaatagctgggactacaggcttgcactaccatgccggctaatttttttgtatttttagtagagatggggtttcgccatgttggctaggctggtttcaaactcctgacgtcaggtgatccgcctgcctcggcttcccaaagttctgggattacaggcatgaaccattgcgcccagccttggttcctaattcaataccattaattattagattagattaggatcgtgattaggattattgccttaggaggtgggatgtggggaagatagaaacccttgccccagatgcaaaggatgaagctgggtgggggctgggggacttgcccctcctgctcggttcaggacaccctttttcactctgccctcccaggggatgctctgtgcagacacatgtgccgggccattggcgagagcttcatcatgaagcgtggagacagcttcctcgatgggacccggtgtatgccaagtggcccccgggaggacgggaccctgagcctgtgtgtgtcgggcagctgcagggtaggcgtgtgtggacattggcgatggccctggggcctacctgtcctatcggaaggctcctgggggcaggttggtgggtgctggccctgatggagctgcagtgccctctgcaggggagtggtgctggggaaaaggatctggacttggagtcagcctgggttaagggctgcagtgtgaccttgggcaagtcactgagccctctaagcttgcttcctgtgtagatggtggggtgctatagaagtgttgctggttttgtggatcccagaatctcagagctggcagggctgcagagtcattgaggccagcaccctccagtgacacgggccctctgtccttccctttgcatagacatttggctgtgatggtaggatggactcccagcaggtatgggacaggtgccaggtgtgtggtggggacaacagcacgtgcagcccacggaagggctctttcacagctggcagagcgagaggtaggcggcctccctcggggcagaggctgggcttcccccagcctccaagatggccacagcccagagcgttggtgcaggggctgctcaggtcacagggcctgcacactcactcagccctggatgcctcctgtggtgtcagcgtctccctcttccacttcgccacccttctgtggcaggctcaggttttggccttgatgctgctgggactgtggtgcctcagtaatggtcactcactgtagccgtgctgcaaaaaaaacacagacattggccgggcgctgtgctcacgcctgtactcccggcactttgggaggctgaggcgggtggatcacctgtagtcgggagatcacctacagcctggccagtatggtgaaaccccatctctactaaaaatacaaaaattagctgggcatgatggcgggcgcctgtagtcctagctactcaggaggctgaggcaggagaattgcttgaacccaggaggcagaggttgcagtgagccgagatccctctgcactccagcccgggcaacagagtgagacactgtctcaaaaaaaaaaaaaaaaaagtatggacgttgtgcattctgtggcagctaccctcttctctcctgctcaagaaatcccactgagagggacacaagtgaatgagagggttggtagttacatttggaaaatctttgactttggtgtatatatgaggtcaaaaaccatttgcaaatgccagtgcttctatggagagcagagacttgagccctgcctccctctggcttgccccactgtgctggagaaccttggacccggtcccttctcccagccagggcagagccttggcaggtggtcctccagcctgcttttaattgcccccatgacaggggactcactgctgctggagccagccccatggcattgttcaatttttcccgaccagctaagatcagctccctttgtctgtggtgtggtggctgtgaggtccacgcatctctccttcttttcttctttctagaatatgtcacgtttctgacagttacccccaacctgaccagtgtctacattgccaaccacaggcctctcttcacacacttgggtgagttgactggaggactcccacccagttagctagactgcaaaggtgcagagcactgttgccaagatgccctcacttctgacatcacccgcaagttcagggggttccccaaaccaccctcaggcttgatagttgactaggaagactcccagagctcactgagagctgtggcacatggctgcggctccttccagaagaacacaggttagaattgtccaagggaagagatgtaggcagagtctgggagggtccaaccaggaggcctgatgtctcagggatgtgacacccttctagcattggagcgtggccatacgcatggagtattgcccacacagaaagcccactgagtgggagttgagagtttttcctggggtttgagtgcaaagacatgattgactaattggccaggtggatactctcagtctcttggtgacccagcccctatcctaaatcacatagttggtctttctggtacagccagcccctgccctaaaggaggacacttctgcctggtgtgacccgtgtttcctcttggaagccaacagcaaaagctggacttctctttgggcaaggcccgcttctttgctattgagggccacagtgggtctttctggagtgtgtctgcacctaacctttgaagccttggttgccggcacttgccatggggtccctgagccctgagcctgttgagttctgtgcgtgagtgcacttggtcatagcactcaccaggttgtggaaagaggcctagagcctccgctgtggggaagcctctagctcagatgcctgtggctccttagaggagggctggggaccccgggaaggagagtcactgacatgtgcctgtgaggaggatgggtgctcagctccacacagctaacagggctggttccccgacagcggtgaggatcggagggcgctatgtcgtggctgggaagatgagcatctcccctaacaccacctacccctccctcctggaggatggtcgtgtcgagtacagagtggccctcaccgaggaccggctgccccgcctggaggagatccgcatctggggacccctccaggaagatgctgacatccaggtcagcaggagagcctgggggaggccagtgggggcttcttcttgggggctatggctgcttgctcgtttgtctatccatccattccctgattcgttcatttattcattcagcggtcacttacaggggacccactatgtgttgggccctgtgctaggcaaaatgtagctagctcctccaggggcttagggtcccacaaatatccaaatgtgcctgtgcccagagcccgtgggagaaggccctgcagttctgggatcaggtaaggttggagggcccaatgcaggggtccagggctccctgggaaagagtgatggagctgaggtgtcagatgagcagatgttgctgggccaagcagggaaggaagcgtatggctgagggaacagtgtcagtgtgggagggatgaaggaaggtcctactgtgtgggtttgtggggagatgaaggcatggacgcaggtgcagtggcatctggggagtaggccttggtgctgaggaagctgagaacagatgctggctctcactgcttctttggtgcagtgtgtgtgggaaccggaaggccttgttcaggcgtgtcctcagtgacgtgtgctcgcccatgtatgtccccattggtgcttcgctgaggaaggcacgtggagggtggagagacataagcgcaggctgaaacagacctgagaaccttgggagaggggcccagtctcagcggccggagcagcgtcctctgcccctacagcagccagagacaggagggcctcccacagatcaggccaggccgggccaaagcaagcccctgtgagcggcttatcccttctcttcccctgatatggttcccttcctcccctccccttgcctgggacattgtatccagatgctagctgccgagtggctctcccatcatcctctgcagtgtgtaaaaaagcagattcccgggtcctctgcatattccctgaatcaggacttccctgtgttgggcctgagaaaccgcaccgtaaccaacacaggcttgcggcactggccagatgtgggcatcgagggggcaggtgcggaatgtcacctcgccctgggctctggcctccaggctggcctctttcttgggctggtcttgggcacaggacccagttaccctcctgaagagccttaggcccaggaacctgctgaagttcttcctagtgctctccgggccagtcccaagccagtagctggccacaggtccccagggatccagtttcttcctgccgaccctaccacaggtccccagggatccagtttcttcctgccgaccctacgggcctcagctctggctccagaagcactttctgtgctggccctgccctagcccttcttgggctccttagcccagcctaaggtgggcctgcctcctccactgcactttatcctctacccagccagcttagggaaccttctctgtgctgcccaaataccctatcatgtaacccaccaatgacttggtaattacctccccgagccctctatcccaacccactgagagctccttgcagctcagccagtgtcctgtgcactgtgctatccccagagcctggtacaggtcagtgttggtgattgcttcccgttatttttgtctttgttgtttttttagagagggtctcactgttggccaggctggagtgctatgttgcccaggctgctctgaaactcctgggctcaagtgatctgcctgcctcaggctcccaaagttttgggtttacaggcatgagctaccgtgcctggccagtgattgcttgctgaacgaaagattatagggatgcaagaagaagttggaaggcttcccaggggaggtggccatgacagtgaccctcagggaacccactggacaaggcctgaagctctttgtctgcaggtttacaggcggtatggcgaggagtatggcaacctcacccgcccagacatcaccttcacctacttccagcctaagccacggcaggcctgggtgtgggccgctgtgcgtgggccctgctcggtgagctgtggggcaggtgagacctggggaaggctcatccacagcacggcttgcccctgcagggaggcggcctagccctccctcttccctcccagggctgcgctgggtaaactacagctgcctggaccaggccaggaaggagttggtggagactgtccagtgccaagggagccagcagccaccagcgtggccagaggcctgcgtgctcgaaccctgccctccctagtgagtgtggtgctgtctgcgcagctccaagggggagagagggttccgctggggctgctgggctctgtccctggcctatggggcccatgtggcagggccgggctgagctgctcctgtgcaggctctcattacccctgcccacagccctgcaaggggggctctgtgagtgcccccattctgcaggtgaggacactgaggcttggggcagacatggtgacaatgtcagcccagtgggacccacacctgctgccaccttgtctgggccaccgaggcctctcttgagctcaggtactcatggtgagatggaggtgattgcctacctggagggttgtagggagacttgcggagctcctggtgcaaagcccctggctgtcaccacacctgacggggcacactgttagggacgaggccattcctgctgggtgcaggacagggcagctgctcaccagcctgtgattcggttgtcctcaggctcagccgtctggcagcctgggaacacctggagaggctaggctggccgtagtgcccattgcttgtcccagaccgggggagtacatcagcacctgccaccccatcaccccaggccagcctgggacctggccagggtcccgacgctctgtctccttcctcagctgggcggtgggagacttcggcccatgcagcgcctcctgtgggggtggcctgcgggagcggccagtgcgctgcgtggaggcccagggcagcctcctgaagacattgcccccagcccggtgcagagcaggggcccagcagccagctgtggcgctggaaacctgcaacccccagccctgccctgccaggtgagcccagggctaggtggggctgggagagggccttcctggcagagctcgtccctgcgctgagcccccatccttctgagaatcccctcctcctgaggcctccggcggggcctcaccatccagggtgatgggcagtgtcacctggcggttgtaagtgctgctgtcagagttccttactacccaggagagcctgggcccattgtttccctctctgagcttccgagcccctgctctgaaatggggatgccgacctgcctggggagggggggcttcgaggatgaggtcaaactgaacggagtgggagatgtcactttctcatcaccaccatctcccccgtgcccacgtggctgcatctcatcccctcagtgtccaagttgacagtggcttatcatcctgccctgccactaacgagctgagtgacagggcaagtcccctcctctgtgggcttcagttttgcgacctgtccggtgggaggggattggtctggattgttggtggcccactcatagctctggactcctttccccgcctcgtcatccgtggcagacaaaacagtcaccactcttccccgctgaggccagatagggcctcagaatccttctcacacagctctccaggcagccactttagcgcagggctgactcacagctgaaacccattggccacccttgaacctggtgatccaattccatgtggcacctgtttctctgcacctgctatggtgcatggagtcagtgattacctggctggaggtcggcctctgcctctggagagtaggagggatgggttctcttttttttttttattaaaagacagagtcttgttctctcacccaggctggtatgcagtggcatgatcttggctcactgcaacctcctgcctcagcaagtgtgcgccaccaagcccaactaatttttgtattttttgtagaaacagggttttgccatgttgcccaggctggtctccaactcccgggctcaagcagtctgctcacctcagcctcctaaagtgctgagctaccgtgcctggccagggataggttctgtctctgcaccctgggtgcaggtggggtgcctgactgttgagcagcgagtgcttgttgaatgggaacctgctggctgatgaatggggaacccggtgcttcagggagagaccctgagcttcacttctctgtggggctcctctttgggctcctggatgttggggagcaggtccccttcctccctgcccctagcagctgggctataccttcccctgggtggcagaggcagggcctgatgactgtctcatgccatcctcaggtgggaggtgtcagagcccagctcatgcacatcagctggtggagcaggcctggccttggagaacgagacctgtgtgccaggggcagatggcctggaggctccagtgactgaggggcctggctccgtagatgagaagctgcctgcccctgagccctgtgtcgggatgtcatgtcctccaggctggggccatgtgagtgccctgggcatgagggtggctggggctgttgagtcctttacctggctgggagaacgaggagcacccattgccaccgtcctccaggccagagcaagaacaccatccttctgtgggaatgctgtctgagggccacccctgctcagaaaagaagcttagaaagagggctcagggcccctgggaaggctcccattccccttgcaagccgggctgagggaagcatctgaggagagtgtaatgcagctgctgtgcagagaaatgctgccaggctcccgcctggcgtccaggggctggaggctgactggccttgctctctggcctgggtgctggcaaccctcgcccctcatggctggggggattgcagggccaggcatgctcccatgtcccactcttggtccccagctctcggccaggcccacagtgagcactcatgctgctgaggagcctgcaaaggtggggtgtgcagcaaggatacccgctgcgagaccggggagccgatctcgccaagggaggaggggagggagcccctggtgcacacacgccacttcctggtctctctgctgctgcctgagaagatcgagacggggatcgctgggtcctcagaggaggcccagacccaccagcttgttgctattccccacagctggatgccacctctgcaggggagaaggctccctccccatggggcagcatcaggacgggggctcaagctgcacacgtgtggacccctgcggcagggtcgtgctccgtctcctgcgggcgaggtgagggcccccgggatgctcctggggaccagcactcatggtaactctcctgtccacttgcatcttgcctcgttctgaaaagcatttgaggtggattgcagaaaatccagactatatgggaacacgtggtaatacacaaggagactaagcatagtagctgacagccacttcaaatgtgggtgttgattggctgaaaggtaggaaaagacaataacgcccggcagtgtggcacgagagccattccttatggtcctagcagagcggccggggggtccccaattgatgacccgagcagagaaaccttagctttaagatacacagcgttcttctattttcccaatcttgttttattgcagtataacacagatattataaaatttaccatccaaactgtttctccctgtgcaggtcagtggcataaaagcacagtcacattgttgtgcggccatcaccaccaacctctccagaacttttccagtttcgcaaactggagctctgtccctgtgaaacacgaactcccatttccccctccgcagcccctggcaacctccattctcctttctgtctccagattccacaattctagggaccttgtagaagtggaatcatatagcatttgcctttttgttactagttttcactcagcatgatgtcctcacagttcatccatgttgtagcatgtgtgagtgtttccttcttaaggctgaaaaagattccattgtgagtgtatcctttacaggtttatccatttattcatcagtggacacttggcttccttccacactttggctattgtgaataatgcttctgtgaacatgggtgtgcaaatatctgtttgagttcctgctttcagttcttttgggtgtatatctagaagtgtggtagctgggtaagatgagaattctatgtttaatttttgtggaactgctggactgttttccccagtggctgcaccattttacatttccactaatggtgcataagagttccaatgtcctcccatccttgccaacactttttatttctatggttttttttgtttttgtttttgtttttgagacagagtctcattctgttgccgaggctggagtgcagtggcatgatcttggctcattgtaaccttcgcctccggggctcaagtgattctcgtgcttcagcctcccgagtagctaggactataggcgtctgccaccatgcctggctaattttttgtttagtagagatggggtttcaccatgttggccaggctggtcccaaactcttgacctcaggtgatctgcctgccttggcctcccaacgtgctgggattacaggcgtgagcccccacacctggcctatttctgtgttttttttataatggccatcctaatgggcttgagaagacacaccatgttcttaaacgaaaaccctgaccacttgctcagtaaaatgtcagcctgtttaaaaccgagaccaaaaagagatttctttttctctcttttcttttttgagacaaaaaagaaaacctctgtcaccaggttggagtgtagtggcacaatcttagctcactacaacctccaccacctgggctgaagccatcctcccccctcagcctcctgaatagctactataccctgctaatttttgtagttttggcagagatgggatctccctatgttgcccagcctgatctcctgagctcaagcgatccttctgcctcggcctctcaaagtgctgggattataggcatgagccactgtgcccaaccaagagattttttttctttttcttttttttcttttttttgagactaagagttttcctctgtcgcccaggctgaagtgcagtggtgtgatcttggctcactgcaacctccgcctcccatgttcaaacgattctcatgcctcagcctcctgagcagctgggactccagctatgtgccaccacacctggctaattttttgtattttattttattagagagggggtttcgccatgatggccacgctggtctcaaactcctgacctcaggtgatccacccgccttggcctcccaaagtgctgggattacaggcatgagccactgagcctatttcttttgaggatattcctaaaagagagacttgagaaaactggccctaataacatctttatgatagacacaatcagagattttcatattgtgatttttttttcttttttttttttttgagatggagtctcgctctgtcacccaggctggagtccagtggcgcagtcttggctcactgcaacctctgcctcctgggttcaagtgattctccgtctcagcctcctgagtagctgggattacaggtgcgcaccaccacgctcagctaatttttgtatttttagtagagacggggtttcaccatgttggtcaggctcgtctcgaactcctgaccttgtgatccgccgcccaaagtgctgtgattacaggcgtgagccactgtgcctggcccatattgcaattcttataatgcctctcggtcaacaataacagctaccatttgtcaagtgtctactgtgtgccaggcacttgttatcttcccttttaaaaatctttataaatgattctgcaaggtagatgccattatctttttttctaaatctaagattcagagggttaagtcagttgtctgaggtcacacagctggtaagtggcagagccgggattgaaacccatgcgggccttatgtgctagaggtgtccagtgagcctgggctgcagtccttgctgagcctgtcccttggggctctgggtctctgctttgtccacgcaggtctgatggagctgcgtttcctgtgcatggactctgccctcagggtgcctgtccaggaagagctgtgtggcctggcaagcaagcctgggagccggcgggaggtctgccaggctgtcccgtgccctgctcggtgagtgaggggagcaagactgtgtgctggccttctccctgtaagtgggagacccgagccttggctccatgcccggtgacctgcggaggggggcaggtgctgctggctgtgcactgtgtgaggctggaccatggccgccccatccccctgcctcactccaagtgcaggccagagccccggcccagcccctttgaggactgcaacccagagccctgccctgccaggtgggccccttcccaaggagacagggggtgctaggtctgcatcctggctctttcctcacctccaagccagaccttttgaccctcagtgtcctcaccagtgggagcaggtcattttgtgcccccagaagactgggggagtttaatgaaaggattagatgcatgtaaagtacatgctaaatgcaatgagtgtaaaatgcatgctcgatgcaacgcgtgtaaagtacattgcacaggatctgggatgctgtgggtgcacatggttgctggtgcgtttcttcatcgcctgctctttatggagcacctaggccccggggccgtcctggagctaggggacacagcagagaacaaggcagacaaatgtccctgacctcctggagcaaatgcagggggaaagggggacagataataataggacaggcggggaatgcagtttgatggatggtgttcagtgcgatgcagccaaacacagcgggaggggaggaggggagggctggcggggtgggctccagggcggtggtgctgggatcactgttgaagacagacatgcagggcccttgggtgcccggacccctgcccccactgtctctgggatacgacatctgtcgtttgccctcacctttctcttctgtaaaatgggtttgtccaaatgttctgtccactctgccaagcctcttggtgaggacacaagggggcctccagaaagagaacctctccgggcccttcccagcttcctgtctcttcctagtctggggaaatgaaggggagacctggctcccctgggttcccaggccctggggctgtttggggtccctgactccagtttgctccaggtggcagtacaagctggcggcctgcagcgtgagctgtgggagaggggtcgtgcggaggatcctgtattgtgcccgggcccatggggaggacgatggtgaggagatcctgttggacacccagtgccaggggctgcctcgcccggaaccccaggaggcctgcagcctggagccctg

SEQ ID NO: 10599 - DNA, 3022 bp, Homo sapiens
acactgcctaatcgtcccgcccagtagtgagcaggcctgtcccattccatactgaccagattcccagtcaccaaggccccctctcactccgctccactcctcgggctggctctcctgaggatgcaccagcgtcacccccgggcaagatgccctcccctctgtgtggccggaatccttgcctgtggctttctcctgggctgctggggaccctcccatttccagcagagttgtcttcaggctttggagccacaggccgtgtcttcttacttgagccctggtgctcccttaaaaggccgccctccttcccctggcttccagaggcagaggcagaggcagaggcgggctgcaggcggcatcctacacctggagctgctggtggccgtgggccccgatgtcttccaggctcaccaggaggacacagagcgctatgtgctcaccaacctcaacatcggggcagaactgcttcgggacccgtccctgggggctcagtttcgggtgcacctggtgaagatggtcattctgacagagcctgagggtgctccaaatatcacagccaacctcacctcgtccctgctgagcgtctgtgggtggagccagaccatcaaccctgaggacgacacggatcctggccatgctgacctggtcctctatatcactaggtttgacctggagttgcctgatggtaaccggcaggtgcggggcgtcacccagctgggcggtgcctgctccccaacctggagctgcctcattaccgaggacactggcttcgacctgggagtcaccattgcccatgagattgggcacagcttcggcctggagcacgacggcgcgcccggcagcggctgcggccccagcggacacgtgatggcttcggacggcgccgcgccccgcgccggcctcgcctggtccccctgcagccgccggcagctgctgagcctgctcagacccgtccctccgtcgccgctccctctgctggccacccacctctgcgccggcaggagccttagtcttggtcccagccaagagccggctcctggtggggggcgcgggccgagaactcctgttcccactcacaaaaggccacgcttccaaacgcttccatcctcgtgcccactcctccgtcccgcctcctcccggtgtacaccccgggactgagccgggcctgagccgggccttgtcgcagcgcaggacgggcgcgctgcgtgtgggacccgccgcggcctcaacccgggtccgcggggcacccgccggatgcgcagcctggcctctactacagcgccaacgagcagtgccgcgtggccttcggccccaaggctgtcgcctgcaccttcgccagggagcacctggtgagtctgccggcggtggcctgggattggctgtgaggtccctccgcatcacccagctcacgtcccccaaaacgtgcatggatatgtgccaggccctctcctgccacacagacccgctggaccaaagcagctgcagccgcctcctcgttcctctcctggatgggacagaatgtggcgtggagaagtggtgctccaagggtcgctgccgctccctggtggagctgacccccatagcagcagtgcatgggcgctggtctagctggggtccccgaagtccttgctcccgctcctgcggaggaggtgtggtcaccaggaggcggcagtgcaacaaccccagacctgcctttggggggcgtgcatgtgttggtgctgacctccaggccgagatgtgcaacactcaggcctgcgagaagacccagctggagttcatgtcgcaacagtgcgccaggaccgacggccagccgctgcgctcctcccctggcggcgcctccttctaccactggggtgctgctgtaccacacagccaaggggatgctctgtgcagacacatgtgccgggccattggcgagagcttcatcatgaagcgtggagacagcttcctcgatgggacccggtgtatgccaagtggcccccgggaggacgggaccctgagcctgtgtgtgtcgggcagctgcaggacatttggctgtgatggtaggatggactcccagcaggtatgggacaggtgccaggtgtgtggtggggacaacagcacgtgcagcccacggaagggctctttcacagctggcagagcgagagaatatgtcacgtttctgacagttacccccaacctgaccagtgtctacattgccaaccacaggcctctcttcacacacttggcggtgaggatcggagggcgctatgtcgtggctgggaagatgagcatctcccctaacaccacctacccctccctcctggaggatggtcgtgtcgagtacagagtggccctcaccgaggaccggctgccccgcctggaggagatccgcatctggggacccctccaggaagatgctgacatccaggtgggaggtgtcagagcccagctcatgcacatcagctggtggagcaggcctggccttggagaacgagacctgtgtgccaggggcagatggcctggaggctccagtgactgaggggcctggctccgtagatgagaagctgcctgcccctgagccctgtgtcgggatgtcatgtcctccaggctggggccatctggatgccacctctgcaggggagaaggctccctccccatggggcagcatcaggacgggggctcaagctgcacacgtgtggacccctgcggcagggtcgtgctccgtctcctgcgggcgaggtctgatggagctgcgtttcctgtgcatggactctgccctcagggtgcctgtccaggaagagctgtgtggcctggcaagcaagcctgggagccggcgggaggtctgccaggctgtcccgtgccctgctcggtggcagtacaagctggcggcctgcagcgtgagctgtgggagaggggtcgtgcggaggatcctgtattgtgcccgggcccatggggaggacgatggtgaggagatcctgttggacacccagtgccaggggctgcctcgcccggaaccccaggaggcctgcagcctggagccctg

SEQ ID NO: 10600 - DNA, 21856 bp, Homo sapiens
gtcacaaggcacttccagccagtcgcaacggcgggtcgccagcgccgcagtagctcgcgcggtgcctgtcggtagtcgcgtgcggggcggcggggcggcggggcggccggcggcggccatgggagatatcccagccgtgggcctcagctcctggaaggtgacgcggtcgcgggcagggaggcgcgcctgacctaggggagcgcgggacttgggggcgcccgatgggacccaggccggggctggggagaagtgcggcggcctcccctccgcctggccgacgcccgggaaaggcgctgctgaggtggccgcccaccgcccacaagcagcccggcccggcctttcctaaaacggagtcggtgctgcccgccgaggcgctctctgggagaagcgggaacctcggcagccaagcctcagactctggggctgcggccgcggcgttgggcggggctgctctgtggagaggcggagcccttgaagttactcagaactggagcggggatgccgaggggaggccttggcggcgctggactcggccggaacagggaacctcgaagcctcctctccagcaaagagagaaagaaaagttggggccgggcgtggggtgcgggcttgtaatcccagcactttgggaggccgaggcagtaggatcgcctgagctcaggagttcaagaccagccaggtcaacatggcgaaaccctgtttctacaaaaaatgaacaaatcagctgggcttgggggtgcgcgcctgtggtcccagctactcaggaggctgaggtgggaggatcactggagaccaggaagtcgatgctgcagtgagctttgatggcgccactgcactccagccttggggacagagccagaccttgctggaaaaaaaaaaaaaaaaaagaaaaaaggaaaattggaattgctgattaggctttaaaagaaactttgggatctcatgttgttccctgtttagaagcaacctgccctgatgcctgagacatataatcgctctgtgcatttatggggtgcagcgtaatgttttgagccgtgtatacaattgcaatgtggttaaatcaagctaattaacatatctatcacctctctcagttattattgtttgtggtaagatgtttgaaatgtcttgttattttgaaatacacatgtgtagtaaattattgttgactgttggcatcctagtgcgcagtaagtcttaaaagctgtgtctcctgtgtgtttgaaactttgtaccctttgatcagcaactccccattccctccttcctcacctcccccagcccccagcgtcttataaccaccattctattctacgacctttctctgctttgaacttcacaattcctgccagtgatttgagacagcactgactaaaaagcgtttaaaatttgatctttaaaaaaaaaaagctaaacttagttgttgataaaagctataagaagtcatataggaagttagttactgaaggagtcagaatgttcaaggcctgctcatgaaaatattatttaaattatttctcttacctgcttaccaactcttagaggctaggagtgtcgttttgttcatattggttctcagcatctagtgaaggacgtgcatctgtcagcccttcattcagtaagcactcgatggattaaactgttgagtctcttgcttccctttatttctgcaacaatttggtgcaggagtccagactttcgtgcacacaggataaggaaaaattagtgaaaactgtgcttaacaggtcaaaatattctatttatttttcttggactgcaggtgcatcaaattggattaatcataatcactcatcactggtctatgcaaaggcttatttttactcgtctatttttaatagtgaataaacatcacagacctatccgttatctgttgccccagaaatgctgcatcaatggccaaacaccagacctcagtggtgtacagcagcaagtgtattcctcccacacgggaggtcaggagagcagctctgtggaccttggctgggctcagttgggatggttggggctactccacttggctccgcacatctcctgtcctcgtgcggttagttagggagtgttctcaagatgatggctgaagcacaagagagcaaggggagcggtgagatgtctggagacctcagcctgggctcttcattattaggggccacttgatccatctgtgtgcctgatcggtgctgtcttaattactacagttccttgataagcgcccatacctagtagggcaggtcacctctccctgctgttgtagatttacagtgtacaatttgatgagttttgacagatgcatgtacctgggtcctggctttttattttggcaccttactctccactgtaagttttagaactagcttagaaggttccatgagaaactttattggggttttgattggaactacattaaatctgtagaccagcttggagataattgacacctttgtaatgttaaatcttaacttttctacaagcatggtattcttctctgttaataaattgtcctgaatatggttcatttctaacatcttttcatatggttgtatagtttttcctgaagagaatatatgtcttttgttggaattattattgggttcttgatagtgtgttatactactggaaattatatttctctgaagttacattttctacttgtttcacctgctatattcattacacttccagccactttactaaactgtactgttatttctgttaatttgtgttacatttgtttggattttctacacaaatgatcatatcatcagcaaataatggtagtttactttcctttttttccactctttaagcttaaaattgcttcttcttagttgttcaggtgcttctggaaagcacctccagcacagtggccattcttgttttgtacctgattttaaaggatgtaagatggatattttttaatattgatactctttatcagattaattcttttccccgacttactgggagtttagattttgaatctaaactggtattgaatcttaacaaatattgattgagttgacttttgtttttgtactttaatctgttaatattgatgaattacagattttctaatatcaaaccatccttagatatctgagatacactcaacatgggtgtggtatattatcttttcataaatattgttgcatccaatttgcttttattttacttatgaattttgcaacggtattcatgaataagatgaatgtgtgacttttaatatttttgtctgattttgattcagggttatgctagttttgtagaatgagttgagataagtccgtctttttctgttgtttgaaagtctgtgttaaactgagatgatttttttcttgaaaattttatgaaactggtggttttctcttttttttgaattccttgcattctttaataattatgtaactattcaagctttattcttgggttaaatttttctaggaattttcccattttatctcatttttccaagttattgacatatagttattggtaatattttcttttaagtccattttatctgcatgttttactgtccattcgtgtcagttttttaaaaagttggcctcttcatcaacctagccagaagtctgtttattttactgaagtttttcaaagaactgacttctggttttgttgatcttctctgttacatctttgttttctattttattgatgttattcttaatcatatttttatctttccatccaatttcttgggttctttttctaacttaagatggatacttggttcattagctttcaaccactctgaatctgttgcctataaaatgaagataattatgctgctctaactcctagggttaccgtgaagctccagtgagaaagtggtttgtgaactataaagcccttgtcagtcttcagtttaatgagactgcaaacccgcccacccccatagtcttccctagttctagtcccttcccttgcctgagcttcatttagagtgactgttctcttttctgaactaccttattgcttgtagcattatacattcatttaggttttgttatatacttctttttgtatggataccttcgtgtgagtctacacctcagcctttattattggacgctgtggtatctgagtatacaggataaatcttaagcctctttgcatctcagttattattcattctgtacttttttattgctttgatcattcaggaagcataccatctagctcagttttctgcagacactaaaaataacctatagtttttttttcccaaaatatgtaaaggagttggaacttagattattcataaattccttcataactgatattgcctgtttttagactgattatactagtaccaaattagtgacttaattttttatgtattatgttgtccacatgcttgggtgaaaggggagatttgtgttggattcctctgactgtgagaagacactttgttttgttggttttgcaggcttctccagggaaagtgaccgaggcagtgaaagaggccattgacgcagggtaccggcacttcgactgtgcttacttttaccacaatgagagggaggttggagcagggatccgttgcaagatcaaggaaggcgctgtaagacgggaggatctgttcattgccactaaggtagggcttctctatgcaaggctggcagagcttgggtaatgctacatctctggagggctttctactttctttatgggagttgatgactttgtttcatactcaaatcggaataaacaagaatattcacagcttcatgagcatgctgaattatattgtgtgcaggtttgtttcatattatttacttggtcattcaggtaggagtacacagatatcccccaattaacaatacattatcaaaattcagttagtgatgggcactttgactacagtggtgaataggacaaagtcctagccctcatgaagtctgtttacacagcgattcctaaattcagaatcactggggtgattgttaaatgcagattccaaattctaccccacatctgttgaaggagaaactctgggtgtggaggaagcagcttgagcacaggcataaggcaggaagcagcacggcaggtgcaggggtttgtaggaagcttggtgtattagtctgttctcatgctgctgtacgaacatacctgagactgggtagtttataaagaaaaagaggtttaattgactcacagtttcacatagctggggaggcctcacaatcatggcaaaaggcgaaggaggaacaaaggcacgtcttacatggtagcagacaagagaaagtgtacaggggaactgccgtttataaaaccatcagttgtcacgagacttattcactatcaccagaacagcataggaaaaacttgcccccatgattcagttacctcccactgggtccctcccatgacacgtagggattatgggagctacaattcaagatgagatttggctgtggacacaaccaaaccaaatcacttggtctctctggaccacacaatgtcaggttgcaggagtaatgagaagtgaggctgagtggtggataggctaagccatggaagttcagctgtgccctgtcaggagctgtgcttttacctagagacagaggagccctgtttcatttttaaatagggcagcttgtatcatatgtgagtgcaacttgtgttgtatataggatattttagtaggtgaaagaagcttgcatttgaggcagaggcaggaggccaggtaggagacattaacagcagtgcaggtggaagatgatgaaggcctgcactggcacagtgggtgagggagggagaagaggaaatggatgtggagggtattgggagtcaggacctgtggaagatgcagagtggactacgatagtggagaattcaagaattcctttgcttttgatttggaagcagaatgtaagaccatgagatcaggagtcatgggttcatggtctagctgccattcaggagctgtgagtattagggattagatggctcaggctcacagcttcattatttgtaaaatgagactttggatttgagaatttcctgagtaacttcccagctaaagtttcatacctcaagattcaatgttgtttctatagttgaattgccttctgttttactttatggaagttaatgttcttcaggcaccattgctatctgcactagagcagagggtggtaagagagcagccttggtgtgtgcttggccaagcggggagaatgtcttctgaatagtccaggtagggatgtgagcaactggagatttctaaggctcaccctgcaatttggagcaagttgcttctgtgtggatcgtagtcagcagtggaaatatgttcattattttggaaatttggaaaagtcatagaaatgtaattagaaataaataaatcacacatataagcaccacatggagacaactgtgattaacaatggaatacatttacttccagcattcatttttttatttttgtgaagatactgtgctcgtttgttttcatttatttgattcccctttcttttactttcttttactttactttcttttactttactttcatgtttttcccttgctgtgatggagccttcaggttagcttatgtcacagtcaataaaagtaaaatgaggggaaaaacacaagtttttctacataatgagagtgtggaaggagatagctaaaagaagtaaggcagtgtgagctaactcacctataggctaacccacatggttacagtgccttaggaacagagaactcttaatacggagtctgtgtaagtgagaaacacaagatagagattcttctgatttttcgtcatatcttttctgcctgcaggaatttcattttcgtttttgtttttggtcccaatgaatccaaataaccatcaaatatctcttggattcctgagcttcccttgaggaggagtcaggcagaaggatcccagctttggagcctctccctgcaggtgtcctggaactcttctgaggataatgtccctgtcctcccatcagaacttgccgtgttgtatttgtggtcatctcatcttggctattttgggttcaagacagtagctttgtggggctacagaatgggtgccatgctggctctgggtgggcacgtgtgacgctggtcccctctcctttgtagctgtggtgcacctgccataagaagtccttggtggaaacagcatgcagaaagagtctcaaggccttgaagctgaactatttggacctctacctcatacactggcccatgggtttcaaggtaccgttcagtaggtagttcgttctgcagtttgcaggaccttcctccccgtgctcacaccctgtcttgcggtggggagagcatggaccagcattcagggcaggggttcccaggctgcatctgccacatgctagctgcggcatttgggcagtcctcttgatatctctgggcctcagttaaggagaggcttggcttgacctctgaggcccccacaggtctgtctttcaagccagtcgctttttttccaagccaagagagcagtagatttttttcccttaggtttttaggtgaaagcagtgatcagatgaggaaatactgctgctcagagaaagttcccagtgaattcctaggccttgtctcttcttgcaggttctgttctctttggggagtaaatgctgttttgcaatatgggagatatttgcttgttcacctgcagcagggtccagtgggttgtgctggtagttgacttttccacttggttttattctcttaattgcttcacagtgtgtctggagcatgcatctgagccatggctctgtcactaagctaccccagtctggccgtgcaacttccctactctaggcaacctgcttctgcctcacacgggtcctggccaggatgtccctgcatatttgccctgggctgtgatgacagcctgcctgggcaagggcctgatcacacagttgacacctgtgaaatacagaagcccttgcagggatgttcttcctacaatggaatgggtgactgctgctcagcagtcttctacataccaacctgtgagaaggtccctttatgtgtgccacactgttggttactgttttagagtaaaataacaaaaaacacttcattcctagcacagctttacttaactaaggctttgtatctagtttccataaacgatgtgggcagctgtccgttagtgacactgactaagaggggaagatacccagagggcaaaaccagagtgatgtctgtgccttgaaattcattgcatgcagaaaatcataattaaaacaatggctacagctgtattacactcattgccagccagcattgttgtaattatgtacccagaactatgttaggtactttacacatattaactcatttaattctcatgacagttctacaaagttgacactattaacatccctcttggagagatgatgaaactaagatacagaaagtttaaggtttaagttagattattggagcccagaagcatatgctcaggtcagacatttgttacactttccttgccctcatcctttagcagattcctgtctttggatttctgggtcgtagaaaaggaaaaggtctcagatcatccaacaaattacagaagagaataatgcagcatcgtcagcatgtcttctggccagtaggaactgctaggccttgtgtgatgctggacaattagatcagggtccgagtatgagtcccgggctgcaattttgtggaggcttggataaatggcaacatgggatgtggctttaaagtgagactgttagttacttcagctcatcatggaaaatgcctctttcatgtgtatcaggctggaacatgtgacattcttccactgttgtttaggagtgtgattaggtgtcattaaataaacatgcctatgccattcacccttaacatgctacgtgggagtacatgagggaggtagctggattgcacgtcagtgcttctctgaaagatgactttaggttcttgccctttcaagatgtatctctctgccctctacctcctgtgtacctttgtattctcacttccttacctgtcatcatgatggggattctaagaaagaagacaagaccctaacagtggagttaggagagggttgattgggctctataagacatgaagaaaatgcactcctcacccattctttacccgaaattagtaaactattttctggaggcaatgggagaggacaaccttgcatcagtaaggatacagggtcttcctttcccatcttgtgagagatgaacagtgaacatcaggctggcagaggctttgccagccatccagtccaccagccattcatcttttcttagaaaggtgaagactgggcctggtcacatggccaggctggggttgcttagtgacagggctgtggcttggatgcaggtctcctgacacatggttttttttgttttgttttgttttgttttcacacatctcaactctccttcttcgcagcctcctcatccagaatggatcatgagctgcagtgaactttccttctgcctctcacatcctcgagtgcaggacttgcctctggacgagagcaacatggttattcccagtgacacggacttcctggacacgtgggaggtgagctgagccacaccaccaggcagcctcatcctgtgtgggtctccacccaggatgcagtgagccctgagctgcttgtgttcaaagacatcaaggttgtctacctgagatgtggggtttgtggagcaaaaaaggaatcaatacccgaagaactcagagacctcagtgactttcttgttacctttggtttggtatggtgcagttctcttgacacatttgaggggtagctcattatagacctcactttttttctcaaatatttatttatttttttattaaaaaccatatttatttcagaaaatacaggagagttcttctgcattaaactaacattaaaaattttattttcctggcacccagcagtaaccactgttaatgttttatagttcctttttctctcaagcatttcagaatgataaagttggcagcatggaagctcaggctggggaggtgagaccagtgtcggggaaggttaccaagtgtcagcccatttccagggttcagaccaaaaacagccctttactgcaggggcttgcagtaaagacttgagcaggaaattaagggggtggtggatttgagaggttcctggaagttgacccacaggctggggtgggtctcaggcttgggctccagcatggctgaccgagcacgtgtggtcttacagtcttgctaaccatcatgtgggatgggacatcacatttgaggcccaagaagaaagtaagcttaagcttaagcttgctgaggttaggacagagcttgctgggtgaagctctccagggaggaggccagagggaaccctcggacagggaggagtcccaggctaggctccccccatcaatagaagacaaagactgacctaaggtatctgagatgtcaggaccagggcccatgggcctcaactctttctgtcacaatgttttaggtcctaaaagatttgggttaaactctagggtgctcatgtagcaccagcgaggttccggtgattgttgcagagttgaggcagtaactaactgctgcgtgttggcccattggtcactcaggacttgctgctgactacggaccctggcacgaagctatgctcttcctgaagctcaggggcagcctggcttgctggtcagtgaccagctcagagctttaggttgctctgccctaaagtgtcttaaaatagtaagtggagaaggtgggataggagaatggtgatgtatccgtgtgcttaagaaggtcagtgtctcagtggaaagaaaggtgaacaaataaaatccgcagcagacatgcttgccagacatcaggaggaataggaacaagaagagctcacatgtgtcgagtactggacgccagccttagctgacacttcctgtgattccacataacccctaaacatccccgtggcacaggccatgtagacctgtcctgaagctgagaaaattggggccaagtgaggccatgcaacttgcccagcatcctctagccagaaaagatgggactgaaatcagaccttgagtgcagaaatgcttttgaagcttcaagtaaaatattgtaaaaatattgggtccaaccagttttagaataccatacagaactgctgagggacgtagattgtcagtgcagtagacagaagcttcacacccagcagagtcgttctcttataggccatggaggacctggtgatcaccgggctggtgaagaacatcggggtgtcaaacttcaaccatgaacagcttgagaggcttttgaataagcctgggttgaggttcaagccactaaccaaccaggtaagccgatggaagcatcagagagtttaacctgtgtggctggtcccccagctgccacctccacagggctcttctggaaatggaagaatgggtgaagcacaaaacaggcctgttctcctctggcagcactcagaatggtgattaaaggcagcagctaggcaagtggctttcttgaaggtgcatctgggtagatggtactgttggcaggcagggcatgagctggtgcttggccctccatgtgcagtgcaggcaggtcaccaggtgtactcagaagcagtcagggtcctggcaggtgcctcacccttatccaggaacatgggcctcccctctacctcttcccagcctgcagactgcagcaagaaagagtggatgactagatggcttcacgcgaggctcacaggctgctgaaggtgatgcaggcacttcgtttttttaatgcagagaaaagacttgtggggaaataactattgtattttctagactagctttgtatgttcaaagatcatttatacagtacttaagctttttattgaagagtagaagtgcacatgtgaaaatggaactgtataaattctcataaactgagcatagctctgggactagcatccagctcagtaaacagcacgtccagtgcccctgtaacccctgccgagcacagcatcattcccattcccagcagctgggattcacgtctgaactttacacaggtaaaataaaataataatgcaacataaacccctctgtgctcgcctctttcacacagcactgtgtttctgtacatgtgattgtagatagtgctctcttatttcttgtggtattctgttttgtgaattaaccacaattgagttatccattctgctgttaatgggcacttagacagtttccagtttgggactattaagaatagagcatcatgttctatttttttgaataaatatgctttttaaaaaagttctgtatggagtagatgcagaaaagtgtgtgaatcataaaaggcatacatagcttgatgaatttttgcaagtgaacaaactcaagtattcagcacccagaacaagaaaaaagccctcagccattcagtagctcccctgggtcctgttgtagccaccaccatgaagagcaacctggcttctgacccagcttctcatgtagttcagctttgccttgtatacaaccctatatatataagttttgatatatgtttatatggatagtagcttccgttttgtgtcagtatttttagttgttcagcactttaaatacctgggaatgattatggcatagtctgagtagacaaagtggggtggagggtctgctttctgttaggttgatggacaccaggaacacaggatgcggaaggctccagaagggctggcctctcttttggaggctttccaaacaggctgatcttgatgagcttggcatgttcctgagagcaaacgcactattcatagttctctgtaatttacactaaataactatttattttaaatctccttataacctggaattatatgtgagagtttggagaatgtgcaagagacagagatcctgctctctagcttcttaaaattttcattcaagtcacctgtagaatgtatttgtcacatgtagttcctcaatttcattcattcattcagtggatatatttttagcacttcctacatgtctagattgttcttagtgttggtgagacatctatgaacaaaacaaattcaaacaaaaatctctatcttcatgaggcttagatcttggtgacacagaaagacagtgagcaaatatgtaaaatctatgagatgtcagatagtgatagatgctgtagaggaaaataaaggccgggggagatgagagctatggtgtgttaacaatctttatctgagtgctcagggaaggccctgcagagcaggtggtattggaacattcagatgatgtaggtgtccccaaggccgtggactcagagaccatgacacctgctggcctcttggagattgctctgtccagactcctcacaacagaaacacttaggcctggagctgggccccatggctactcggtgacagccaagactttgacgcaggtcttctcttgtagagcttttcttgaacactagtggtctgaattttatgtaagctatgattctgttatagattgagtgccacccatatcttactcagaagaatctgatcagtttttgccaatccagagatgtgtccgtgactgcttaccgtcctcttggtggctcgtggtaaggatacctcagtggtgtgttagtcagagtccgactgggaagtagatgccaccttctcatttccttgggatgactgagggagggcttaatggaggttttgacagggtgtggagggatggtactatagggggctgtccacacctctcaagcctgggattgaaggcatggtttattattggaagccagggagtggctgtgagtgggctgccctgggagggtcaggacctcttcagggacgtaaatcagcctggagtgacccctttgctgagttccccaccagggtgtcagcccccttctgacctcctgacaaggatgctccccaggcctctccatggttggatgaggcaaagcctgctgtcatctttacccaggccctcctgcagctgtactgtgctcccaagatcagctaagagacctccagccattcagccacctaagccagaagcttggaaatcatcccttcccacatcccgagtccaatccagcaccaaaatctattgattattctgccaggagaagttggactttgtttcatgatttcatttctgccatcactgtcactgccttagttaagtagcattcccgaggtcattagaggagcccctcagctccctccctggcccactccattccaatccattgctcccagtgggagctgaaaggagctgtctctttcctttcctatgatcctatcactttcctgggaaaaattcttcaggtcttggtgtggcctgtgagatgcagccagcctgacctctgcctgcctctggcctcattccttcccatccctgtgaacatcctgggcttcagccacatgaagctgctgtggggtccttggatagaacatgttttctcacctctgtgcctttgcaaatactgttctctttacccacaaatcttttttttttaaatctggcaaactccagtttctaatttaaggttcagtccagcatcatcttctccaggaagccctcctgaccccttatttatgtttcttacacagcccttgtcacactgtcttgtgattttcttctcagtcccttccactagtcaaagcaaccagagtgcaggtatcttatttattcttctcttcccagcttctagctcagcacctgggaaacattgggaaccccgaaaaggctgaaattacttgagttttatcacctgtgtgttttccttgtgaagtggggcatgtgtgtttgaacttggaaccagctggagagtctctagaaggctgggtccattccacagctgagctttggggtagcggatcctctgatggagtgagtcagggagctctcagactgactggggtgggcaactgggcactctgtttggttccttcaggagacctcgaggacgatactagcacaatgcctgaaacagggtgatggctcagtacacactcgttaaaaaactgaatcctcagagttctcagggcccacccgtgcctgagcagaggatgcacagggactctatgaccatcttcaaaaccacttttaaaggttccacgtgttcacaatattcactttttagtagtattttgggcgaacttttctgaaagtatcatcatcaacaaatatcgattcgctgtgctgtgccagggtgtacagtagaagctgagaagtcagagagccctgagagtcgggggagtcaaagcttgagagcccactggctgcatgcgctgacatggccacctggtttttgaggagaaacaccaaatacacatgaaaagtgatgtcgtgtagccttgttcaccaaagtgttagcagtggttatctccatactggaaatgtggggcgatgtgcttttctgcattttaaaatttcctgtagtcggcatgtgtcatgatcagaaaataaatctttcattttggacaaagatttcttctttctaaagaaaggggcatccatgttggatctcctggctcactcccctgtactgtgtctctctagtgagggggttgacctgatagacaaccctgtgatcaagaggattgcaaaggagcacggcaagtctcctgctcaggtagggagggagggctgttctgagccaggtggggttctctgaccgctctacatccttggggagtcctggggcttggcaggtcccaggaagggactggctcacccaggtgagtccatgactcattagaacctcccagcgtcaagcagaatttggtctgcagccgcatttctagtcactcaagccatgtactcttgcctccgagcctgtctagactcagaggaggagtttccaggccttctccctctgccccaccaactgcatgcatggttagtatgagatggtacagaaaagttatttattctagtcttctttgttctaatgtccagtggggggctgggcgcatgttaaggaattctcattaagcagattctctgatctcctccttgggctgatggctgtcattaccaacatattgacagagctgctcagtgaatgccagtaacaatagctgctgtcattgattcttggactcttactgcatgataaaactcacatgttagaaaataacttagactacatgggatttccctttgtgtgatagtagactttttgtttccttgcagattttgatccgatttcaaatccagaggaatgtgatagtgatccccggatctatcaccccaagtcacattaaagagaatatccaggtaggtgtattccttcttttatttggcgggtttcagatcatgtgttagatgggaagggatgactgctgtagcatacagcctcagggttgcggagcttgatgcaacaggggcttctccctctgcactgtgggtgttggtggttgaccttccctcagcgatcaaaggacccaggctccttccatcttagggccctttctcccctagggtgttggtgtcttctccatccagcccaagattaggaaggagggaagagcatcttgttgggatgatttgtgtgggccaggctggagcatgtgcaccagtcacatggctgcgctcgcccacaggggaggctggatgtctcctaagcgtgcactcaggagaaaggggaggcagttggtggacaggtcaccacctctgtcgcatggaggcatgcccacgtggcctgagggcactgctttgagttgtgtgggaagattctggtcctgactcctgtctagtgacttctgagaggcaggagtgaagactggaacaggtggagcgtgtgcagaacacagagaggcagcggtccttttcagggcaatcttttcacctaagccaagaaccacagaagtgtgtgaagtgtgtgaaatctatttttggagctatgtgaaggaactctgtgtggcttcaaccctgacgacatagtctgtaacccagtcagggccatggacttgggattcccacagtctcactcacgatttaactgctgcatgacctctctcagcctttgtttcttcagtagagcacccttctgataggatcactgagggtgaaatgtaatgatacagtgaagggatagcatagtgcctggcgtatggaagtacctgatgctcttagctgccagtcaccctcagtcacggatgtcacctgtgatgatctcacaggcaacgacaggcattggtggcagcccacacccattgatcatgtcagcataggtgtgtgtgatcctggggccagctgcacagctgcattttcatagacagcatgtgcccaggagtatgctccctcttggtgtctgagctgcccatgagctccacaaggcactgctgcatcctgagggctcggtttggttgtgccaagcaagcatcgccattggggtttattgacccatctgtaacagtgcctgtgccctcaggcttgctgtgcatgccaagctggctgcaggtgggcatagccctgccattggcaggagaggcaggccacccacgatgggaggaccaggggatgggcaggttcctcatggtgtctacagcactctccctgccgggcccttgtccagctcacctgctgcccgcatgcccttctcctctcctttctcaggcgtcctgctctttgaatggcccagagcagctctgggtgaccagccaaccttaagcctgaaaggtatggatttggctaaactgtaaactcagttctctccaatggctgctgacgggcctcttggaacgagactgcaggtctcttgtagtggttagaattgagcactgctgactgaccggcatctgctccacatggtgtgtccggaattggtgggttcttggtctcactgacttcaggaatgaagccgcggacccttgcggtgagtgttacagttcttaaaggtggtgtgtccggagtttgttccttctgatgttcggatgtgttcggagtttcttccttctggtgggttcatggtctcactggcttaggagtgaaggtgaggacctttgcggtgagtgttacagctcttaaggtggcgcgtctggagttgttcgttcctcccggtgggttcgtggtcttattggcttcaggagtgatgctgcagacctttgcggtgagtgttacagctcataaaggcagtgtggacccaaagagtgagcagcagcaagatctattgcaaagaccgaaacaacaaagcttccgcagtgtggaaggggacgggagtgggttgccagtgctggcttgggcagcctgcttttattctcttatctggccccacccacatcctgctgattggtccattttacagagagccgagtggtctgttttgacagggtgctgattggtgcatttacaatccctgagctagacacaaaggttctccacatccccactagattagctagatacagagtgtcaacacaaaggttctccaagtccccaccagagtagctagatacagagtgtcgattggtgcattcacaaaccgtgagctagacacagggtgctgattggtgtgtttacaaaccgtgagctagatacagagtgccgattggtgtatttacaatcccctagctagacataaaggttttccaagtccccaccagtcaggagcctagctggcttcacccagtggatcccgcacggggccgcaggtgaaggcgcctgccagtcccgggcggtgtgccggcactcctcagcccttgggtggtctatgggacctggtgccatggagcagggggcggtgctcgttggggaggctcctgctgcagaggagcccacggagggtcaggggaggctcaggcatggcgggctgcaggtcccgagccctgccctgcggggaggcagctaaggcctggcgagaaatggagcgcagcgccggtgggccagcactgctgggggacctagcacgccctcctcagccgctggcccgagtgctaagcccctcattgcccagggccagcagggcttgccagccgctccgagtgccgggcccaccaagcccacacccacccggaattcgtgctggcctgcaagcaccacgcgcagccccgattcccaccggcgtctctccctccacacctccccgcaagctgagggagccgactccggcctcggccagcccaggaaggggctcccacagtgcaacggtgggctgaagggctcctcaagtgccgccaaagtgggagcccaggcagaggaggcccggagagctagtgagggttgtgagggctgccagcatgctgtcacccctcaatgggggctgccagcatgctgtcacccctcaatgggggcctggcctaaggtgccctctgtgccctgcagggcagctaggattgcccctgggaggacataggctggggaagattatctgaccctcccatgggaggagccaccgagtgagcagctcagcaggtggcagggggccacatcgccccagttctgcccttctgccgtcgtggctctcaatgcccgggatccccatggcctagcaaaagtgaatgtgacacggggaccttgggcccagctgagatgcccccattcctctgttaggtctgctacacactgaggggaaatgccatcctcaggcagtgagacaggaccaggctgacgtgagacctgagggccaaagccgaagtgatctgatggctgaggacagacagcagcggcgggttaggaggggccggaggaagtgcttatgctgtcaggaggaggtgggagccaggtccacaagactcaccagggaggagaaaggcatccagtgcagggggctgccccggcccgccccctgtggccccagtgccgctcagaactgctgctgcaaggctgcctaccctttataaggagtcttctagaactgcttgctgttccccttaaacccaagaatccgcctaccccggccccagcactccccactacctccagatgacacgctgaggctactttctcctgccctcaggaggggaaggctcttgtggggaagagcctggggtgctccaggtccttgcattggaatcactcagtgcacccctcctcccgccgcaagacagccactctgccaggccggggtggatgctgatgctgtggccatgggtcctgttcctcagtgtgtggggacaacaaaaggggagggaagggctgagaagaatactattttcaaggaagaaaaatggatcactcagaaaatgtactctgtgatatgggtactgttagagttcatagtcccagggccaagtgggtccctagttggcaggtgtatggaacaaattgttttgttggggttttgaggggtagcagagtcagtgggaaaaattctgtgccatccttttttttttttttgagatggagtctcactctgtcatccaagctggagtgcagtggtgcgatctcggctcactgcaacctccacctcctgggttcaagcggttctcctgcctcagcctcctgaatagctgggactagaggcatatgccaccatgtccggctaatttttaaatttttagtagagatggggtttcaccatattggccaggctggtctcaaactcctgacctcgtggtctgcccatcttggcctcccaaagtgctgggattacaggcgtgaaccaccgcgcccagccgctataacttttaacaattcccatatgtcctttattccactaagatgagtgcagtatatatttccatctgtccaaggcttcctaaatgtagccaaggccaagccaacaccagtcacatgatcaaaatcaaagggcatttggggaatccaggctgtgattcagggaagttccaagtgtctgatgaagtgtttgttttacatctttgtgtcccttgcaggtctagcactgtgctatgtaggtaacatgtgctccattaaatgtgaattaaactaagttttctacaaacattgtgttttggttccaggtgtttgattttgaattaacacagcacgatatggataacatcctcagcctaaacaggaatctccgactggccatgttccccatgtaaatatggctccttctttttaaaacagagggaagaatatacagattgaatgattggtgtctgaataggtatttatcatacacattttagattaattaaactttctcattataattctttcctgtttgaagatgagccactgaatgaagctaatttcatgcactggggagtttaaaagtatataccatttaaaatgtttctcttaaaaaataatcattctttgttcctatttttgatttgtttttctgtttttcagaactaaaaatcacaaagactatcctttccacatagaatactgaggacgcttccccttccttgtttctgctcagcccagatgcacagacactattggcaatgttgaccctcctctgtcatcacagcgccagggcagctgtgcctgggacaggagccacacagtcagagggggatgtaagagccaccttctctgacaaatctggagaattgagtgtgttctaagtgaaggcaatggggtttctccaagacagcctgtgtggcctctactctgaacaaatacactgatgagtcatcagtgaaatttgccttcacattttaagaaaactttatcttatggagttatttaagccatctacagagctgaggaaacagtgtaatgtgtctctgccccattgcgcagctccacccattgtgccccaggccagcccgcgtcacctacacttccttctgtgccctgccagtgacccccaggttattctaaagcagagtccttcccttcccccagtgagaaggaaaatgggataagtctgggacactgtttcagttcaataaagaggcttttttcttccttaaaaa

SEQ ID NO: 10601 - DNA, 1613 bp, Homo sapiens
gtcacaaggcacttccagccagtcgcaacggcgggtcgccagcgccgcagtagctcgcgcggtgcctgtcggtagtcgcgtgcggggcggcggggcggcggggcggccggcggcggccatgggagatatcccagccgtgggcctcagctcctggaaggcttctccagggaaagtgaccgaggcagtgaaagaggccattgacgcagggtaccggcacttcgactgtgcttacttttaccacaatgagagggaggttggagcagggatccgttgcaagatcaaggaaggcgctgtaagacgggaggatctgttcattgccactaagctgtggtgcacctgccataagaagtccttggtggaaacagcatgcagaaagagtctcaaggccttgaagctgaactatttggacctctacctcatacactggcccatgggtttcaagcctcctcatccagaatggatcatgagctgcagtgaactttccttctgcctctcacatcctcgagtgcaggacttgcctctggacgagagcaacatggttattcccagtgacacggacttcctggacacgtgggaggccatggaggacctggtgatcaccgggctggtgaagaacatcggggtgtcaaacttcaaccatgaacagcttgagaggcttttgaataagcctgggttgaggttcaagccactaaccaaccagattgagtgccacccatatcttactcagaagaatctgatcagtttttgccaatccagagatgtgtccgtgactgcttaccgtcctcttggtggctcgtgtgagggggttgacctgatagacaaccctgtgatcaagaggattgcaaaggagcacggcaagtctcctgctcagattttgatccgatttcaaatccagaggaatgtgatagtgatccccggatctatcaccccaagtcacattaaagagaatatccaggtgtttgattttgaattaacacagcacgatatggataacatcctcagcctaaacaggaatctccgactggccatgttccccataactaaaaatcacaaagactatcctttccacatagaatactgaggacgcttccccttccttgtttctgctcagcccagatgcacagacactattggcaatgttgaccctcctctgtcatcacagcgccagggcagctgtgcctgggacaggagccacacagtcagagggggatgtaagagccaccttctctgacaaatctggagaattgagtgtgttctaagtgaaggcaatggggtttctccaagacagcctgtgtggcctctactctgaacaaatacactgatgagtcatcagtgaaatttgccttcacattttaagaaaactttatcttatggagttatttaagccatctacagagctgaggaaacagtgtaatgtgtctctgccccattgcgcagctccacccattgtgccccaggccagcccgcgtcacctacacttccttctgtgccctgccagtgacccccaggttattctaaagcagagtccttcccttcccccagtgagaaggaaaatgggataagtctgggacactgtttcagttcaataaagaggcttttttcttccttaaaaa

SEQ ID NO: 10602 - DNA, 21450 bp, Homo sapiens
gcggggcggcggggcggccggcggcggccatgggagatatcccagccgtgggcctcagctcctggaaggtgacgcggtcgcgggcagggaggcgcgcctgacctaggggagcgcgggacttgggggcgcccgatgggacccaggccggggctggggagaagtgcggcggcctcccctccgcctggccgacgcccgggaaaggcgctgctgaggtggccgcccaccgcccacaagcagcccggcccggcctttcctaaaacggagtcggtgctgcccgccgaggcgctctctgggagaagcgggaacctcggcagccaagcctcagactctggggctgcggccgcggcgttgggcggggctgctctgtggagaggcggagcccttgaagttactcagaactggagcggggatgccgaggggaggccttggcggcgctggactcggccggaacagggaacctcgaagcctcctctccagcaaagagagaaagaaaagttggggccgggcgtggggtgcgggcttgtaatcccagcactttgggaggccgaggcagtaggatcgcctgagctcaggagttcaagaccagccaggtcaacatggcgaaaccctgtttctacaaaaaatgaacaaatcagctgggcttgggggtgcgcgcctgtggtcccagctactcaggaggctgaggtgggaggatcactggagaccaggaagtcgatgctgcagtgagctttgatggcgccactgcactccagccttggggacagagccagaccttgctggaaaaaaaaaaaaaaaaaagaaaaaaggaaaattggaattgctgattaggctttaaaagaaactttgggatctcatgttgttccctgtttagaagcaacctgccctgatgcctgagacatataatcgctctgtgcatttatggggtgcagcgtaatgttttgagccgtgtatacaattgcaatgtggttaaatcaagctaattaacatatctatcacctctctcagttattattgtttgtggtaagatgtttgaaatgtcttgttattttgaaatacacatgtgtagtaaattattgttgactgttggcatcctagtgcgcagtaagtcttaaaagctgtgtctcctgtgtgtttgaaactttgtaccctttgatcagcaactccccattccctccttcctcacctcccccagcccccagcgtcttataaccaccattctattctacgacctttctctgctttgaacttcacaattcctgccagtgatttgagacagcactgactaaaaagcgtttaaaatttgatctttaaaaaaaaaaagctaaacttagttgttgataaaagctataagaagtcatataggaagttagttactgaaggagtcagaatgttcaaggcctgctcatgaaaatattatttaaattatttctcttacctgcttaccaactcttagaggctaggagtgtcgttttgttcatattggttctcagcatctagtgaaggacgtgcatctgtcagcccttcattcagtaagcactcgatggattaaactgttgagtctcttgcttccctttatttctgcaacaatttggtgcaggagtccagactttcgtgcacacaggataaggaaaaattagtgaaaactgtgcttaacaggtcaaaatattctatttatttttcttggactgcaggtgcatcaaattggattaatcataatcactcatcactggtctatgcaaaggcttatttttactcgtctatttttaatagtgaataaacatcacagacctatccgttatctgttgccccagaaatgctgcatcaatggccaaacaccagacctcagtggtgtacagcagcaagtgtattcctcccacacgggaggtcaggagagcagctctgtggaccttggctgggctcagttgggatggttggggctactccacttggctccgcacatctcctgtcctcgtgcggttagttagggagtgttctcaagatgatggctgaagcacaagagagcaaggggagcggtgagatgtctggagacctcagcctgggctcttcattattaggggccacttgatccatctgtgtgcctgatcggtgctgtcttaattactacagttccttgataagcgcccatacctagtagggcaggtcacctctccctgctgttgtagatttacagtgtacaatttgatgagttttgacagatgcatgtacctgggtcctggctttttattttggcaccttactctccactgtaagttttagaactagcttagaaggttccatgagaaactttattggggttttgattggaactacattaaatctgtagaccagcttggagataattgacacctttgtaatgttaaatcttaacttttctacaagcatggtattcttctctgttaataaattgtcctgaatatggttcatttctaacatcttttcatatggttgtatagtttttcctgaagagaatatatgtcttttgttggaattattattgggttcttgatagtgtgttatactactggaaattatatttctctgaagttacattttctacttgtttcacctgctatattcattacacttccagccactttactaaactgtactgttatttctgttaatttgtgttacatttgtttggattttctacacaaatgatcatatcatcagcaaataatggtagtttactttcctttttttccactctttaagcttaaaattgcttcttcttagttgttcaggtgcttctggaaagcacctccagcacagtggccattcttgttttgtacctgattttaaaggatgtaagatggatattttttaatattgatactctttatcagattaattcttttccccgacttactgggagtttagattttgaatctaaactggtattgaatcttaacaaatattgattgagttgacttttgtttttgtactttaatctgttaatattgatgaattacagattttctaatatcaaaccatccttagatatctgagatacactcaacatgggtgtggtatattatcttttcataaatattgttgcatccaatttgcttttattttacttatgaattttgcaacggtattcatgaataagatgaatgtgtgacttttaatatttttgtctgattttgattcagggttatgctagttttgtagaatgagttgagataagtccgtctttttctgttgtttgaaagtctgtgttaaactgagatgatttttttcttgaaaattttatgaaactggtggttttctcttttttttgaattccttgcattctttaataattatgtaactattcaagctttattcttgggttaaatttttctaggaattttcccattttatctcatttttccaagttattgacatatagttattggtaatattttcttttaagtccattttatctgcatgttttactgtccattcgtgtcagttttttaaaaagttggcctcttcatcaacctagccagaagtctgtttattttactgaagtttttcaaagaactgacttctggttttgttgatcttctctgttacatctttgttttctattttattgatgttattcttaatcatatttttatctttccatccaatttcttgggttctttttctaacttaagatggatacttggttcattagctttcaaccactctgaatctgttgcctataaaatgaagataattatgctgctctaactcctagggttaccgtgaagctccagtgagaaagtggtttgtgaactataaagcccttgtcagtcttcagtttaatgagactgcaaacccgcccacccccatagtcttccctagttctagtcccttcccttgcctgagcttcatttagagtgactgttctcttttctgaactaccttattgcttgtagcattatacattcatttaggttttgttatatacttctttttgtatggataccttcgtgtgagtctacacctcagcctttattattggacgctgtggtatctgagtatacaggataaatcttaagcctctttgcatctcagttattattcattctgtacttttttattgctttgatcattcaggaagcataccatctagctcagttttctgcagacactaaaaataacctatagtttttttttcccaaaatatgtaaaggagttggaacttagattattcataaattccttcataactgatattgcctgtttttagactgattatactagtaccaaattagtgacttaattttttatgtattatgttgtccacatgcttgggtgaaaggggagatttgtgttggattcctctgactgtgagaagacactttgttttgttggttttgcaggcttctccagggaaagtgaccgaggcagtgaaagaggccattgacgcagggtaccggcacttcgactgtgcttacttttaccacaatgagagggaggttggagcagggatccgttgcaagatcaaggaaggcgctgtaagacgggaggatctgttcattgccactaaggtagggcttctctatgcaaggctggcagagcttgggtaatgctacatctctggagggctttctactttctttatgggagttgatgactttgtttcatactcaaatcggaataaacaagaatattcacagcttcatgagcatgctgaattatattgtgtgcaggtttgtttcatattatttacttggtcattcaggtaggagtacacagatatcccccaattaacaatacattatcaaaattcagttagtgatgggcactttgactacagtggtgaataggacaaagtcctagccctcatgaagtctgtttacacagcgattcctaaattcagaatcactggggtgattgttaaatgcagattccaaattctaccccacatctgttgaaggagaaactctgggtgtggaggaagcagcttgagcacaggcataaggcaggaagcagcacggcaggtgcaggggtttgtaggaagcttggtgtattagtctgttctcatgctgctgtacgaacatacctgagactgggtagtttataaagaaaaagaggtttaattgactcacagtttcacatagctggggaggcctcacaatcatggcaaaaggcgaaggaggaacaaaggcacgtcttacatggtagcagacaagagaaagtgtacaggggaactgccgtttataaaaccatcagttgtcacgagacttattcactatcaccagaacagcataggaaaaacttgcccccatgattcagttacctcccactgggtccctcccatgacacgtagggattatgggagctacaattcaagatgagatttggctgtggacacaaccaaaccaaatcacttggtctctctggaccacacaatgtcaggttgcaggagtaatgagaagtgaggctgagtggtggataggctaagccatggaagttcagctgtgccctgtcaggagctgtgcttttacctagagacagaggagccctgtttcatttttaaatagggcagcttgtatcatatgtgagtgcaacttgtgttgtatataggatattttagtaggtgaaagaagcttgcatttgaggcagaggcaggaggccaggtaggagacattaacagcagtgcaggtggaagatgatgaaggcctgcactggcacagtgggtgagggagggagaagaggaaatggatgtggagggtattgggagtcaggacctgtggaagatgcagagtggactacgatagtggagaattcaagaattcctttgcttttgatttggaagcagaatgtaagaccatgagatcaggagtcatgggttcatggtctagctgccattcaggagctgtgagtattagggattagatggctcaggctcacagcttcattatttgtaaaatgagactttggatttgagaatttcctgagtaacttcccagctaaagtttcatacctcaagattcaatgttgtttctatagttgaattgccttctgttttactttatggaagttaatgttcttcaggcaccattgctatctgcactagagcagagggtggtaagagagcagccttggtgtgtgcttggccaagcggggagaatgtcttctgaatagtccaggtagggatgtgagcaactggagatttctaaggctcaccctgcaatttggagcaagttgcttctgtgtggatcgtagtcagcagtggaaatatgttcattattttggaaatttggaaaagtcatagaaatgtaattagaaataaataaatcacacatataagcaccacatggagacaactgtgattaacaatggaatacatttacttccagcattcatttttttatttttgtgaagatactgtgctcgtttgttttcatttatttgattcccctttcttttactttcttttactttactttcttttactttactttcatgtttttcccttgctgtgatggagccttcaggttagcttatgtcacagtcaataaaagtaaaatgaggggaaaaacacaagtttttctacataatgagagtgtggaaggagatagctaaaagaagtaaggcagtgtgagctaactcacctataggctaacccacatggttacagtgccttaggaacagagaactcttaatacggagtctgtgtaagtgagaaacacaagatagagattcttctgatttttcgtcatatcttttctgcctgcaggaatttcattttcgtttttgtttttggtcccaatgaatccaaataaccatcaaatatctcttggattcctgagcttcccttgaggaggagtcaggcagaaggatcccagctttggagcctctccctgcaggtgtcctggaactcttctgaggataatgtccctgtcctcccatcagaacttgccgtgttgtatttgtggtcatctcatcttggctattttgggttcaagacagtagctttgtggggctacagaatgggtgccatgctggctctgggtgggcacgtgtgacgctggtcccctctcctttgtagctgtggtgcacctgccataagaagtccttggtggaaacagcatgcagaaagagtctcaaggccttgaagctgaactatttggacctctacctcatacactggcccatgggtttcaaggtaccgttcagtaggtagttcgttctgcagtttgcaggaccttcctccccgtgctcacaccctgtcttgcggtggggagagcatggaccagcattcagggcaggggttcccaggctgcatctgccacatgctagctgcggcatttgggcagtcctcttgatatctctgggcctcagttaaggagaggcttggcttgacctctgaggcccccacaggtctgtctttcaagccagtcgctttttttccaagccaagagagcagtagatttttttcccttaggtttttaggtgaaagcagtgatcagatgaggaaatactgctgctcagagaaagttcccagtgaattcctaggccttgtctcttcttgcaggttctgttctctttggggagtaaatgctgttttgcaatatgggagatatttgcttgttcacctgcagcagggtccagtgggttgtgctggtagttgacttttccacttggttttattctcttaattgcttcacagtgtgtctggagcatgcatctgagccatggctctgtcactaagctaccccagtctggccgtgcaacttccctactctaggcaacctgcttctgcctcacacgggtcctggccaggatgtccctgcatatttgccctgggctgtgatgacagcctgcctgggcaagggcctgatcacacagttgacacctgtgaaatacagaagcccttgcagggatgttcttcctacaatggaatgggtgactgctgctcagcagtcttctacataccaacctgtgagaaggtccctttatgtgtgccacactgttggttactgttttagagtaaaataacaaaaaacacttcattcctagcacagctttacttaactaaggctttgtatctagtttccataaacgatgtgggcagctgtccgttagtgacactgactaagaggggaagatacccagagggcaaaaccagagtgatgtctgtgccttgaaattcattgcatgcagaaaatcataattaaaacaatggctacagctgtattacactcattgccagccagcattgttgtaattatgtacccagaactatgttaggtactttacacatattaactcatttaattctcatgacagttctacaaagttgacactattaacatccctcttggagagatgatgaaactaagatacagaaagtttaaggtttaagttagattattggagcccagaagcatatgctcaggtcagacatttgttacactttccttgccctcatcctttagcagattcctgtctttggatttctgggtcgtagaaaaggaaaaggtctcagatcatccaacaaattacagaagagaataatgcagcatcgtcagcatgtcttctggccagtaggaactgctaggccttgtgtgatgctggacaattagatcagggtccgagtatgagtcccgggctgcaattttgtggaggcttggataaatggcaacatgggatgtggctttaaagtgagactgttagttacttcagctcatcatggaaaatgcctctttcatgtgtatcaggctggaacatgtgacattcttccactgttgtttaggagtgtgattaggtgtcattaaataaacatgcctatgccattcacccttaacatgctacgtgggagtacatgagggaggtagctggattgcacgtcagtgcttctctgaaagatgactttaggttcttgccctttcaagatgtatctctctgccctctacctcctgtgtacctttgtattctcacttccttacctgtcatcatgatggggattctaagaaagaagacaagaccctaacagtggagttaggagagggttgattgggctctataagacatgaagaaaatgcactcctcacccattctttacccgaaattagtaaactattttctggaggcaatgggagaggacaaccttgcatcagtaaggatacagggtcttcctttcccatcttgtgagagatgaacagtgaacatcaggctggcagaggctttgccagccatccagtccaccagccattcatcttttcttagaaaggtgaagactgggcctggtcacatggccaggctggggttgcttagtgacagggctgtggcttggatgcaggtctcctgacacatggttttttttgttttgttttgttttgttttcacacatctcaactctccttcttcgcagcctcctcatccagaatggatcatgagctgcagtgaactttccttctgcctctcacatcctcgagtgcaggacttgcctctggacgagagcaacatggttattcccagtgacacggacttcctggacacgtgggaggtgagctgagccacaccaccaggcagcctcatcctgtgtgggtctccacccaggatgcagtgagccctgagctgcttgtgttcaaagacatcaaggttgtctacctgagatgtggggtttgtggagcaaaaaaggaatcaatacccgaagaactcagagacctcagtgactttcttgttacctttggtttggtatggtgcagttctcttgacacatttgaggggtagctcattatagacctcactttttttctcaaatatttatttatttttttattaaaaaccatatttatttcagaaaatacaggagagttcttctgcattaaactaacattaaaaattttattttcctggcacccagcagtaaccactgttaatgttttatagttcctttttctctcaagcatttcagaatgataaagttggcagcatggaagctcaggctggggaggtgagaccagtgtcggggaaggttaccaagtgtcagcccatttccagggttcagaccaaaaacagccctttactgcaggggcttgcagtaaagacttgagcaggaaattaagggggtggtggatttgagaggttcctggaagttgacccacaggctggggtgggtctcaggcttgggctccagcatggctgaccgagcacgtgtggtcttacagtcttgctaaccatcatgtgggatgggacatcacatttgaggcccaagaagaaagtaagcttaagcttaagcttgctgaggttaggacagagcttgctgggtgaagctctccagggaggaggccagagggaaccctcggacagggaggagtcccaggctaggctccccccatcaatagaagacaaagactgacctaaggtatctgagatgtcaggaccagggcccatgggcctcaactctttctgtcacaatgttttaggtcctaaaagatttgggttaaactctagggtgctcatgtagcaccagcgaggttccggtgattgttgcagagttgaggcagtaactaactgctgcgtgttggcccattggtcactcaggacttgctgctgactacggaccctggcacgaagctatgctcttcctgaagctcaggggcagcctggcttgctggtcagtgaccagctcagagctttaggttgctctgccctaaagtgtcttaaaatagtaagtggagaaggtgggataggagaatggtgatgtatccgtgtgcttaagaaggtcagtgtctcagtggaaagaaaggtgaacaaataaaatccgcagcagacatgcttgccagacatcaggaggaataggaacaagaagagctcacatgtgtcgagtactggacgccagccttagctgacacttcctgtgattccacataacccctaaacatccccgtggcacaggccatgtagacctgtcctgaagctgagaaaattggggccaagtgaggccatgcaacttgcccagcatcctctagccagaaaagatgggactgaaatcagaccttgagtgcagaaatgcttttgaagcttcaagtaaaatattgtaaaaatattgggtccaaccagttttagaataccatacagaactgctgagggacgtagattgtcagtgcagtagacagaagcttcacacccagcagagtcgttctcttataggccatggaggacctggtgatcaccgggctggtgaagaacatcggggtgtcaaacttcaaccatgaacagcttgagaggcttttgaataagcctgggttgaggttcaagccactaaccaaccaggtaagccgatggaagcatcagagagtttaacctgtgtggctggtcccccagctgccacctccacagggctcttctggaaatggaagaatgggtgaagcacaaaacaggcctgttctcctctggcagcactcagaatggtgattaaaggcagcagctaggcaagtggctttcttgaaggtgcatctgggtagatggtactgttggcaggcagggcatgagctggtgcttggccctccatgtgcagtgcaggcaggtcaccaggtgtactcagaagcagtcagggtcctggcaggtgcctcacccttatccaggaacatgggcctcccctctacctcttcccagcctgcagactgcagcaagaaagagtggatgactagatggcttcacgcgaggctcacaggctgctgaaggtgatgcaggcacttcgtttttttaatgcagagaaaagacttgtggggaaataactattgtattttctagactagctttgtatgttcaaagatcatttatacagtacttaagctttttattgaagagtagaagtgcacatgtgaaaatggaactgtataaattctcataaactgagcatagctctgggactagcatccagctcagtaaacagcacgtccagtgcccctgtaacccctgccgagcacagcatcattcccattcccagcagctgggattcacgtctgaactttacacaggtaaaataaaataataatgcaacataaacccctctgtgctcgcctctttcacacagcactgtgtttctgtacatgtgattgtagatagtgctctcttatttcttgtggtattctgttttgtgaattaaccacaattgagttatccattctgctgttaatgggcacttagacagtttccagtttgggactattaagaatagagcatcatgttctatttttttgaataaatatgctttttaaaaaagttctgtatggagtagatgcagaaaagtgtgtgaatcataaaaggcatacatagcttgatgaatttttgcaagtgaacaaactcaagtattcagcacccagaacaagaaaaaagccctcagccattcagtagctcccctgggtcctgttgtagccaccaccatgaagagcaacctggcttctgacccagcttctcatgtagttcagctttgccttgtatacaaccctatatatataagttttgatatatgtttatatggatagtagcttccgttttgtgtcagtatttttagttgttcagcactttaaatacctgggaatgattatggcatagtctgagtagacaaagtggggtggagggtctgctttctgttaggttgatggacaccaggaacacaggatgcggaaggctccagaagggctggcctctcttttggaggctttccaaacaggctgatcttgatgagcttggcatgttcctgagagcaaacgcactattcatagttctctgtaatttacactaaataactatttattttaaatctccttataacctggaattatatgtgagagtttggagaatgtgcaagagacagagatcctgctctctagcttcttaaaattttcattcaagtcacctgtagaatgtatttgtcacatgtagttcctcaatttcattcattcattcagtggatatatttttagcacttcctacatgtctagattgttcttagtgttggtgagacatctatgaacaaaacaaattcaaacaaaaatctctatcttcatgaggcttagatcttggtgacacagaaagacagtgagcaaatatgtaaaatctatgagatgtcagatagtgatagatgctgtagaggaaaataaaggccgggggagatgagagctatggtgtgttaacaatctttatctgagtgctcagggaaggccctgcagagcaggtggtattggaacattcagatgatgtaggtgtccccaaggccgtggactcagagaccatgacacctgctggcctcttggagattgctctgtccagactcctcacaacagaaacacttaggcctggagctgggccccatggctactcggtgacagccaagactttgacgcaggtcttctcttgtagagcttttcttgaacactagtggtctgaattttatgtaagctatgattctgttatagattgagtgccacccatatcttactcagaagaatctgatcagtttttgccaatccagagatgtgtccgtgactgcttaccgtcctcttggtggctcgtggtaaggatacctcagtggtgtgttagtcagagtccgactgggaagtagatgccaccttctcatttccttgggatgactgagggagggcttaatggaggttttgacagggtgtggagggatggtactatagggggctgtccacacctctcaagcctgggattgaaggcatggtttattattggaagccagggagtggctgtgagtgggctgccctgggagggtcaggacctcttcagggacgtaaatcagcctggagtgacccctttgctgagttccccaccagggtgtcagcccccttctgacctcctgacaaggatgctccccaggcctctccatggttggatgaggcaaagcctgctgtcatctttacccaggccctcctgcagctgtactgtgctcccaagatcagctaagagacctccagccattcagccacctaagccagaagcttggaaatcatcccttcccacatcccgagtccaatccagcaccaaaatctattgattattctgccaggagaagttggactttgtttcatgatttcatttctgccatcactgtcactgccttagttaagtagcattcccgaggtcattagaggagcccctcagctccctccctggcccactccattccaatccattgctcccagtgggagctgaaaggagctgtctctttcctttcctatgatcctatcactttcctgggaaaaattcttcaggtcttggtgtggcctgtgagatgcagccagcctgacctctgcctgcctctggcctcattccttcccatccctgtgaacatcctgggcttcagccacatgaagctgctgtggggtccttggatagaacatgttttctcacctctgtgcctttgcaaatactgttctctttacccacaaatcttttttttttaaatctggcaaactccagtttctaatttaaggttcagtccagcatcatcttctccaggaagccctcctgaccccttatttatgtttcttacacagcccttgtcacactgtcttgtgattttcttctcagtcccttccactagtcaaagcaaccagagtgcaggtatcttatttattcttctcttcccagcttctagctcagcacctgggaaacattgggaaccccgaaaaggctgaaattacttgagttttatcacctgtgtgttttccttgtgaagtggggcatgtgtgtttgaacttggaaccagctggagagtctctagaaggctgggtccattccacagctgagctttggggtagcggatcctctgatggagtgagtcagggagctctcagactgactggggtgggcaactgggcactctgtttggttccttcaggagacctcgaggacgatactagcacaatgcctgaaacagggtgatggctcagtacacactcgttaaaaaactgaatcctcagagttctcagggcccacccgtgcctgagcagaggatgcacagggactctatgaccatcttcaaaaccacttttaaaggttccacgtgttcacaatattcactttttagtagtattttgggcgaacttttctgaaagtatcatcatcaacaaatatcgattcgctgtgctgtgccagggtgtacagtagaagctgagaagtcagagagccctgagagtcgggggagtcaaagcttgagagcccactggctgcatgcgctgacatggccacctggtttttgaggagaaacaccaaatacacatgaaaagtgatgtcgtgtagccttgttcaccaaagtgttagcagtggttatctccatactggaaatgtggggcgatgtgcttttctgcattttaaaatttcctgtagtcggcatgtgtcatgatcagaaaataaatctttcattttggacaaagatttcttctttctaaagaaaggggcatccatgttggatctcctggctcactcccctgtactgtgtctctctagtgagggggttgacctgatagacaaccctgtgatcaagaggattgcaaaggagcacggcaagtctcctgctcaggtagggagggagggctgttctgagccaggtggggttctctgaccgctctacatccttggggagtcctggggcttggcaggtcccaggaagggactggctcacccaggtgagtccatgactcattagaacctcccagcgtcaagcagaatttggtctgcagccgcatttctagtcactcaagccatgtactcttgcctccgagcctgtctagactcagaggaggagtttccaggccttctccctctgccccaccaactgcatgcatggttagtatgagatggtacagaaaagttatttattctagtcttctttgttctaatgtccagtggggggctgggcgcatgttaaggaattctcattaagcagattctctgatctcctccttgggctgatggctgtcattaccaacatattgacagagctgctcagtgaatgccagtaacaatagctgctgtcattgattcttggactcttactgcatgataaaactcacatgttagaaaataacttagactacatgggatttccctttgtgtgatagtagactttttgtttccttgcagattttgatccgatttcaaatccagaggaatgtgatagtgatccccggatctatcaccccaagtcacattaaagagaatatccaggtaggtgtattccttcttttatttggcgggtttcagatcatgtgttagatgggaagggatgactgctgtagcatacagcctcagggttgcggagcttgatgcaacaggggcttctccctctgcactgtgggtgttggtggttgaccttccctcagcgatcaaaggacccaggctccttccatcttagggccctttctcccctagggtgttggtgtcttctccatccagcccaagattaggaaggagggaagagcatcttgttgggatgatttgtgtgggccaggctggagcatgtgcaccagtcacatggctgcgctcgcccacaggggaggctggatgtctcctaagcgtgcactcaggagaaaggggaggcagttggtggacaggtcaccacctctgtcgcatggaggcatgcccacgtggcctgagggcactgctttgagttgtgtgggaagattctggtcctgactcctgtctagtgacttctgagaggcaggagtgaagactggaacaggtggagcgtgtgcagaacacagagaggcagcggtccttttcagggcaatcttttcacctaagccaagaaccacagaagtgtgtgaagtgtgtgaaatctatttttggagctatgtgaaggaactctgtgtggcttcaaccctgacgacatagtctgtaacccagtcagggccatggacttgggattcccacagtctcactcacgatttaactgctgcatgacctctctcagcctttgtttcttcagtagagcacccttctgataggatcactgagggtgaaatgtaatgatacagtgaagggatagcatagtgcctggcgtatggaagtacctgatgctcttagctgccagtcaccctcagtcacggatgtcacctgtgatgatctcacaggcaacgacaggcattggtggcagcccacacccattgatcatgtcagcataggtgtgtgtgatcctggggccagctgcacagctgcattttcatagacagcatgtgcccaggagtatgctccctcttggtgtctgagctgcccatgagctccacaaggcactgctgcatcctgagggctcggtttggttgtgccaagcaagcatcgccattggggtttattgacccatctgtaacagtgcctgtgccctcaggcttgctgtgcatgccaagctggctgcaggtgggcatagccctgccattggcaggagaggcaggccacccacgatgggaggaccaggggatgggcaggttcctcatggtgtctacagcactctccctgccgggcccttgtccagctcacctgctgcccgcatgcccttctcctctcctttctcaggcgtcctgctctttgaatggcccagagcagctctgggtgaccagccaaccttaagcctgaaaggtatggatttggctaaactgtaaactcagttctctccaatggctgctgacgggcctcttggaacgagactgcaggtctcttgtagtggttagaattgagcactgctgactgaccggcatctgctccacatggtgtgtccggaattggtgggttcttggtctcactgacttcaggaatgaagccgcggacccttgcggtgagtgttacagttcttaaaggtggtgtgtccggagtttgttccttctgatgttcggatgtgttcggagtttcttccttctggtgggttcatggtctcactggcttaggagtgaaggtgaggacctttgcggtgagtgttacagctcttaaggtggcgcgtctggagttgttcgttcctcccggtgggttcgtggtcttattggcttcaggagtgatgctgcagacctttgcggtgagtgttacagctcataaaggcagtgtggacccaaagagtgagcagcagcaagatctattgcaaagaccgaaacaacaaagcttccgcagtgtggaaggggacgggagtgggttgccagtgctggcttgggcagcctgcttttattctcttatctggccccacccacatcctgctgattggtccattttacagagagccgagtggtctgttttgacagggtgctgattggtgcatttacaatccctgagctagacacaaaggttctccacatccccactagattagctagatacagagtgtcaacacaaaggttctccaagtccccaccagagtagctagatacagagtgtcgattggtgcattcacaaaccgtgagctagacacagggtgctgattggtgtgtttacaaaccgtgagctagatacagagtgccgattggtgtatttacaatcccctagctagacataaaggttttccaagtccccaccagtcaggagcctagctggcttcacccagtggatcccgcacggggccgcaggtgaaggcgcctgccagtcccgggcggtgtgccggcactcctcagcccttgggtggtctatgggacctggtgccatggagcagggggcggtgctcgttggggaggctcctgctgcagaggagcccacggagggtcaggggaggctcaggcatggcgggctgcaggtcccgagccctgccctgcggggaggcagctaaggcctggcgagaaatggagcgcagcgccggtgggccagcactgctgggggacctagcacgccctcctcagccgctggcccgagtgctaagcccctcattgcccagggccagcagggcttgccagccgctccgagtgccgggcccaccaagcccacacccacccggaattcgtgctggcctgcaagcaccacgcgcagccccgattcccaccggcgtctctccctccacacctccccgcaagctgagggagccgactccggcctcggccagcccaggaaggggctcccacagtgcaacggtgggctgaagggctcctcaagtgccgccaaagtgggagcccaggcagaggaggcccggagagctagtgagggttgtgagggctgccagcatgctgtcacccctcaatgggggctgccagcatgctgtcacccctcaatgggggcctggcctaaggtgccctctgtgccctgcagggcagctaggattgcccctgggaggacataggctggggaagattatctgaccctcccatgggaggagccaccgagtgagcagctcagcaggtggcagggggccacatcgccccagttctgcccttctgccgtcgtggctctcaatgcccgggatccccatggcctagcaaaagtgaatgtgacacggggaccttgggcccagctgagatgcccccattcctctgttaggtctgctacacactgaggggaaatgccatcctcaggcagtgagacaggaccaggctgacgtgagacctgagggccaaagccgaagtgatctgatggctgaggacagacagcagcggcgggttaggaggggccggaggaagtgcttatgctgtcaggaggaggtgggagccaggtccacaagactcaccagggaggagaaaggcatccagtgcagggggctgccccggcccgccccctgtggccccagtgccgctcagaactgctgctgcaaggctgcctaccctttataaggagtcttctagaactgcttgctgttccccttaaacccaagaatccgcctaccccggccccagcactccccactacctccagatgacacgctgaggctactttctcctgccctcaggaggggaaggctcttgtggggaagagcctggggtgctccaggtccttgcattggaatcactcagtgcacccctcctcccgccgcaagacagccactctgccaggccggggtggatgctgatgctgtggccatgggtcctgttcctcagtgtgtggggacaacaaaaggggagggaagggctgagaagaatactattttcaaggaagaaaaatggatcactcagaaaatgtactctgtgatatgggtactgttagagttcatagtcccagggccaagtgggtccctagttggcaggtgtatggaacaaattgttttgttggggttttgaggggtagcagagtcagtgggaaaaattctgtgccatccttttttttttttttgagatggagtctcactctgtcatccaagctggagtgcagtggtgcgatctcggctcactgcaacctccacctcctgggttcaagcggttctcctgcctcagcctcctgaatagctgggactagaggcatatgccaccatgtccggctaatttttaaatttttagtagagatggggtttcaccatattggccaggctggtctcaaactcctgacctcgtggtctgcccatcttggcctcccaaagtgctgggattacaggcgtgaaccaccgcgcccagccgctataacttttaacaattcccatatgtcctttattccactaagatgagtgcagtatatatttccatctgtccaaggcttcctaaatgtagccaaggccaagccaacaccagtcacatgatcaaaatcaaagggcatttggggaatccaggctgtgattcagggaagttccaagtgtctgatgaagtgtttgttttacatctttgtgtcccttgcaggtctagcactgtgctatgtaggtaacatgtgctccattaaatgtgaattaaactaagttttctacaaacattgtgttttggttccaggtgtttgattttgaattaacacagcacgatatggataacatcctcagcctaaacaggaatctccgactggccatgttccccatgtaaatatggctccttctttttaaaacagagggaagaatatacagattgaatgattggtgtctgaataggtatttatcatacacattttagattaattaaactttctcattataattctttcctgtttgaagatgagccactgaatgaagctaatttcatgcactggggagtttaaaagtatataccatttaaaatgtttctcttaaaaaataatcattctttgttcctatttttgatttgtttttctgtttttcagaactaaaaatcacaaagactatcctttccacatagaatactgaggacgcttccccttccttgtttctgctcagcccagatgcacagacactattggcaatgttgaccctcctctgtcatcacagcgccagggcagctgtgcctgggacaggagccacacagtcagagggggatgtaagagccaccttctctgacaaatctggagaattgagtgtgttctaagtgaaggcaatggggtttctccaagacagcctgtgtg

SEQ ID NO: 10603 - DNA, 1036 bp, Homo sapiens
gcggggcggcggggcggccggcggcggccatgggagatatcccagccgtgggcctcagctcctggaaggcttctccagggaaagtgaccgaggcagtgaaagaggccattgacgcagggtaccggcacttcgactgtgcttacttttaccacaatgagagggaggttggagcagggatccgttgcaagatcaaggaaggcgctgtaagacgggaggatctgttcattgccactaagctgtggtgcacctgccataagaagtccttggtggaaacagcatgcagaaagagtctcaaggccttgaagctgaactatttggacctctacctcatacactggcccatgggtttcaagcctcctcatccagaatggatcatgagctgcagtgaactttccttctgcctctcacatcctcgagtgcaggacttgcctctggacgagagcaacatggttattcccagtgacacggacttcctggacacgtgggaggccatggaggacctggtgatcaccgggctggtgaagaacatcggggtgtcaaacttcaaccatgaacagcttgagaggcttttgaataagcctgggttgaggttcaagccactaaccaaccagattttgatccgatttcaaatccagaggaatgtgatagtgatccccggatctatcaccccaagtcacattaaagagaatatccaggtgtttgattttgaattaacacagcacgatatggataacatcctcagcctaaacaggaatctccgactggccatgttccccataactaaaaatcacaaagactatcctttccacatagaatactgaggacgcttccccttccttgtttctgctcagcccagatgcacagacactattggcaatgttgaccctcctctgtcatcacagcgccagggcagctgtgcctgggacaggagccacacagtcagagggggatgtaagagccaccttctctgacaaatctggagaattgagtgtgttctaagtgaaggcaatggggtttctccaagacagcctgtgtg

SEQ ID NO: 10604 - DNA, 21450 bp, Homo sapiens; identical to SEQ ID NO: 10602

SEQ ID NO: 10605 - DNA, 913 bp, Homo sapiens
gcggggcggcggggcggccggcggcggccatgggagatatcccagccgtgggcctcagctcctggaaggcttctccagggaaagtgaccgaggcagtgaaagaggccattgacgcagggtaccggcacttcgactgtgcttacttttaccacaatgagagggaggttggagcagggatccgttgcaagatcaaggaaggcgctgtaagacgggaggatctgttcattgccactaagctgtggtgcacctgccataagaagtccttggtggaaacagcatgcagaaagagtctcaaggccttgaagctgaactatttggacctctacctcatacactggcccatgggtttcaagcctcctcatccagaatggatcatgagctgcagtgaactttccttctgcctctcacatcctcgagtgcaggacttgcctctggacgagagcaacatggttattcccagtgacacggacttcctggacacgtgggagattttgatccgatttcaaatccagaggaatgtgatagtgatccccggatctatcaccccaagtcacattaaagagaatatccaggtgtttgattttgaattaacacagcacgatatggataacatcctcagcctaaacaggaatctccgactggccatgttccccataactaaaaatcacaaagactatcctttccacatagaatactgaggacgcttccccttccttgtttctgctcagcccagatgcacagacactattggcaatgttgaccctcctctgtcatcacagcgccagggcagctgtgcctgggacaggagccacacagtcagagggggatgtaagagccaccttctctgacaaatctggagaattgagtgtgttctaagtgaaggcaatggggtttctccaagacagcctgtgtg

SEQ ID NO: 10606 - DNA, 12457 bp, Homo sapiens
gtgcacctgccataagaagtccttggtggaaacagcatgcagaaagagtctcaaggccttgaagctgaactatttggacctctacctcatacactggcccatgggtttcaaggtaccgttcagtaggtagttcgttctgcagtttgcaggaccttcctccccgtgctcacaccctgtcttgcggtggggagagcatggaccagcattcagggcaggggttcccaggctgcatctgccacatgctagctgcggcatttgggcagtcctcttgatatctctgggcctcagttaaggagaggcttggcttgacctctgaggcccccacaggtctgtctttcaagccagtcgctttttttccaagccaagagagcagtagatttttttcccttaggtttttaggtgaaagcagtgatcagatgaggaaatactgctgctcagagaaagttcccagtgaattcctaggccttgtctcttcttgcaggttctgttctctttggggagtaaatgctgttttgcaatatgggagatatttgcttgttcacctgcagcagggtccagtgggttgtgctggtagttgacttttccacttggttttattctcttaattgcttcacagtgtgtctggagcatgcatctgagccatggctctgtcactaagctaccccagtctggccgtgcaacttccctactctaggcaacctgcttctgcctcacacgggtcctggccaggatgtccctgcatatttgccctgggctgtgatgacagcctgcctgggcaagggcctgatcacacagttgacacctgtgaaatacagaagcccttgcagggatgttcttcctacaatggaatgggtgactgctgctcagcagtcttctacataccaacctgtgagaaggtccctttatgtgtgccacactgttggttactgttttagagtaaaataacaaaaaacacttcattcctagcacagctttacttaactaaggctttgtatctagtttccataaacgatgtgggcagctgtccgttagtgacactgactaagaggggaagatacccagagggcaaaaccagagtgatgtctgtgccttgaaattcattgcatgcagaaaatcataattaaaacaatggctacagctgtattacactcattgccagccagcattgttgtaattatgtacccagaactatgttaggtactttacacatattaactcatttaattctcatgacagttctacaaagttgacactattaacatccctcttggagagatgatgaaactaagatacagaaagtttaaggtttaagttagattattggagcccagaagcatatgctcaggtcagacatttgttacactttccttgccctcatcctttagcagattcctgtctttggatttctgggtcgtagaaaaggaaaaggtctcagatcatccaacaaattacagaagagaataatgcagcatcgtcagcatgtcttctggccagtaggaactgctaggccttgtgtgatgctggacaattagatcagggtccgagtatgagtcccgggctgcaattttgtggaggcttggataaatggcaacatgggatgtggctttaaagtgagactgttagttacttcagctcatcatggaaaatgcctctttcatgtgtatcaggctggaacatgtgacattcttccactgttgtttaggagtgtgattaggtgtcattaaataaacatgcctatgccattcacccttaacatgctacgtgggagtacatgagggaggtagctggattgcacgtcagtgcttctctgaaagatgactttaggttcttgccctttcaagatgtatctctctgccctctacctcctgtgtacctttgtattctcacttccttacctgtcatcatgatggggattctaagaaagaagacaagaccctaacagtggagttaggagagggttgattgggctctataagacatgaagaaaatgcactcctcacccattctttacccgaaattagtaaactattttctggaggcaatgggagaggacaaccttgcatcagtaaggatacagggtcttcctttcccatcttgtgagagatgaacagtgaacatcaggctggcagaggctttgccagccatccagtccaccagccattcatcttttcttagaaaggtgaagactgggcctggtcacatggccaggctggggttgcttagtgacagggctgtggcttggatgcaggtctcctgacacatggttttttttgttttgttttgttttgttttcacacatctcaactctccttcttcgcagcctcctcatccagaatggatcatgagctgcagtgaactttccttctgcctctcacatcctcgagtgcaggacttgcctctggacgagagcaacatggttattcccagtgacacggacttcctggacacgtgggaggtgagctgagccacaccaccaggcagcctcatcctgtgtgggtctccacccaggatgcagtgagccctgagctgcttgtgttcaaagacatcaaggttgtctacctgagatgtggggtttgtggagcaaaaaaggaatcaatacccgaagaactcagagacctcagtgactttcttgttacctttggtttggtatggtgcagttctcttgacacatttgaggggtagctcattatagacctcactttttttctcaaatatttatttatttttttattaaaaaccatatttatttcagaaaatacaggagagttcttctgcattaaactaacattaaaaattttattttcctggcacccagcagtaaccactgttaatgttttatagttcctttttctctcaagcatttcagaatgataaagttggcagcatggaagctcaggctggggaggtgagaccagtgtcggggaaggttaccaagtgtcagcccatttccagggttcagaccaaaaacagccctttactgcaggggcttgcagtaaagacttgagcaggaaattaagggggtggtggatttgagaggttcctggaagttgacccacaggctggggtgggtctcaggcttgggctccagcatggctgaccgagcacgtgtggtcttacagtcttgctaaccatcatgtgggatgggacatcacatttgaggcccaagaagaaagtaagcttaagcttaagcttgctgaggttaggacagagcttgctgggtgaagctctccagggaggaggccagagggaaccctcggacagggaggagtcccaggctaggctccccccatcaatagaagacaaagactgacctaaggtatctgagatgtcaggaccagggcccatgggcctcaactctttctgtcacaatgttttaggtcctaaaagatttgggttaaactctagggtgctcatgtagcaccagcgaggttccggtgattgttgcagagttgaggcagtaactaactgctgcgtgttggcccattggtcactcaggacttgctgctgactacggaccctggcacgaagctatgctcttcctgaagctcaggggcagcctggcttgctggtcagtgaccagctcagagctttaggttgctctgccctaaagtgtcttaaaatagtaagtggagaaggtgggataggagaatggtgatgtatccgtgtgcttaagaaggtcagtgtctcagtggaaagaaaggtgaacaaataaaatccgcagcagacatgcttgccagacatcaggaggaataggaacaagaagagctcacatgtgtcgagtactggacgccagccttagctgacacttcctgtgattccacataacccctaaacatccccgtggcacaggccatgtagacctgtcctgaagctgagaaaattggggccaagtgaggccatgcaacttgcccagcatcctctagccagaaaagatgggactgaaatcagaccttgagtgcagaaatgcttttgaagcttcaagtaaaatattgtaaaaatattgggtccaaccagttttagaataccatacagaactgctgagggacgtagattgtcagtgcagtagacagaagcttcacacccagcagagtcgttctcttataggccatggaggacctggtgatcaccgggctggtgaagaacatcggggtgtcaaacttcaaccatgaacagcttgagaggcttttgaataagcctgggttgaggttcaagccactaaccaaccaggtaagccgatggaagcatcagagagtttaacctgtgtggctggtcccccagctgccacctccacagggctcttctggaaatggaagaatgggtgaagcacaaaacaggcctgttctcctctggcagcactcagaatggtgattaaaggcagcagctaggcaagtggctttcttgaaggtgcatctgggtagatggtactgttggcaggcagggcatgagctggtgcttggccctccatgtgcagtgcaggcaggtcaccaggtgtactcagaagcagtcagggtcctggcaggtgcctcacccttatccaggaacatgggcctcccctctacctcttcccagcctgcagactgcagcaagaaagagtggatgactagatggcttcacgcgaggctcacaggctgctgaaggtgatgcaggcacttcgtttttttaatgcagagaaaagacttgtggggaaataactattgtattttctagactagctttgtatgttcaaagatcatttatacagtacttaagctttttattgaagagtagaagtgcacatgtgaaaatggaactgtataaattctcataaactgagcatagctctgggactagcatccagctcagtaaacagcacgtccagtgcccctgtaacccctgccgagcacagcatcattcccattcccagcagctgggattcacgtctgaactttacacaggtaaaataaaataataatgcaacataaacccctctgtgctcgcctctttcacacagcactgtgtttctgtacatgtgattgtagatagtgctctcttatttcttgtggtattctgttttgtgaattaaccacaattgagttatccattctgctgttaatgggcacttagacagtttccagtttgggactattaagaatagagcatcatgttctatttttttgaataaatatgctttttaaaaaagttctgtatggagtagatgcagaaaagtgtgtgaatcataaaaggcatacatagcttgatgaatttttgcaagtgaacaaactcaagtattcagcacccagaacaagaaaaaagccctcagccattcagtagctcccctgggtcctgttgtagccaccaccatgaagagcaacctggcttctgacccagcttctcatgtagttcagctttgccttgtatacaaccctatatatataagttttgatatatgtttatatggatagtagcttccgttttgtgtcagtatttttagttgttcagcactttaaatacctgggaatgattatggcatagtctgagtagacaaagtggggtggagggtctgctttctgttaggttgatggacaccaggaacacaggatgcggaaggctccagaagggctggcctctcttttggaggctttccaaacaggctgatcttgatgagcttggcatgttcctgagagcaaacgcactattcatagttctctgtaatttacactaaataactatttattttaaatctccttataacctggaattatatgtgagagtttggagaatgtgcaagagacagagatcctgctctctagcttcttaaaattttcattcaagtcacctgtagaatgtatttgtcacatgtagttcctcaatttcattcattcattcagtggatatatttttagcacttcctacatgtctagattgttcttagtgttggtgagacatctatgaacaaaacaaattcaaacaaaaatctctatcttcatgaggcttagatcttggtgacacagaaagacagtgagcaaatatgtaaaatctatgagatgtcagatagtgatagatgctgtagaggaaaataaaggccgggggagatgagagctatggtgtgttaacaatctttatctgagtgctcagggaaggccctgcagagcaggtggtattggaacattcagatgatgtaggtgtccccaaggccgtggactcagagaccatgacacctgctggcctcttggagattgctctgtccagactcctcacaacagaaacacttaggcctggagctgggccccatggctactcggtgacagccaagactttgacgcaggtcttctcttgtagagcttttcttgaacactagtggtctgaattttatgtaagctatgattctgttatagattgagtgccacccatatcttactcagaagaatctgatcagtttttgccaatccagagatgtgtccgtgactgcttaccgtcctcttggtggctcgtggtaaggatacctcagtggtgtgttagtcagagtccgactgggaagtagatgccaccttctcatttccttgggatgactgagggagggcttaatggaggttttgacagggtgtggagggatggtactatagggggctgtccacacctctcaagcctgggattgaaggcatggtttattattggaagccagggagtggctgtgagtgggctgccctgggagggtcaggacctcttcagggacgtaaatcagcctggagtgacccctttgctgagttccccaccagggtgtcagcccccttctgacctcctgacaaggatgctccccaggcctctccatggttggatgaggcaaagcctgctgtcatctttacccaggccctcctgcagctgtactgtgctcccaagatcagctaagagacctccagccattcagccacctaagccagaagcttggaaatcatcccttcccacatcccgagtccaatccagcaccaaaatctattgattattctgccaggagaagttggactttgtttcatgatttcatttctgccatcactgtcactgccttagttaagtagcattcccgaggtcattagaggagcccctcagctccctccctggcccactccattccaatccattgctcccagtgggagctgaaaggagctgtctctttcctttcctatgatcctatcactttcctgggaaaaattcttcaggtcttggtgtggcctgtgagatgcagccagcctgacctctgcctgcctctggcctcattccttcccatccctgtgaacatcctgggcttcagccacatgaagctgctgtggggtccttggatagaacatgttttctcacctctgtgcctttgcaaatactgttctctttacccacaaatcttttttttttaaatctggcaaactccagtttctaatttaaggttcagtccagcatcatcttctccaggaagccctcctgaccccttatttatgtttcttacacagcccttgtcacactgtcttgtgattttcttctcagtcccttccactagtcaaagcaaccagagtgcaggtatcttatttattcttctcttcccagcttctagctcagcacctgggaaacattgggaaccccgaaaaggctgaaattacttgagttttatcacctgtgtgttttccttgtgaagtggggcatgtgtgtttgaacttggaaccagctggagagtctctagaaggctgggtccattccacagctgagctttggggtagcggatcctctgatggagtgagtcagggagctctcagactgactggggtgggcaactgggcactctgtttggttccttcaggagacctcgaggacgatactagcacaatgcctgaaacagggtgatggctcagtacacactcgttaaaaaactgaatcctcagagttctcagggcccacccgtgcctgagcagaggatgcacagggactctatgaccatcttcaaaaccacttttaaaggttccacgtgttcacaatattcactttttagtagtattttgggcgaacttttctgaaagtatcatcatcaacaaatatcgattcgctgtgctgtgccagggtgtacagtagaagctgagaagtcagagagccctgagagtcgggggagtcaaagcttgagagcccactggctgcatgcgctgacatggccacctggtttttgaggagaaacaccaaatacacatgaaaagtgatgtcgtgtagccttgttcaccaaagtgttagcagtggttatctccatactggaaatgtggggcgatgtgcttttctgcattttaaaatttcctgtagtcggcatgtgtcatgatcagaaaataaatctttcattttggacaaagatttcttctttctaaagaaaggggcatccatgttggatctcctggctcactcccctgtactgtgtctctctagtgagggggttgacctgatagacaaccctgtgatcaagaggattgcaaaggagcacggcaagtctcctgctcaggtagggagggagggctgttctgagccaggtggggttctctgaccgctctacatccttggggagtcctggggcttggcaggtcccaggaagggactggctcacccaggtgagtccatgactcattagaacctcccagcgtcaagcagaatttggtctgcagccgcatttctagtcactcaagccatgtactcttgcctccgagcctgtctagactcagaggaggagtttccaggccttctccctctgccccaccaactgcatgcatggttagtatgagatggtacagaaaagttatttattctagtcttctttgttctaatgtccagtggggggctgggcgcatgttaaggaattctcattaagcagattctctgatctcctccttgggctgatggctgtcattaccaacatattgacagagctgctcagtgaatgccagtaacaatagctgctgtcattgattcttggactcttactgcatgataaaactcacatgttagaaaataacttagactacatgggatttccctttgtgtgatagtagactttttgtttccttgcagattttgatccgatttcaaatccagaggaatgtgatagtgatccccggatctatcaccccaagtcacattaaagagaatatccaggtaggtgtattccttcttttatttggcgggtttcagatcatgtgttagatgggaagggatgactgctgtagcatacagcctcagggttgcggagcttgatgcaacaggggcttctccctctgcactgtgggtgttggtggttgaccttccctcagcgatcaaaggacccaggctccttccatcttagggccctttctcccctagggtgttggtgtcttctccatccagcccaagattaggaaggagggaagagcatcttgttgggatgatttgtgtgggccaggctggagcatgtgcaccagtcacatggctgcgctcgcccacaggggaggctggatgtctcctaagcgtgcactcaggagaaaggggaggcagttggtggacaggtcaccacctctgtcgcatggaggcatgcccacgtggcctgagggcactgctttgagttgtgtgggaagattctggtcctgactcctgtctagtgacttctgagaggcaggagtgaagactggaacaggtggagcgtgtgcagaacacagagaggcagcggtccttttcagggcaatcttttcacctaagccaagaaccacagaagtgtgtgaagtgtgtgaaatctatttttggagctatgtgaaggaactctgtgtggcttcaaccctgacgacatagtctgtaacccagtcagggccatggacttgggattcccacagtctcactcacgatttaactgctgcatgacctctctcagcctttgtttcttcagtagagcacccttctgataggatcactgagggtgaaatgtaatgatacagtgaagggatagcatagtgcctggcgtatggaagtacctgatgctcttagctgccagtcaccctcagtcacggatgtcacctgtgatgatctcacaggcaacgacaggcattggtggcagcccacacccattgatcatgtcagcataggtgtgtgtgatcctggggccagctgcacagctgcattttcatagacagcatgtgcccaggagtatgctccctcttggtgtctgagctgcccatgagctccacaaggcactgctgcatcctgagggctcggtttggttgtgccaagcaagcatcgccattggggtttattgacccatctgtaacagtgcctgtgccctcaggcttgctgtgcatgccaagctggctgcaggtgggcatagccctgccattggcaggagaggcaggccacccacgatgggaggaccaggggatgggcaggttcctcatggtgtctacagcactctccctgccgggcccttgtccagctcacctgctgcccgcatgcccttctcctctcctttctcaggcgtcctgctctttgaatggcccagagcagctctgggtgaccagccaaccttaagcctgaaaggtatggatttggctaaactgtaaactcagttctctccaatggctgctgacgggcctcttggaacgagactgcaggtctcttgtagtggttagaattgagcactgctgactgaccggcatctgctccacatggtgtgtccggaattggtgggttcttggtctcactgacttcaggaatgaagccgcggacccttgcggtgagtgttacagttcttaaaggtggtgtgtccggagtttgttccttctgatgttcggatgtgttcggagtttcttccttctggtgggttcatggtctcactggcttaggagtgaaggtgaggacctttgcggtgagtgttacagctcttaaggtggcgcgtctggagttgttcgttcctcccggtgggttcgtggtcttattggcttcaggagtgatgctgcagacctttgcggtgagtgttacagctcataaaggcagtgtggacccaaagagtgagcagcagcaagatctattgcaaagaccgaaacaacaaagcttccgcagtgtggaaggggacgggagtgggttgccagtgctggcttgggcagcctgcttttattctcttatctggccccacccacatcctgctgattggtccattttacagagagccgagtggtctgttttgacagggtgctgattggtgcatttacaatccctgagctagacacaaaggttctccacatccccactagattagctagatacagagtgtcaacacaaaggttctccaagtccccaccagagtagctagatacagagtgtcgattggtgcattcacaaaccgtgagctagacacagggtgctgattggtgtgtttacaaaccgtgagctagatacagagtgccgattggtgtatttacaatcccctagctagacataaaggttttccaagtccccaccagtcaggagcctagctggcttcacccagtggatcccgcacggggccgcaggtgaaggcgcctgccagtcccgggcggtgtgccggcactcctcagcccttgggtggtctatgggacctggtgccatggagcagggggcggtgctcgttggggaggctcctgctgcagaggagcccacggagggtcaggggaggctcaggcatggcgggctgcaggtcccgagccctgccctgcggggaggcagctaaggcctggcgagaaatggagcgcagcgccggtgggccagcactgctgggggacctagcacgccctcctcagccgctggcccgagtgctaagcccctcattgcccagggccagcagggcttgccagccgctccgagtgccgggcccaccaagcccacacccacccggaattcgtgctggcctgcaagcaccacgcgcagccccgattcccaccggcgtctctccctccacacctccccgcaagctgagggagccgactccggcctcggccagcccaggaaggggctcccacagtgcaacggtgggctgaagggctcctcaagtgccgccaaagtgggagcccaggcagaggaggcccggagagctagtgagggttgtgagggctgccagcatgctgtcacccctcaatgggggctgccagcatgctgtcacccctcaatgggggcctggcctaaggtgccctctgtgccctgcagggcagctaggattgcccctgggaggacataggctggggaagattatctgaccctcccatgggaggagccaccgagtgagcagctcagcaggtggcagggggccacatcgccccagttctgcccttctgccgtcgtggctctcaatgcccgggatccccatggcctagcaaaagtgaatgtgacacggggaccttgggcccagctgagatgcccccattcctctgttaggtctgctacacactgaggggaaatgccatcctca

SEQ ID NO: 10607 - DNA, 488 bp, Homo sapiens
gtgcacctgccataagaagtccttggtggaaacagcatgcagaaagagtctcaaggccttgaagctgaactatttggacctctacctcatacactggcccatgggtttcaagcctcctcatccagaatggatcatgagctgcagtgaactttccttctgcctctcacatcctcgagtgcaggacttgcctctggacgagagcaacatggttattcccagtgacacggacttcctggacacgtgggaggccatggaggacctggtgatcaccgggctggtgaagaacatcggggtgtcaaacttcaaccatgaacagcttgagaggcttttgaataagcctgggttgaggttcaagccactaaccaaccagattttgatccgatttcaaatccagaggaatgtgatagtgatccccggatctatcaccccaagtcacattaaagagaatatccaggtctgctacacactgaggggaaatgccatcctca

SEQ ID NO: 10608 - DNA, 53111 bp, Homo sapiens
gggtgaacgaggagccctgtgatctcctgaggttcaagagagacttcagaaggtatggagcagccatttcagaaatggtggattatattttattttcttgtattttacttatattttggttaatactttaaccaaaccttttttgtactaccgtacacccagtgtttttgcagtagaggatgttgtagccaaaacttggacccttaaaaacagacccaagatagcctacacctctggtgttaacagcagctcttgggtagggcagggtggctcacgcctgtaatcccagcactttgggaggccaaggggggcagaccacttgaggtcaggggttcaagaccagcctggccaacatggtgaaaccctgtctctacaaaaaatacaaaaattagctggatgtagtggcaggtgcctttaatcctggctacttgggaggctgaggcacgagaattacttgaacctgggaggtggaggttgcagtgagtcaagattgatcacgccactgcactccagcttggcgacacagcaagaatctgtcaaaaaaaaaaaaaaaaaaaaaaaaagaacagcagctctcatacatataatagaattctttaacagtaaaatatcttctatatttcaatagatgtattttgctctagaaattatgaaatgatatcataagataaccctgtttagtttgatcaacaagattttgtctatagaaactagtaatatttctaggaaacctctaaatatttggaactgtaacaacacatttctaaatattctatgaaaaaaggaaaaatatattggaaatttgcagaagtcttactagaaaagatatcctccagtaattgggattggcatgttttttcaatttaaatcaaacacaataagaactccagaggaattccacttagaaataaaatagcacatttcaaaatcacccatgcttcaaatagaaaatcacaagagaaattaggatatattttgaactgaataaaagtgaaaacagagtatggtagtatttgtgatattcacctgaagtatttctcacaaggaaattgattatcttaaatagcagcatgtagaaaaagaaaggttttctgaaacttaatgaaacaaaacaaaacacaatgaaaaattaacaaagcagaaattgtttctttgagattaagttgtcagaactctagtaagattattcagagaaagagagaaaatagctgcataagaatagctatatttataaacatacctaaattcagctattctctctgtatttatactgtgtaatataaatatagtataaaaacagctattcccatgcaggtattcttactataaaatagaattcacaacaaaatctttgtcaagggaaacaccaggataagataggttcactattaaattcataagatattttatgtagaaataataacaattccagaagctttttaaaaaaaacataggacaaaatgttccctaactcatttcataggagcaaataaccttgataccaaaacctggcacaagatatcaaaagaatatacttgaagatttaaataatataaaaacataatcaaaatattaagaaattaagtaaaacaatatttaaaagtaaaatacaccacaagcaagtaggatttatcctgggaatgcaaagttcgttcagtagcaaaaatcaatcaatgtaattcactacagaacagaataagaagaaaatatataatcaccttatagatgcaaaaagtgcatttgactaaattatgcatctatccatgaaaaactgtcaaaaacacaatgaaactgtcttaatctgattaaggccatgttaaaaaaaaaactatagctaacaaaataattcatgtgaatgaccaaatgtctttcttctaagatcaaaaaaaaaaaaaaagaaagaaaaaaaaggaaagtaagtctgctctacatacttgtagccaatacttcactggagctcctagccagtggaaaaaagcaagaaaaataagaaagatttaaaatgaagaactaaaatagcctctttttatagattatattattgttcctatataaaatcctaagtaatcaaaaattgatctgccaaaattaattaataaatttagcaagggtttaggtggcaagccctttggaaaaaataaattagaattctaaatatattcaaacaactagaaaatataattttaagtggtttatgccataaaataccaagaaatataattaacaaaattatggataacatctatgatgaaaaacataatgttgagagaaataaaagactatccaaatataaatatacagtatggcaatggtatcaataggacatcaattcttacccaaatttatttatacagtaaatgcatttttaatccatatcctgacagatatttctgccacagaaactgataagctcattctaaaatgtaagtagatatcaaagaatctagaaaagcaaaaataattttgaaaaatgaagttgaaagagttacactatattatttccagacttactataaagcaacaataaccaagatatttcagagttagtataaatttaaacatatagatcagtggaacagaaaaaaagtcagaaatagacccatacatatatggtcaatgaattttttacaatgacaaaaatacgtttcaatggaaaaagataaattattcaacaaatggtgtcttaacacttgtatgaaaaagaaaagcaacctctatctcacactatgaaatttatttgaagtggattagagagaccttattgtaacagctaaaattataatacttcttaagacatagatggaacacaaaaagcataaaacatacatttttttagaaaggataaattaaacatcataaaaagtaaaaccatctgcctttctaaagacagcattaaggaaataaaattagaaaccacagacatggaggaaaaatatacatttatctagcacatacaaatgatttttacaataagaattaataacacaaacaagccaaaaggacttaagtaggtactacttcacaacagaatggtcaataaatacattagaagaggttcaacatcattggtgatcagaaaactgcaaattaaaaccataatgaatgagataccagtttataacaaatataatatctaaaattaaaagactaacaatacttttagtgaaaatgcatagccactgcagacctcctatgctgctgttggtgaatttaaaattatggccacacaatcccacacatggatacctactcaaaataaataaaacttatttctagaaaaagacttgtacgtggcaagacttgtacataaccccaaatcaaaaacaacccaatggttcaggtacaagcaaatgaatttaaaaattgcagcatattcatataactgagagctacttagcaatgagaaaggactaacacacaacctggatgaatctcaaaaacatgctgagtaagagaagccagaaataaaaaaaacgcaacagcgtgcatccatctatttgacgttgtggagcagctgaactgagcaattgtgatagaaagatgagtgagtggggttggaggaaacctgggatgactcttatggacaatgatgatgctcctgtcagcacacacttaaaatgtttcctttttgttgtatgtaaattatacctcaatatagatgacaaaaaaaaataaaatagagcattccattttaaatgacagcaccatgaacatggtgaacactcagtttttgagctgttttacgaccaatgagctcattttactctacaggaagtttcagttgtgtgactataaggaataattaaaggcatcacagaattttaacaccctgtgtgtttttaaaaattgaatacaatttatagatgtggttaaatgtaagcttcctgtcgccttgctactttgaggatttgggaactcttgaaaccggctaaaagaagaacaaataaaaggccatggaaattataatgttctgaccaaatgccccccaaaaaattaaaaaaaaataaatttaagagagcacggcaggttttggaatagatttgttactggatttgtcagatccaagagaagattcttggatctcatgaaggaaggaattcagggtgattcacaaagtgcagtgaaaaaactgggtttattaaaagttattttattatagagtagggcaccctcggaaagcaagaggagaaaccaccaggctttgttttaagttttccttatataggggtcttgtctatgtaaagactaagctaagctgtatctacgtgcaggtaagcaggcatcctgacacatttattgctgtattgatttaaagaaaactagccttgaccgtctagtgtgtgagtacatcaaagcataactattattatcttcaaaacatatattgttatgggtattgggacatctggactctctgttgttgtaggagtgtgtccttgcaggtacctttaagctgtttcctttaatacaaacatcccatgaatatgggtcatgaccggcaaggcatgcgttttgctagtctcagaatggaactaaactaaaaaggcattacattgtccctccttggctcctgcttccctgacaaattgaccatcattagaatgtctggagtgtggcaagtgatgggttaaccaccagtactatagacattattctaaggagtccagagtctatatatgaggcacacatagtttaacatagataagatgcatccaacaaatatttctttttcttctttttttttttttttttttttttgagatggagtcttgctctgtcgcccaggctggagtgcagtggcgcgatctcggctcactgccagctccgcctcccgggttcacgccattctcctgtctcagcctcccgagaagctgggactacaggcacccgccaccgcgcctggctaatttttttttttttgtatttttagtagagacggggtttcatcgtgttagccaggatggtctcgatctcctgaccttgtgatccacccgcctcggcctcccaaagtgctgggattacaggagtgagccaccgcacccggcctcaaatatttcttaattacaaaaaaattacagttgagtgggggattacatatgttaaaagaatttacataaagctggaaaacactgacatctgctctttttgctcaaagtacttcaagagtacccaggatgtaattagacaaacatatgtatacagtaagaaaaaaatacgttattaaaacaattgagactaggctgtgtcagaaataaaatgtttaaacactcaagtgatctaggtatctctctgcagaaagataaattatgttgcagtaatattttaaagagaggaatttttagtttctgcaaagacacagaaaaataaatgtttatttacaggaattttgttcaattatgcattccagttttctaaacctgaaaatgccttagaatgtgtgaaaggaaagccacctgtcatacttctataagcaaaaatccaaaacatatgatttctaatgatgtaggcatatggcctttaaaagttataaaattcacttgcgttgaaaatgattttttaaattgcaaagtctctatccagattatagccggatactcaatccttttctgcaactaaggactcattatcattatttcatggagaggtgtttatgttttgtggagattcctgtgagcttctacctctgctggtgtcttggggttctctcttgggggctcagaattccctgcactccatccctcagccacgtgaatgacacagattttccctgtttctgccagtcagaaacctttgcttatgctcttctcttggtctgaaatgctgtccccctactcccacctgctaaatcctccttgctctgaagtctgagaagccttctctgaccccagttcctccctaggaattccccctccagctgtgttacaactatctctttgctgtactctctttcctactggattccataagggcagagcctgagttctgttcatcattcatcaccaagaactagcaaagggcctggaataaagtaacaggtagcacttgtcagataaatcaatcaatgaaggtgggacagcagcagctactttgcttcttttttttttgtttgttttacttttcttttttttaattaattaatttattttttattattattatactttaagttttagggtacatgtgcacaatgtgcaggttagttacatatgtatatatgtgccatgctggtgcgctgcacccactaacttctttttcttcctgagctttcattttgtggtggtagctgttgctctgtgaggcgggtggaagtccttccaaggcctgaaatggattctgtaatctttcatggtatgttctcgatttctactccaggtgtgagagaggacttcttctcacattcacaaacctctcttagctgatttagcttggttacttggaataagaatttcacagttcatggaacataatgaaacatgtcctgtgctggcagaagtgattttgtgtcaaaaggaactaatttttaacctacctacatcattacctacatctattaagctgaacaatttcaattatttttgatgggctcagtttctcacttatgaaatgagggattgaaagatatgatcttagtggttctgaataatacatagctctcagataaaattaccaaggctctcacagcatatatactcagaaatatgtgatgcaaatgtgtggtttaaaatatattgtgcattctgtaaattaaatcttatgaatcaattgtattagcaaatgtgacagtgtaacaaaaatataacctgcaagtcgcaactggaattagctcaagctaaaaaggaaagttattgacacattaactgaaaagtcagagtatttcaagtttcttttttctttttaaattatactttaagttctcggatatatgtgcagaacgtgcaggtttgctacataggtgtacacatgccatggtggtttgctgcactcattaacctgtcatctacattagatatttctcctaatgctatacctcccgtagccccccaacccccgacaggcacccgtgtgtgatgttctccctgtgtccatgtggtctcattgttcaactcccacttatgagtgagaacatgtagtgtttggttttctgttcctgtgttagtttgctgagaatgatggtttccaggttcatccatatccctgcaaaggacgtgaactcatactttttttatggctgcatactattccatggtgtatatgtgccacattttctttatccagtctatcatggatgggcatttgggttggttccaagtctttgctattgtggatagtgctgcaataaacataaaagtgcatgtgtctttacagcagaatgatttataatcctctgggtatatgcccagtaatgtgattgctgggtcaaatggtatttctggttcaagatccttgaggaatcgccacactgtcttccacaatggttgaagtaatttacactcccaccaacagtgtaaaagacttcctctttctccatatcctctctagcatctgttgtttcctgactttttaatgatcaccattctaactggtgtgagatggaatctcattgggttttgatttgcatttctctaatgatcagtaatgatgagcttttttcatatgtttgttggctgcataaatgtcttcttttgagaagtgtctgttcatattcttcactcactttttgatggggttgttcttttcttataaatttgtttaagttccttgtagattctggatattagccctttgtcagatggatagattgcaaaaatttctcccattctgtaggttgcctgttcactctgatgatactttcttttgctgtgcagaagctctttagtttaattagatctcatttgtcaattttggcttttattgtcattgcttttggtgttttaggcatgaagtctttgcccatgcctatgtcctgaatggtattgcctaggttttcttctagggtttttatggttttaggtcttatgcttaagtctttaatccatcttgagttaatttttgcataaggtgcaaggaaggggtccagtttcagttttctgcatatggctagccagttttcccaacaccatttattaaatagggaatcctttccccattgcttgtttatgccaggtttatcaaagatcagatgcttgtaggtgttatttctgaggcctctgttctcttccattggtctatatatctgttttggtactagtaccgtgctgctttggttactgtagtcttgtaatatagtttgaagtcaggtagcatgatgcctccagctttgtcctttttgcttaggattgtcttggccatatgggctttttttggtcccatatgaactttaaagtaatattttctaattctgtgaagaaagtcaatggtagtttgatggggacggcattgaatttataaattacttggggcagtatggccattttcacattattgattcttcctatccatgagcatagaatgtttttccatttgtttatgtcctctcttatttccttgagcagtggtttgtagttctccttgaagaggtccttcacatcccttgtaagttttattcctaggtattttattctctttgaagcaattgtgaatgggagttcactcatgatttggctctctgtttgtctattattggtgtataggaatgcttgtgatttttgcacatagattttgtatcctgagattttgctgaagttgcttataagcttaaggagattttgggatgagacgatggagttttctaaatatacaatcatgtcgtctgcaaacagagacaatttggcttcttctttttctatttgaatacgctttctttctcttgcctgattgccctggccagaacttccaatactatgttgaataggagtggtgagagagggcatccttgtcttgtgctggttttcaaatggaatgcttccagcttttcccattcagtatgatattggctgtgggtttgtcataaatagctcttattattttgagatatattctatcaatacctagtttattgagagtttttagcatgaaggggtgttgaattttatcaaaggccttttttgcatctattgagataatcatgtggtggttcttgtcattggttctgtttatgtgatggattacgtttattgatctgcatattttgaaccagccttgcatcctggggatgaagccaacttgatcatggcagataagctttttaatgtgctgctggatttggtttgccagtattttattgaagattttcgcatcaatgttcatcaaggatattggcatgaaattttccttttttgttgtgtctctgccaggttttggttatcagggtgatgttagcctcataaaatgagttagggaggagtctctctttttctattctttggaataatttcagaaggaatggtacaacttcctctttgtacctctggtagaatttggctgtcaatctgcctggtcctgggcttttttggttggtaggcttttaattactgcctcaatttcagaacttgttattggtctattcagggattcgacttcttgtatttcaagtttcaaaagaaatttcatgcatgctgcagttctgctcctctgattttcctggttctaccagtcttttgtgtctgggctgcacactcaggctgccttcctttctggtagcaaatggctggctgaagttccaagcctgtggtccagtctcttccccaatcatgaaatgaagtcctggacatcactctgattggaacaaatagaagaaattttctatccccaaaacaaccaatttgagcagggctggagtcaggacaggggttgcatttgggagctgtgtatatgtgtcttaaacctgaatctcctttctcttataataacaccagttattggatttagggccaatcccaacccaaaatgatgtcatcttgaaattcttcctttaattgcatcttctaaaatctttactccaaaaaaaggtcacattctgaagttcccagtggacatatcttttggagaggcaccattacagccctctaccatctgcctactgtctactccaaatccatgtctgctccatgagaaggtgacatctacctcatcccaacatccctgacaattttaacgcgttggactatctattcttagcctcaaatctcacaaaaaatattatcaagtcaaagataccaaatctaatcatctaaatcagatatgggtgaaactttgggaaggatccatcctagggtgatgatattcctctccttctgtggacttctgaatctagcaaacaagttatccgctcccaagatacattggtgtgtttacatcttctccatttaaaactaggaagacatttgttattgctttttcttttattccaaaaaggagaaaaacgggagggataaaggggacactggaattaagcaaaacctagcacagcacattctattaggttttacggcctgagaacaatcttttgcggcatgatcctgcacaccctgggcccacagcagctccgtggatggcccctgcccctgggcctgcagcagtgctgtgactggcttctgggtgcaggtggcggtagctcagtcgctctctacatccacacctctgtccttggagtcattcttcctttttctgaaagggtagagcatgttggctgtcaagtagccctactggcgtttcctgcttgtaaagtttataagtcccatgactttctctcattttgtcttgtctctgtccctttgggtcaaagttggccgtgtttctactgatttaacattctcaaaatcctcataggttcctgtgtatatcgagggaatctatgtcactagacagaagagttctccagaattcttcctgggtaaccctgtctctattcctggattctgctgagattggatccgcgatacatgcctaatcttttcagtgaaaagttttctgggcactcccttggtgttcattatagaacatcctttctctgtccacagtgaatttcctcatcacggtatcctttgctttccaaaaaggctcagaacttcctaagtcatcaggtcctggttccttttttgctccaacattctttcctcaaattatctctctcctctcatattttaccaaaatgattaagaagaaaccaggccttactttcttcacgttccttgaaataccctcagctaaatagacagcttcactgcttacaaattatcctttgcactcaacctcagaatacaactcaggcaaatttctgccactttataacaaggatttcctttcctagcatttccagtaacacttttctcatttccatctgcgatttctgctgaggtctccatgtcagcagaatcactgtaagcattcatatttcacctcagcagaatcaccttaagcactcatatttcccccaacaggcttgtccaggcaagctagatttttctgtcatttgcctcaaagttcttctagcctttaacccccaattccaaaaccacttccacatttttagatatttgttacagaaggaccttgtttcttagtagcaaaatctgtatgggtttgctagagctgcaattactaatgaccataaacttgtggcttaaaacaccagaaacttgttcttccatagttccgaagattagaaatccaaaaggaaagcgtcagccgggttggttctttttggagacactgagggagaatcaattccatgcctgctaaacagagaagcacatggaggctgtgctaaaggatatggaatttcattcatctttcatgtagcaattccacagtgagtggtccaggctgtggagcagtttgctgtatggaatcatttacttaggctcctctcatagtattattaaaccacactctaggcaacagatctcacccttatcatatgtagtgctctcttttggcagcatgttaaagcctatagactcctcaaaaagaaataataatataaatggccaggcatggtggctctcacctatatgcctataatcccagcacttgggaagacgacttgagcccaggagttcaagactagcctgggcaacatagggagatcccatctctacaagaaatttaaaaagtagccaggcgtggtggcatacacttgtggtcccagctacttggaggctgaagtgggaggattgcttgagcccagaagttggaggttgctgtgagctatgatcgcaccactgcactccaacctaggtaacagagcaagagcaaaaacaaacaaacaaacaaaaaacagatggctacaaaggaaacaaaatgaatatagttttcaaaatataaaaatataaaaacaaaatatttgaaaactgtgttatggtaacatatgtttctttaataagacattaaataacccagtctgaaggaggaacttggtgcccagcatcactttgaagtggtgatgagcataaacgatacacttattttgaagtctcttccattactgtgatacgatatgaaatcatctaacgtttcagttggtggatcagaggcactgctaaagctattgtttcttttttcctcattgctagttaaaggcaatgataaattttttagaagttcatacaaataaggtaataattatgattttcataactagttcatggaaacctaggctaagattctgtgccctggaggctttttctactttgtagatttgaagccaggccactggtatgtccatgttctatagcagacgggaaagaaaagtccagagcagagagctctgtgactgaggtgcacatgcacacacacacatgcacacgcacacagacacgcacacacgcacacacacacgcacacatacacgcatgcacacacgcacgcacacatatgcacacacgcacacattcccttcactccattcaactggcctgaactccgttgtgaagatggaagggaatggaggaatatggttggtgtgggtggccacattcctagctaaaacttagaaggaaggttcagttactttgaaaatgagcggagactggatactgggatcttcagcattttctatcacaacatcccaccaacctcatatccaggtctgtagggtccttggatcattgtctgccagtgattcttggtcagagccacaagctcagcgcctccacgttcctctttacctaccttggaaaggagggatgagtcttagtcacctccttgcaagttcccttggcttcttattcaccttgcctagactcttcgtgaaccgaatgccctagggaaacacagcttttcccaagacagtcacacgcactcacctggaaccagaagattgtagcattgtctttgctcagggcctaggcatctgctagtctaacatttcaataaccaagagagtcattggagtgacttagaggatcaaggataactgtgctctcatgtgaaaatatagctctgcccacccagaagggcagccaacaccttcttgattatgggtgtcttattccacttattactccattaaactaagatatggtccctggggcaggggaaaggtgggtgggtggggagatgttaaggttggttttataggtgttgcatttcaggtccctgtgggactgttgaagggagatttttaggaggcagctgaacattctccgtggatctctaatgagaggtctgcactgaagatataaatgctagaaacatcagcctagagctaatcacagaaggtctgagagagaaaaggatgcccctaggagcatgtgggataaaaagtggagacggtagggctgagatctgaagagcatcaacactaaagagacggtatcagaagagatgtctacatgggaaactgcatgaatgtagccagagaaatataggtcaagtaagataagggctgaacattaccaatgtgtttaaggtgtacattggcaactttgaagagacaaacttcagtgggagaaagtgcaggctttgggaactgaaaggcagggaagcaatgggatttaatgcttgtgaagttctctttcaggaagtgtatttctaaaaaccatggcccttcatgggcacggtaacctggaatgtgtggggatatctgcaagtgtcacgatgggtgtgggtgtcactgttatttagtagagcatgtcaggggatccgactgtcctacagtgagtgggacagcagccaccgccatgcagagccatcctcctcctgcacagcctgccagggccctgctgcttactcacagactctcagacactaatctatttctctgagcctccacaagcttaaataaagcacacatttttgcatagttttaatatacactaaattttatagaaattcaattaatgtttaaattgagagaagatggtagtttaagttcagaaatgtaccctaaactctccatatttcaggaaaatcatcacaaagagcattgctcttatggcatttaagcatccgatacaactcacctatatcaaattgctccgtatttgaatgtaactgtcaccttcacagtgattttacacataatggatgtgcagttgggtgtgtcttagtatttaaatactaaaatcatatcattttatcttaaattatcttccttttgtttctcctttacattacagtcagggcagtatgttgactttcaaacattgtttgtgtggttatataacattatcagattttctatcagatcatgaagcgggggtgttgggcacccttgcattgaaagctctgttctgatttcacaactcctggatccactctccaagcccaaaccccttcctgagaaacattctaggtataactgatgaacctgagatgtcatgagagcagggcaaggccaacaggatgctctcttcctggaatgtggatttggatttcaaactctaacgagtgtctgtaagccgcttaactggtgtcctgcaggcagggctgaggagagtttgggttgttttgactcatgcacacccaaaatcagaacatgtttgtttgcaaggagagaaaagaacaaagcagaagagagacacagagatgagaggtttgtcaccttgggtcacagcgagcctgtggcatggttccctgggaggccctgctgcccctctgccttcccttaggtgcctcagatctgtaccacagcccttggtgctgcattctgccagctcagaggggttttgttaattgcaaccaaaaagacttgcttaagtattttaatttccacttcctagtggttttaattaatagttgttagatgaattaatgtaaaaacaaatgaataaagtaaccgctttagatgaattttaaaaattttattaaaaacatgaatattatttcttcaactaattatctacatcagtgttttttatgatttctctccaattccactctttcccccaccaaaaaagagacagttgtctttcagacactcttaggattacctcatccaaaatatttgttttaaatgaaaagacttgatttgtgagggggatgtgtatatatgtgtgtgtgtgtgtgtgtgtgtgtgtgtgtatgtagcagaaaaagaggggaggataaggtccttttctatgcaactctctgagcaaaaacaatgcagtcctttaaaaaattgttatcttctaatgttaaaatagctaattcttatttaaagatttagttgtaagtcttaaagaaaatgttagtcttttaaagatacaagaagtgttaagggcttctccacttttattgggctgttggattgggtattaaaattgagaaatatgccttataaagttgtttttaattgtaaataagttcatgcattgttaaattcaattcttgaaatattctgtttctaagcaaatacacaacagtacatagccagtttgctatagtttcatgttttaaattttgtgtacatttcatgtcacatgtttcttaatttttagatgtttacatatctgagcctatgttatccttgtacaagtttgatgggaaagcaaccaacacactgatcttttattcttattcaatttttctttcataggtaatttctgcactagttttattttacctgaatttgatcagatgttttaaatgatccaaattcctagcactagaaaaaatccaggcttttgtagtttatgttgttgttgaacgagaagaagaccagacaagtagacacacgttcactaatcataggggtgacttcctttccagtgttcagcaagggatggggtataaggcaatgccaaacttcaacctgcccatcaggtgaaagagtgaagaatgtttaatgtagagttgttcttgaaactaggccagatgatgtcacatactggcttaattttttctattggatgcttaattatttgaggattctgcaggaaaagtccgggttgagttggcttgttcaatactaaaatatttttctcctgctaaagcacacacattcgctcacagcagtgtatatggaacttatagatgtttatttttacctctttttttcttttcccttcctttcttactctcactacctaagttcaaggtctgtggactgtgtacttgtggaggaggagcaccaggaaggggaagggagggattcctgctggcaggaaccatggagagcacatccctacctaaccctgcagaaaagtagccacagctcaaggaggtctctcatgtagatctatagagtagcccgtgcaaaatagcatctttcatcacagagtgactgacttttaacaaagcaataaagctaagcctctttggcccatctaccagaatgaggacactgcgttgttaagaaatcactcaattaaaataatatttgtcgaaattgtacttgacctgtaatcaagagcgacatttgacaccttagtgcagcttctcaaatgttacttattatgacttggaagggtaacaataaacaaaaacaacacaacaaataaatacaacaagaggcaaatcacacttccctttggtttcagaatctacaatgactgcttgaacatttgcctagtttaggaatatgtctttgtctcaggattttaggggtgcagaaaggaatgagagtatatggagcccaccttttctgaactagctttcccagtagcctggaaacagaaggattttcttgcttggtagagagtattgaaccctgtccttctgtgtgtccaggccaatgtctgtcgagagcttgactctctgtgctggaactaaccttgtccatcttcccatagttcagtattgtcttcctcaaaataaaggaaattatctccaacttcttgaaacatgcagaattttgaaatggttttctttataaaaacgataatatcagcatattttctaaactgcttgttagaggtatagagttgtgcagcttagatttggctgttgtgtcagacctctgtgttccagtcctcctgtggagtggacctgtgacatcagaacacacagaggtggggactggaatatctcagagtttccccaggggctccaaagggctggaagtgtgggtcccacctccttccatgaggggcagaagaaatgtgttgaaaaccagcgatggacaggtgatgcatcaggctctcaagtctcatttctagattccatcatccacatcaatttttcatctattacttttactcattgtaggcttttaatgagatgtagagaaaaatacaagctgaaaagaatcaacaacattttacttcaaaagattaaagacataattaccagtggttggtagtacgtctatgaggagcagcgaaggcatcgctcatctcgggcttttgagacgcgtgccattatcaagcctaaccgtgcaaaccagagatgcagagctgacttaaaaagctgctgttttgtcccaagaaaatcccttaatacagtatctgtttttcatagtagtttggctaagcttctgacattaccatgacttgcttgcccatgtttctaaaccatactgactcaaggaaaaggagtctttggatagagataacatgcaattgaaaatctgatgatattttgcatagtcagaaagacttttcctgcttagaaaatgttttctgtataacacagatgtgtttttcaatgccttggaatttcctctttagaaaatatgttgagtcaaccgaatttttaaagaaaataattatatcctgaatttagctctgctgaaagagcatgcaaaagttgcaatcatgtcctttgtaaatgtgttttaaagttttcccagagtttatcacgtgaggatgaaatgaaggagctggggtctcagggttaatgtatactttgatttgcagaagaataagaaagtgtatacaggtaaaaataaaatacatatgtgccaacatgtacattatcactaatcctcagaatttaaaaacctctactttttaatattcaaaatccttattggtccttatttggaatatgtttatcattaaaagattcctagtaaaataaagattggaagtgggtaaatgtgtgaatatggtagaaaggtctcttcatgtttccagtttccagggaggattacaaacaaagccactttaaatgtttttttccaaagtgactataccattggcatttctaccagcaatagaggagagttctgtttggtcagcatctttgctgacacttatgtagccagtgcttttttattttgattattctaatagaggtgtagtagtatcttattgtggtttaatttgaattcctgtaataattaagaatattcagcatcttttcacgtttattttctattcatatatcttggtgaaatgtcttatcaaatattttgcccaatttttattgctctctttcttcactattgaattttcaaagtttattatatattttgaatgttacttattgattaaatatatgttttgctagtattttctcatagtgtttggcttgtctttacattttcttaacagggtctttcaaaaggcaggatttcttaattttgattaattatatttgaccttttctttcaaggacagtgtttttattcttatatctaagaactctttgctgaacttacggtcatcaagtttacttctagaaattttatatgtcaaaaccacaatgatataccatctcacgccagtcagaatggcgattattaaaaagtcaagaaacaatagatgccggcaaggctgtggaggaataggaaggcttttaaactgttggtgggaatgtaaattagtttaacaattttggaaaacagtgtggtgattcctcaaggatctagaaccagaattatcatttgacccaccaatcccattcctgggtatatacccaaaggaatataaatcattctactataaagacacacgcacatgtatatttactgcagcactattcacaatagcaaagacttggaaccaacccgaatgcccatcagtgatagactggataaagaaaatgtggcacatatacaccatggaatactattcagccacaaaaaggaatgagatcatgtcctttgtagggacatggataaacctggaagccatcattctcagcaaactaacacaggaacagaaaaccaaacactgcatgttctcactcataagtacgagtcgaacaatgagaacacatggacacagggaggggaacaacacacaccagggcctgttgggggacggggagcaaggggaggaaacatacaggacaagtcaataggtacagcaaaccaccatggcacacgtgtacctatgtaacaaacctgcatgttctgcacatgtatcctggaacttaaagcaattttaaaaacaaactttatatgttttaatatttaagtctataatctattttgagttaatttttctatacagtgcaagatatgggtcaaagtgcaatttttatgcatacgaatatcccagcatcgattactacaaagactttcctttctcaattgaattgcctttgcaaagctttgtagaaaatcaattgacaatatttagcaagtctatttctggactcttttcagtttcattcattcaggtgtctatccttctgctaatgccacactgacttgactactgcagctttacagtgagccttgagccaggtagcgtgagccctccaattatgttctccctttttcagtgtggtttgggttattcttttgaatttttactaaattttagaagcactgtgtcaactcttattttaaaaatcacgtgtcatgttgattcaaattgcattaattctataaattaatttggggagaaatgacaatatcacttgagtcttccagatcatgactagagaacatcttcatgtctttttaggtggtctttaatcaatgtttctttcatacttttttttaaattttttgacatacaggtcattcacagagtttgttacatttatacatcataattattttaggtttttggtgctattaaaatggcagtcttgaaatttcaatttcaaattgttcattgctagcacattaacatgcaactgatatttatttatttatttatttatttatttattagagatgggggggtctcactccatcacctaggctggagtgcagtggcacaatcatagctcactgcagcctcaaacatggaggctcaagcaatcctcccacctcatagctgggatcacaggcacaaactaacatgcccagctaattttcttttttcgtagacacagggtcttgctatgttgggcaggttcatctgaaactcctggcttcaagggatcctcctccctccacctcccaaagtgctgggattacacatattagccaccgcacccggcctgattttttttttcttttttttttttttgagacggagtctcactccatcaccaggccggagtgcagtggcgcgatctcggctcactgcaacctccgcttcccaggttcaagcaattctcctgcctcagcctcctgagtagctgagattacaggcgcgtgccaccatgcccagctaatttttctatttttagtagagacggggtttcaccatcttggtcaggctggtctcaatctagtgacctcgtgatccacccacctcggcctcccaaagtgctgggattacaggcatgagccaccatgcccgggccccggcctggtttttaaacattgttttgctaatatcatgtttcagttctagtagcctcctatggattcatttgtattttcttacacaattacactatctgtaaatagaaacagtttttttttgttttgttttgttttttttttttttacaatctatgtgctttcatttcttttttcttgttccttattgagctacctacaacgaccaataaaaatagtaacaggggacatccttttcttgttcctgattttagaaagaaagcattcaatcttttactaataaatgacttcatttgtaggtattttgtgggtttttttttttagttgaggactttttattgtattgaatgaataaacattgaattatttcagggttttatttgcatctcaaaagatgatcatatgcttttccttctttagtctgttaatatggtttattagcattgattaatttttgaatattaaaccaccctttcattttcagaataaaccacacatggtgatgacgtgatgccatttttacatgctgctggtttcgctttgcaaacatttttagaataattcacatcctttctcatccagtgccattgtcttctgcctgaaatatttgcaatgccacattagtcatttcctccaatcttatccccacttgaatccacttgagtcccggcaccatccatccaaagtagaatatcaatcatccctctttcttagctttctaaagacccctttcatctctaagtgtataaattcctcagcatattaaaaatggatctctagcaaaagcctgcagcttcatctcttctttttcctgaaatattgtggtctacaaaagctacatttcttgtctttctgtgactctactgtattgctcacactatttcttttcctggattttttttataccatatttattatgaagacatattttcatcattttttatgtctccactcaggcaccctctcattctccaagaaaaggctattttcctcttttgtgtataccataatgggcagttcagatacctattatatatgggtatatattcacatgcaaatatgtgaaagtgaagttacctatctaaaggttgccttccttataagtctaagctcctggagagcaattcaggtggtattacatttatttctttatttatttttattattattattttttgagatgaagtctcatgctgttgcccaggttggagtgcagtggcatgatcttggctcactgcaacctccacctcccaggttcaagcgattttactgcctcagcctcccgagtagataggattacaggcatgcaccaccatgcctggctaatttttgtatttttagtagagacggggtttcgctatgttggccaggctagtcttgaactcctaacctcaggtgatccacctgcttctgcctcccaacatggtattatatttatatcccttgcttctagcccagtgcctggctccataataagtacccgataatgtttgttgaactattctgggttaaatagcactgacatgggtggattcttgaggaaagatgtcaccatgatttgtgtctcattagccagcgtccctacaactttgtggagcactggctggagcgaagagtgactagaagtgagataatcctcttctgcagttctgcgttcactgtctgtaatgccctttggactcacagactacatcaaacttacaatgaatgcagagagttctttactacaaatatatctatctaagcacagacacagcaagttttcaattccaaaaggctcatagaactgttggttccatccctttcccaatgtgtaaacaggttttccattgtgagttacacagaggaattatagcagtgtccggtaagaccgggtgatccaggaatggaagacgggatgaacagacagatgaaggaacctgagaaacggaggcttgggatagacccagggtatcttctttccacctttgttggagatccttggttaggagaccgtaggacaaaaactgtcgggctgttctctgtcgtcagcgctggggcttgagagcaacatcatgggatatttactgttccttcgcagataccattcacaaatggccagagtcttaatggtgttgtttggagtagagaattaataggggcaaagctctaatagcctcgaggaagctacggttttctgctgagaagtgtgtaagggttgctgcaggacaactctgcagcggaagcagacaacccagttgttagttcctgaggagagaggcctgtcctcccacctctccttaaggagccatttctctctgcttctctactcgctgatgacatccaagctcttctttgtgccaagttttccctctttcaatgaagcctcgccctcagcaaataaacacagtccaatgcccgttaacaaaaaggcaacaaagcaaaactaaaacaacaagggcaaaagaaatctaaacccaaaacacaagaaagtatcgtcactctgacctcatctggctttcatccaatctctccattcacagccaaattctgtagagaagagtgcagggcctacacatcctgcctcctcacttttcatttactctcgaatcttacgcgatgaatcttgcgttcatgtgggtcacactgaagccgcttgtgtgaatgtcaccaatgaacttgtcactgcttcaccttcccctcctttaagcaacttttcaggcgagtgtctgagatgccaccatataaaaatcggaatgtctttagctttgtttttttaaaaaatgggtaaaaatgaaagactctataaggaaattttattatctcaggcaaactagccacacttggcaacaagagctcccaatatctggagtccccaagattaattcatcatcagggcccacatcatcaaggcgctactgctgcctttttcaatgtggccatgttcagatgttatgctgatttgggggctcgatccactcgagctttcgtggtgtgtgtgtgtgtgtgtgtgtgtgtgtgtgtgtgtttgagagaaggcataggaagttggaaggaagagaaagagggaaggagggaggaagagtaatagagagaaatagaaacagagagtgctgtgtgcatgtgtgtgacatgtgacagtgtgagagtacctgtgtttggaaagagcaaaaccagacacatcactgtccaccaaatgcaaggaaattgtttcttccccagctttgagaacctgaaaaaattttctaggaatccttcggcagcctcttgtcccagcataaatgattcacagcctaaaaagaaaagactccccttagcttatgagttcctaagtagaaaaagtcctatttgggcttaggagccattcccccctctaaatgattcaatccaatagggaaggggaccacaggacaggcttacgctcatcaggactgtcctgattcacgaagaaaggggtggccaggttctgccagtgtggatggaggagcaatgcttgttgagtggacgaccagtaatgcctgccaaactccttccactgggttctcctttcctagttctgcagtacaagcttcatggtctcagcttctgcccatccatcagtgtccttgttaatggaggtgttcaggaccctctcccatcacttcttcctccccactctccactcacaactttgggcctgtccaccgcctgaatgcgcttgacctggacatccatttatctaggagagctatctcacttgtgttcaaattggtattctctccaatagataagacagaaaatctgaactaatcacacacacttatacacacacaaatgcactcacactcagacacacacattcatacacagacatgcacagaaatacagacacacacatacacacacacaccaacacatgcacagacacacagacaccctcagacacacagagacacacacaaacacacacaaactcatggacacacacacaatgacacagatgcacagactcattccaaatctttcctcttgccttgcacttttatgattagtgaattaaatcataacccacaccattacccaagccaggaaccagtgaatattcctggctgttactcctctcttgagccccacagttgctgcaaggagttgtgtcctgctgatggctccccttccacatgtctcaccaccttctcctctcctgcacactctgagattgtttagtgcaggcctgtacaattgcacacaggtgctgcctgtcaccccaacagcaggcttgttctctccatctgcacccagagagaggctttgcagctgggggtgcgaatgtggcagaatttccatcctttccaacacacattcattttatggcccagaatgtgttctcttctctcttggtgaatgtcccaaatgcctgtgagcagaatgtgtatttgcttcaattgggtgtggtcactaatgtcccgggcagggtagagttgtccagctcttctgtctttccacagattgtctaggcactgattctatccattactgtgttgaaatctctagctagaattgcagacttatttccccttttcagttctatcagcttttgattcctgtattttgaaactccaatatgaagcccacactcatttaggattaatatggaagccagcctttaaataagaattttatcttaaaattaatatcactctgtcatcttaagaagatgtgaggcctgtgagagcaggtactgtgtattttgtgtctgtattctttctgtttcacactgcaaccataatcgatgatgaataaataatgttccctcttgaagatctggtccctgtctccagggcagtgctatgtaaaaaaaaaagagcaaattcctgccttctaaacactcctccacaccaacaaacacactgtgctaggaaagcagcagtgatgaaggtgctgggcctccggtggaaaggtaacacacatttcccatcctcgggagcttgcagcaccggcaggcgggccgttacacagataacacagtatgcttctatgccagggtggacccaggagtccgtcctccctgtcacttacgagactggagtcctggaaaagttactgaacttctctgtgccttggtttatccatcatgaaagtcgggttaaaaagaataccccacccctagggtggaagtgggacttgcttgaattgaaacagttggtttttaagtattttgcatagctgttattattaaattaacatcaaaaaagttgcctggttattttaatatggtcttcacataggcagtacagccggccagatttagcatttgcatttataactgagtctctcttctgcctccgtgagacttcccaggagttgctttgatgctgcagggagtcacacatctccagatgcatcactggtgactcagcaagcacctgacctggtccgttacacatggggcttatgtgcttaactcctatgcgatgatgattcttctctagttcttgggggtcgttccctttctcctactgtactggctgtttaaagtcagcactgtatgagttgcatacataagccaaatgtcattgacttcttctttttttttttttttttgacagtcttactctgttgcccaggctggagtgcagtggtgtcatctcggttcattgtaacctctgcctcctgggttcaagcaattctcgtgcttcagtctccagagtagctgggattacaggcatgagccaacgtgcccagctaatttttttttttttgtatttttagtagagacaggattttgccacgttggccaggctggtctcaaactcctggtctcaagtgatcaacccaccttggcctctcaaagtgctggcattacaggcatgagcccttgagcccagcatagatgtcattgaaattcaagggggaaatcatttggaatgatcacagcgactggtccagagatgactaacagcttaaaatgaccccacctgaaacagcggcgatcagtggaatgtccaagtatatatatatatatttttttaatgaagctcttttggaccagaaaccctaagaatgtttagtctggagttccataattataaaaaaaatcttctgaagttaatcaccgtttttatctgaaaccatactctaactcagtaactctttctcagggtttactttctcttgagccacaagcatccatttgtcccctaccaaagggactagactttcatgatggataaaaggacactagtgccaggtagcttctgcttctaaattttggtttaaaaaatgaaacatctccttttagatattctaaaaagtcatctcccctaaaatcatgaagcctggtttataaactttatagaagaaactaggtctttgaggctaacacatattagtgtattaaaaaatacggtaaaccagccgggcacagtggctcacgcctgaaatcccagcactttgggaggccaaggcaggtggatcacttgaggtcaggagtttgagacaaggctgaccaacatggtgaaaccccgtctctactaaaaatacaaaaattagccaggcttggtggcatgctcctgtaatcccagctactcgggaggctgaggcacgagaaaggcttaaaccgggaggcagaggttgcagtgagcagagctcccatcactacactccaggttggtcaacagagcaggactctgtctcaggaaaaaaaaaaaaaaaaaaggtaaacaaacattgccttaaacaaaaattgtatcttataagattttacaagttgcacattatcaacacattctagttaaatgcttaaaaattacttcacaattaaccctatggatttttaaaagaaggaaagcttagacacaaactcaggagccagattgttttccaacccttgggcctgccacttactaagtgtaccagcctccctcggagtcactctattcctcgtggaatctgaatagtaagtgtacacttgacagaacatacggagtggtaatgtgaaacaaaaatatagaatatttaaaggacttacctaacagtaagaaaaaaaataagttcacttaaaagtgtttttattttcttatttgcaaaacaccccttattgtggtaaggtctaacaatatactatacatgtaaaagttttacagaaaattactgtagctttcgataatttaatatataactgaaatacttgagatggcataattcgattttatgtcagtaatatcgagtgagactaatcaagatagcaagattatgttgcaaaattaaaatgaggaaattgagaggatttctcaggcttctgtgagtcactgcctgggctgtattaatagtttcattgtgctaggtgcagtggctcatgcctgtaatcccagcactttgggaggccaaggcgggcgaatcacctgaggtcaggagttcaagaccagcctggccaacgtggtgaaaccccgtttctactaaaaatacaaaaattagctgggcatggtggcaggcgcctgtaatcccagctactcgggaggctgaggcagaagaatcgcttgaacccgggaggcggaggttgcagtgagccgagattgcaccattgcactccagcctgggtgactataacgaaacttcgtctcaaaaacaaaacaaaacaaagcgaaaaaacaaaaaaagtttcattgtttcacctccacacagctctgtctgcattttgagcaatggccaccagagggcaggaagaaccaatctataaagcacacaagggtttcaccaactttgaagtcctccgttagaaggcaagttgtccactaatatgtaggaacgattaatggccaccagagggcaggaagaaccaatctataaagcgcacaagggtttcaccaactttgaagtcctccgttagaaggcaagttgtccactaatatgtaggaacgattaatggccaccagagggcaggaagaaccaatctataaagcgcacaagggtttcaccaactttgaagtcctccgttagaaggcaagttgtccactaatatgtaggaacgattaatggccaccagagggcaggaagaaccaatctataaagcgcacaagggtttcaccaactttgaagtcctccgttagaaggcaagttgtccactaatatgtaggaacgattaatggccaccagagggcaggaagaaccaatctataaagcgcacaagggtttcaccaactttgaagtcctccgttagaaggcaagttgtccactaatatgtaggaacgattaatggccaccagagggcaggaagaaccaatctataaagcgcacaagggtttcaccaactttgaagtcctaacttagaaggcaagttgtccactaacatgtaggaactatttttaattataccattattttccctcaattttatttataaattaatgaattcacaaaatatttccaaagctcaagtgaagtacatcctaatcaacttgatttacaatttgtgatttttctctgaatcaatctataaataatcaataagaagataattatttagaaaatgaggctccgaaaaatatgttggctttacattttttgcctgtgcaagtaaatataaaaatgtcttttctcacatttcttccatttataaaccgtttttaaaaatcataaattaagacatgtgtgttttaaaagtctcacaacatgcagcattttaaaaattgtcttatgctttactgctccctcccgtaggtaatcactgttacatttctcatttactgcaaaattctctgtgcatatggagcacatagatggatagatagatggggtgtgtgtgtgtatatgaatgtgtatgtgtctttggggtgagtgtgtctatgtgggtgtatgtatgtgtgtctatttgtgtttatttgtgtctctgtgtatgtgtatgcatattacatatgtgtatgcacgtgtgtgtatacagtatatgtgtgtgtgtctgtgtacttgtgtctgtgtatttgtgtgtctgtgagtacatctttgtgtgtatgtctatgtgcccatgtctgtgtatttgtatgtatgtatgtgtgtatttacatatgtgtatgtttgtatatgtatgcatatgtgtatatgtgtgtgtatgtatatacagtatattaagtgtttgaatgtatgtatcatatttatcaaattccacgttgtattaattgttctcacactgctataaatgactacctgacactgggtcatttatgaagaaaagaggtttaattgactcacagttctgcatgggtggggaggcctcaggaaacttacaaccttggcagaaggcaaaggggaagccagcacatcttaacatggccgatcaggagagagagagagggaagcgggtactgtcacacacttttaaaccatcagatctcatgagaactcactatcacgagaacagcaagggggaatctgcccccatgatgcaatcaccttccacctggtccctcccccaacactgggaattacaagtcaacatgagatttgggtggggacataaagccaaaccatatcacacgtcttgctttttcactgaatgtgggaccttggacactttccctatcagcatgtgtggctgcaccacatggatttcagtagtggcagaatattcccttctatagattccacaattcatccaatcagtctttattcttccaatttaaggcaaaacaaattccaatgtaaaagcttaaggccaggcgcagtggcttacacctgtaatcccaacacttcgggaggccaaggtgggcggatcacgaggtcaggagatcgagaccatcctggctaacatggtgaaactccatctctactaaaaatacaaaaaattagctgggcgtggtggcaggcgcctgtagtcccggctactggggaggctgaggcaggagaaaggcgtgaacccggcaagcagagcttgcagtgagccaagattgtgccactgcactccagcctgggcgacagagcaagagtccgtctcaaacaaaacaaaacaaaacaaaaaaacaacttaaattaatattaaaaatagttgttgtttccttccagtggacttaattccaaccaggctggtgaagaagccagttggatagccagtccctgctgaaggtggatggcccctgctcttgtctcccggttatcaggctctcgctgcttttgggccagaggaacagggcgtcctccttgaggctgcgagtcgtccctctgagtgcctctcaccaagggatgaagcagcagccatttggccagagagcagtcactcacccatccttgggtccaggagaggcattgcaggctttaccctcagatctttctttccaaagctccttctcttcaccctgtatccagggcacttggcctgaagagcctttgtcttctggaagcttctgctgccttccctgcccagatccctcagacaaggagctgtaaggcccaactccaggaggaaataaaggaagagggaagaaggagaagcagagagaggagagatgcataaattaatacctccagaagcagccttgctacagacacatcatttgttcctatttttttctctgtgtcacacagtgctataatgcagaggaactgctgcttcgaagggtacgtgcctgcacagtctgagattggcaagttgctatcccctgtgtgtccccatcgagggggacaagaccctttccttccacattctcatgtgtacacgacggggctttaacatttactcatatatataccatcttcttgtcatctagagtttcaattctttcattataaagaatgtggtaattgttcatttgtttacatctttatcatttatattattctcctaaattcttgcccaagacatttgaagcaccctaaaacaagaaggcatatctgggtagttcaaactaagattttatgaaaagatgcaaatcatttacagaaaggacaaatatattctagacatctgagattgaattgttgtaaatttgactatgagctataaaagctgacatataatatcaacaatattattatctaatattatctaatattagatatcatcccataaatgaatgctttcatattattctaaacaaaaaatttagaataaaaacctacaggaaattatcttatagttctaaaatatgggctacctttccaacttaaaaaaaaaaagcacagtggtagtaaagagaagtagagaggaaatggggagttttccatactgaagaatatctgcaatgaagacctgggtacatttttttaaattacaaaactaaaaaaataaaggcatctaatatataattcagtgtgggaaaataaaaacaaattgctagtttaacttaccaatactgtgagcaatttaaaattgttagattccaccaaataattgttaaatgagataagccaggtaaatgtcctagcacaatacctgaagtacggtattctcaataaatttcagttattgtcatttcagtagttacaattattttcaaaagttgtttaatctttttttctttcaatccatgttaattctaactgactcagcttaaaaggaaactacttcaagattgaatttgaactagaaatgggatccccttgtagtgatgtttgagagagcagggattactctccttaaggcttctatttaactaaaattttattggaactggataacatgtggaggtcggtcataatcaatcactgatagacataaatctgcaaagaattcacttgagggggagatgagtgtcttccaccccattcaaggttgccattttccacaaagttcaggcagtggagtgaaatgccacaataatactctattaaatcaacacattggtaatgtgatggcaacacctgtagccatttcagatacaggcagaagctcgcagttattaaagccacatggagagggtacagcaggaaatgaagaaagagggaagaaggagaagcagagagaggagagatgcataatttaatacctccagaagcaaccttgctacagaccatcgtctgtttctattttttttctctgtgtcacacagtgctataatgcagaggaaccactgctttgaagggtatatgcctgcacagtctgagattgacaagtcgctgtcccccgtgtgtccccatcgatgagaaccacatttatggttcttgtggttgcttggacagtctttattttcatcatgagacaaagataaggcagacatttctggtgaaagtctaacagttaagttgtggtaaaagataggatagttggcgttgggcaacttcagtgaaaaagagctccttataatatcataatcttgtcctcagaaactcgtggactattatttgtggctgccttttcatcctttactttagcaacttaccggttgctttctgtgtatgtggggccagtttatgtgagatttgaagaagggattttcctttattgggaatgtctaatgagcacttacaagcagaatttcctcccgatttttttcctctgcactctgaatactggaaagtgttttgagggccttctgacagtacaccacagtgatttttttttctgtcgtaatccatttatgactaaaaaacatgatgctttttgtttttgagatagagtctcgctctgtcacccagggcagagtgcagtggcacagtcttggctcactgcaacctctgcctcccaggttcaagcgattctcctgcctcagcctcctgagtagctgagattacaggcatgcgccaccacgcctggctaatttttgtatttttagtagagacaaggtttcaccatgttggttaggctggtctcgaactcctgaccttgtgatccacccgcctcagccttccaaagtgctgggattacaggcatgagccaacgcatctggccacatgatgctttttttttggttgctcacatgacaagctattatttttgtgtcactttaaacagaacttaaggtatagacttcatgcattccttcttgagccctcttccattacagcagttaaattttgtccagattctgtaaactagtattgctgcctgagtggccgtggtatttcctttgagctgaacttggccattttagcttcttattagacaaaacagtatacttggagtcctggtgaataaccagacaaatggaatttcttgtccacaaagctctagcacagtggttcggcgcagaggcccatgcttccctacttgatcttgtcgtcactggctcagccaaatgctatttctcaaagttcataaatctcacatcctctttgtggagtctttcccctttttgtacatgtataatccccggcctctaagtagtctattcacttctaaagctgttgacttggcaagataacaactgcatcattcacacaagcaaatctgctcttggaggacaaaaagaggtttattttggcttagatgactccgattggccatctccattgaaaccttggcagaagataggtcccttggctactggggagaaaagtcaagtaaacctttagtgccaggaatggtgtttgtaaagattcggcatgaagtggtacatttcgtccttgggcttcttactggcttcaacccaaacagaatcacttagtgctgttccccgggttaatgatgttattagaacaattgactcaaagcaagaactgaaaggctgagtgctttgttgtgaggtgtgcaaaaattcaagtctatcaaaacaggcttagcagagctgccaccagcaggacagcgtttagcttttgtttgctgcttctttgattcttcatgggcagctggcatttctgttgctggtttctactctctcatccctagtggaccctacgttttctcccctgagtgtgcttatctgtccagctgcaaaaaaaaaaaacaaaaggtgtgctgttgtttctgcacttctccctgtcctcatctctcaacatcatatgtgtgcagagaaatcacacttgttgctctgttgtctcaaaaggtctagccctgagtttgctgaggtgatgatgaaggttgtgtgaagctgtgtcaaacactgagaaacatacacacaggctgtagcagatgtgtgttattccctcaatgcatgcaccagtgatggggatttagaatgagccactgtgcaaagatgccccagagagactattccctatacattattattcagtgtaagatacccaataaagcaactagataaagaaatgcctatatctaaacctaaaatattcactcactcccagcgttaacttccctcatccttaagaacaggctatccatggagctaccaaaatgcacttttaaaaagtgtgttcatgctgcacttcatattcatgctcccttttcccttgacaatgtgttatatgttgagaatctttaaataaaactgctcaaccaccaaaaaattatttctccccatttctattcatcagtacttcttatcttgaaggctgatttcaataatcatttatccctcacaacttcatacaatttcttccttttagagtcccactgaatatcatttatatttatcccacgctatttttttattctagtttatattattacttgtgaactttcctaatctcgtctcccaaacacacaaaccctttagctacttccatgggaggctatcttatctattactctccacacccccagccacgggatatgcaggagacactaatggatctagtatatcacacaggaagcagatcaccaggacgacaattacaatcagcaaatcccagtatccactaaagacagtgacaagggtaaaaagacaatagctgagagcgaggtaataagtgttcatgaagaatttcttaagcctcagcatcttagcagctatagcagaatgccataacaaagacaaaagtattttgagtgtgaagttataccatgacatacaaatgcatctgtcaatgaggccgttagaaatcttccagaccaaaggtcccaaacacccaccataaccttctgattcaatagggcacatatggggaaactgtactgttaaaaagcacttctaccaagaaaaggcaaaaaatgtcccctcaccactccttctcaacactgtactggacatcctaactaatataataagacaaaaaaggaactaaaaggtatacaggctgggtgcagtggctcacgcctgtaatcccagcactttgggaggccaaggagggtggatcatgaggtcaggagtttgagaccaccctgaccaacaagatgaaaccccatctctactaaaaacataaaaattagccaggcatagtgatgcatgcctgtaatcccagctactcatgaggctgaggcaggagaatcgctagaacccaggaggcagaggttgctgtgagccgagatcccgccactgcactccagcctgggtgacagagtgagactctgtctaaaaaaaaaaaaaaaaaaaaaaaaaaagatatacagtttgggaagaaaaaaattaaactgtctttgttcacaggtgacattatttgctatcttaatttaatttccaaagaattgatgaaaagcttctgaaactactaagcaattatagcaaggttgcagaagacaagattaatatacaaaaatcaactattttcctatataccagaattcaacaagtggtatttgaaattaaaagcacagtaccatttacattagcacccccgaaaatgaaatacttatgtataaatctaacaaaatacatatgagtcctatataggaaaactacaaaactctgatgaaagatgtaaaaataaataaataaatcgagtgatattccatgttcatgaatacaaggactcaatattgtcaagacatcagctctccccaaactgatctaaacattcagtgtaatctcatcaaaatcttactaaattattttgtggataaactgaatccatagttcatatgaagaagcaaaagacacagaatagataactcaatattgaaggaaaagaacaaagttagaggactcacactacctgacctcaagacttacaataaatctactgcagtaatcaagacagtgtggtatttatgaaacaggcaaatggatcaatggaacaaaatagcacagaaatagatcaccacaaatataataagctgatgtttgacaaaggagcaaaggcaatacactggagaactttcagtcttttcaacaaatgatgttggacatccacatgcaaaaaaataaatccagacacagatctcacactcttcattaaaattaactcaaagtggatcgaaggcctaaatgtaaaacacaacactatgaaacttctagaaaataagagaaaatctagatgatcttgggtttagtgattttttttatttttattttttatattgattactgtgttccaggatattctaatttactaatttttattttaatttttttctgtctagtctctgattttttaattttaatttttatttcaattgttttggggcgacaagtagtgtttggttgcatggaaaagttatttagtggtgatttctgatattctggtgcacccatcaccagagtagtgtacattgtgcccaatgtgtagtcttttatctctcactcccctcccagccttccccctgagtccccgaagtccattatataattcttatgtctttgcaatgacttttaaaatacaacatcaaagggatgagccatgaaagaaataattgataagctcacttcgttaaaataaaaatttttttattttgctaaagacaatgtcaaggaaatgaaaagacaagttacagacagactgggagaaaatatttacaaagacacatctaataaaggactcttatccaaaatacacaaagaactcttaaaatccaacaataagaaaatgaatgacccaaataaaaaatgggcaaaagacctgaaaacacaccttatcaaagatatacagatagcaaagaagcagagtaaaagatgctcaacgtcatagacttatggaatttctgttaaaacaatgaaatagcatgatacacgattgcagtgcagtagagcttcccccaggaatactgttcccagacttgtgcagggctggttccctcactctttgcctttctgtttgcagcataaatgccacttcattgaggtgttgaggattccctcactctgtcccttccgcctctcaccacaagcacctgctttattttactatagcacctgctctttttttttctcatgcatttgcttttatgctctgtccattcattcctacagatggtgagctcctgagggcaaggcccatgcaggtcattttcagcactgcaccctggcctaacttgccccgtgcacaggtgagtgctccaggcacagtttctgaatgaataaatgagagtatcgaagatcccccttcccacctgtgaggagctcacattgaggagatggatgctcacaggagatgcaagttgggtgggaggcagggggacacccagagtgaccctgggagtttctctggctgcagccgccccattgagcagaatgggcagcgcctcccctgatggccagcactgaagacccaggcaaggaacctagaaacaaagccctcatctgggtgtgggtgtcctcaaggcagtaggactcccagggctgaggggggcaatgaagggggagctgtaagctccaggagagataagaggggcgtcggaaggctcccttgacccctctttccctccactggccctgggggagcccagtccactcataaggggggtgtccagtccaccccatccacttccaaacgggggcccgaggctgcaagcaaggacgctcccctctacatgcagggctcggcctcccctgcaccacccaggacccccgctgtcctgcaagccccagccgctctgggccaggacccagggagtggaaggcattttccaagggcacagtggctccctgacggggaaccaaggccaggcacgcttctcccagactgggggcctcggggcacctgagaatggccatccttggtacaagagagcggggacccactcccgcgcaccctgtgccccaggggacgcaggactctgcaccctgaccctagagcttgccctaggatggcccggccatggcgaggccctggaacggtgaagactctctgcccatcaacctagcacctctgccctaccctcagtcgcatatgcacccggtgcgagggagaaggcaaccaggaggtcacacctaaggtgggggcgtgagcggcaatgccagccgattgtaaaaccttccctgctcctgcgtggctctgcaagccaatcgaaaattccgtcgtctatgccgccagccaatcaggatgtccagagcgcggtgcttccagccatttgggactccagctggctctgcgcctccagccaatcggggtgcccgtccttaatacaaccagccagtcagtgcccggcgcgcgacaccagcagccagtcaggaagccctgcgttcatgcttccagccattgtcggagtgtcagccgtcacaaggcacttccagccagtcgcaacggcgggtcgccagcgccgcagtagctcgcgcggtgcctgtcggtagtcgcgtgcggggcggcggggcggcggggcggccggcggcggccatgggagatatcccagccgtgggcctcagctcctggaaggtgacgcggtcgcgggcagggaggcgcgcctgacctaggggagcgcgggacttgggggcgcccgatgggacccaggccggggctggggagaagtgcggcggcctcccctccgcctggccgacgcccgggaaaggcgctgctgaggtggccgcccaccgcccacaagcagcccggcccggcctttcctaaaacggagtcggtgctgcccgccgaggcgctctctgggagaagcgggaacctcggcagccaagcctcagactctggggctgcggccgcggcgttgggcggggctgctctgtggagaggcggagcccttgaagttactcagaactggagcggggatgccgaggggaggccttggcggcgctggactcggccggaacagggaacctcgaagcctcctctccagcaaagagagaaagaaaagttggggccgggcgtggggtgcgggcttgtaatcccagcactttgggaggccgaggcagtaggatcgcctgagctcaggagttcaagaccagccaggtcaacatggcgaaaccctgtttctacaaaaaatgaacaaatcagctgggcttgggggtgcgcgcctgtggtcccagctactcaggaggctgaggtgggaggatcactggagaccaggaagtcgatgctgcagtgagctttgatggcgccactgcactccagccttggggacagagccagaccttgctggaaaaaaaaaaaaaaaaaagaaaaaaggaaaattggaattgctgattaggctttaaaagaaactttgggatctcatgttgttccctgtttagaagcaacctgccctgatgcctgagacatataatcgctctgtgcatttatggggtgcagcgtaatgttttgagccgtgtatacaattgcaatgtggttaaatcaagctaattaacatatctatcacctctctcagttattattgtttgtggtaagatgtttgaaatgtcttgttattttgaaatacacatgtgtagtaaattattgttgactgttggcatcctagtgcgcagtaagtcttaaaagctgtgtctcctgtgtgtttgaaactttgtaccctttgatcagcaactccccattccctccttcctcacctcccccagcccccagcgtcttataaccaccattctattctacgacctttctctgctttgaacttcacaattcctgccagtgatttgagacagcactgactaaaaagcgtttaaaatttgatctttaaaaaaaaaaagctaaacttagttgttgataaaagctataagaagtcatataggaagttagttactgaaggagtcagaatgttcaaggcctgctcatgaaaatattatttaaattatttctcttacctgcttaccaactcttagaggctaggagtgtcgttttgttcatattggttctcagcatctagtgaaggacgtgcatctgtcagcccttcattcagtaagcactcgatggattaaactgttgagtctcttgcttccctttatttctgcaacaatttggtgcaggagtccagactttcgtgcacacaggataaggaaaaattagtgaaaactgtgcttaacaggtcaaaatattctatttatttttcttggactgcaggtgcatcaaattggattaatcataatcactcatcactggtctatgcaaaggcttatttttactcgtctatttttaatagtgaataaacatcacagacctatccgttatctgttgccccagaaatgctgcatcaatggccaaacaccagacctcagtggtgtacagcagcaagtgtattcctcccacacgggaggtcaggagagcagctctgtggaccttggctgggctcagttgggatggttggggctactccacttggctccgcacatctcctgtcctcgtgcggttagttagggagtgttctcaagatgatggctgaagcacaagagagcaaggggagcggtgagatgtctggagacctcagcctgggctcttcattattaggggccacttgatccatctgtgtgcctgatcggtgctgtcttaattactacagttccttgataagcgcccatacctagtagggcaggtcacctctccctgctgttgtagatttacagtgtacaatttgatgagttttgacagatgcatgtacctgggtcctggctttttattttggcaccttactctccactgtaagttttagaactagcttagaaggttccatgagaaactttattggggttttgattggaactacattaaatctgtagaccagcttggagataattgacacctttgtaatgttaaatcttaacttttctacaagcatggtattcttctctgttaataaattgtcctgaatatggttcatttctaacatcttttcatatggttgtatagtttttcctgaagagaatatatgtcttttgttggaattattattgggttcttgatagtgtgttatactactggaaattatatttctctgaagttacattttctacttgtttcacctgctatattcattacacttccagccactttactaaactgtactgttatttctgttaatttgtgttacatttgtttggattttctacacaaatgatcatatcatcagcaaataatggtagtttactttcctttttttccactctttaagcttaaaattgcttcttcttagttgttcaggtgcttctggaaagcacctccagcacagtggccattcttgttttgtacctgattttaaaggatgtaagatggatattttttaatattgatactctttatcagattaattcttttccccgacttactgggagtttagattttgaatctaaactggtattgaatcttaacaaatattgattgagttgacttttgtttttgtactttaatctgttaatattgatgaattacagattttctaatatcaaaccatccttagatatctgagatacactcaacatgggtgtggtatattatcttttcataaatattgttgcatccaatttgcttttattttacttatgaattttgcaacggtattcatgaataagatgaatgtgtgacttttaatatttttgtctgattttgattcagggttatgctagttttgtagaatgagttgagataagtccgtctttttctgttgtttgaaagtctgtgttaaactgagatgatttttttcttgaaaattttatgaaactggtggttttctcttttttttgaattccttgcattctttaataattatgtaactattcaagctttattcttgggttaaatttttctaggaattttcccattttatctcatttttccaagttattgacatatagttattggtaatattttcttttaagtccattttatctgcatgttttactgtccattcgtgtcagttttttaaaaagttggcctcttcatcaacctagccagaagtctgtttattttactgaagtttttcaaagaactgacttctggttttgttgatcttctctgttacatctttgttttctattttattgatgttattcttaatcatatttttatctttccatccaatttcttgggttctttttctaacttaagatggatacttggttcattagctttcaaccactctgaatctgttgcctataaaatgaagataattatgctgctctaactcctagggttaccgtgaagctccagtgagaaagtggtttgtgaactataaagcccttgtcagtcttcagtttaatgagactgcaaacccgcccacccccatagtcttccctagttctagtcccttcccttgcctgagcttcatttagagtgactgttctcttttctgaactaccttattgcttgtagcattatacattcatttaggttttgttatatacttctttttgtatggataccttcgtgtgagtctacacctcagcctttattattggacgctgtggtatctgagtatacaggataaatcttaagcctctttgcatctcagttattattcattctgtacttttttattgctttgatcattcaggaagcataccatctagctcagttttctgcagacactaaaaataacctatagtttttttttcccaaaatatgtaaaggagttggaacttagattattcataaattccttcataactgatattgcctgtttttagactgattatactagtaccaaattagtgacttaattttttatgtattatgttgtccacatgcttgggtgaaaggggagatttgtgttggattcctctgactgtgagaagacactttgttttgttggttttgcaggcttctccagggaaagtgaccgaggcagtgaaagaggccattgacgcagggtaccggcacttcgactgtgcttacttttaccacaatgagagggaggttggagcagggatccgttgcaagatcaaggaaggcgctgtaagacgggaggatctgttcattgccactaaggtagggcttctctatgcaaggctggcagagcttgggtaatgctacatctctggagggctttctactttctttatgggagttgatgactttgtttcatactcaaatcggaataaacaagaatattcacagcttcatgagcatgctgaattatattgtgtgcaggtttgtttcatattatttacttggtcattcaggtaggagtacacagatatcccccaattaacaatacattatcaaaattcagttagtgatgggcactttgactacagtggtgaataggacaaagtcctagccctcatgaagtctgtttacacagcgattcctaaattcagaatcactggggtgattgttaaatgcagattccaaattctaccccacatctgttgaaggagaaactctgggtgtggaggaagcagcttgagcacaggcataaggcaggaagcagcacggcaggtgcaggggtttgtaggaagcttggtgtattagtctgttctcatgctgctgtacgaacatacctgagactgggtagtttataaagaaaaagaggtttaattgactcacagtttcacatagctggggaggcctcacaatcatggcaaaaggcgaaggaggaacaaaggcacgtcttacatggtagcagacaagagaaagtgtacaggggaactgccgtttataaaaccatcagttgtcacgagacttattcactatcaccagaacagcataggaaaaacttgcccccatgattcagttacctcccactgggtccctcccatgacacgtagggattatgggagctacaattcaagatgagatttggctgtggacacaaccaaaccaaatcacttggtctctctggaccacacaatgtcaggttgcaggagtaatgagaagtgaggctgagtggtggataggctaagccatggaagttcagctgtgccctgtcaggagctgtgcttttacctagagacagaggagccctgtttcatttttaaatagggcagcttgtatcatatgtgagtgcaacttgtgttgtatataggatattttagtaggtgaaagaagcttgcatttgaggcagaggcaggaggccaggtaggagacattaacagcagtgcaggtggaagatgatgaaggcctgcactggcacagtgggtgagggagggagaagaggaaatggatgtggagggtattgggagtcaggacctgtggaagatgcagagtggactacgatagtggagaattcaagaattcctttgcttttgatttggaagcagaatgtaagaccatgagatcaggagtcatgggttcatggtctagctgccattcaggagctgtgagtattagggattagatggctcaggctcacagcttcattatttgtaaaatgagactttggatttgagaatttcctgagtaacttcccagctaaagtttcatacctcaagattcaatgttgtttctatagttgaattgccttctgttttactttatggaagttaatgttcttcaggcaccattgctatctgcactagagcagagggtggtaagagagcagccttggtgtgtgcttggccaagcggggagaatgtcttctgaatagtccaggtagggatgtgagcaactggagatttctaaggctcaccctgcaatttggagcaagttgcttctgtgtggatcgtagtcagcagtggaaatatgttcattattttggaaatttggaaaagtcatagaaatgtaattagaaataaataaatcacacatataagcaccacatggagacaactgtgattaacaatggaatacatttacttccagcattcatttttttatttttgtgaagatactgtgctcgtttgttttcatttatttgattcccctttcttttactttcttttactttactttcttttactttactttcatgtttttcccttgctgtgatggagccttcaggttagcttatgtcacagtcaataaaagtaaaatgaggggaaaaacacaagtttttctacataatgagagtgtggaaggagatagctaaaagaagtaaggcagtgtgagctaactcacctataggctaacccacatggttacagtgccttaggaacagagaactcttaatacggagtctgtgtaagtgagaaacacaagatagagattcttctgatttttcgtcatatcttttctgcctgcaggaatttcattttcgtttttgtttttggtcccaatgaatccaaataaccatcaaatatctcttggattcctgagcttcccttgaggaggagtcaggcagaaggatcccagctttggagcctctccctgcaggtgtcctggaactcttctgaggataatgtccctgtcctcccatcagaacttgccgtgttgtatttgtggtcatctcatcttggctattttgggttcaagacagtagctttgtggggctacagaatgggtgccatgctggctctgggtgggcacgtgtgacgctggtcccctctcctttgtagctgtggtgcacctgccataagaagtccttggtggaaacagcatgcagaaagagtctcaaggccttgaagctgaactatttggacctctacctcatacactggcccatgggtttcaaggtaccgttcagtaggtagttcgttctgcagtttgcaggaccttcctccccgtgctcacaccctgtcttgcggtggggagagcatggaccagcattcagggcaggggttcccaggctgcatctgccacatgctagctgcggcatttgggcagtcctcttgatatctctgggcctcagttaaggagaggcttggcttgacctctgaggcccccacaggtctgtctttcaagccagtcgctttttttccaagccaagagagcagtagatttttttcccttaggtttttaggtgaaagcagtgatcagatgaggaaatactgctgctcagagaaagttcccagtgaattcctaggccttgtctcttcttgcaggttctgttctctttggggagtaaatgctgttttgcaatatgggagatatttgcttgttcacctgcagcagggtccagtgggttgtgctggtagttgacttttccacttggttttattctcttaattgcttcacagtgtgtctggagcatgcatctgagccatggctctgtcactaagctaccccagtctggccgtgcaacttccctactctaggcaacctgcttctgcctcacacgggtcctggccaggatgtccctgcatatttgccctgggctgtgatgacagcctgcctgggcaagggcctgatcacacagttgacacctgtgaaatacagaagcccttgcagggatgttcttcctacaatggaatgggtgactgctgctcagcagtcttctacataccaacctgtgagaaggtccctttatgtgtgccacactgttggttactgttttagagtaaaataacaaaaaacacttcattcctagcacagctttacttaactaaggctttgtatctagtttccataaacgatgtgggcagctgtccgttagtgacactgactaagaggggaagatacccagagggcaaaaccagagtgatgtctgtgccttgaaattcattgcatgcagaaaatcataattaaaacaatggctacagctgtattacactcattgccagccagcattgttgtaattatgtacccagaactatgttaggtactttacacatattaactcatttaattctcatgacagttctacaaagttgacactattaacatccctcttggagagatgatgaaactaagatacagaaagtttaaggtttaagttagattattggagcccagaagcatatgctcaggtcagacatttgttacactttccttgccctcatcctttagcagattcctgtctttggatttctgggtcgtagaaaaggaaaaggtctcagatcatccaacaaattacagaagagaataatgcagcatcgtcagcatgtcttctggccagtaggaactgctaggccttgtgtgatgctggacaattagatcagggtccgagtatgagtcccgggctgcaattttgtggaggcttggataaatggcaacatgggatgtggctttaaagtgagactgttagttacttcagctcatcatggaaaatgcctctttcatgtgtatcaggctggaacatgtgacattcttccactgttgtttaggagtgtgattaggtgtcattaaataaacatgcctatgccattcacccttaacatgctacgtgggagtacatgagggaggtagctggattgcacgtcagtgcttctctgaaagatgactttaggttcttgccctttcaagatgtatctctctgccctctacctcctgtgtacctttgtattctcacttccttacctgtcatcatgatggggattctaagaaagaagacaagaccctaacagtggagttaggagagggttgattgggctctataagacatgaagaaaatgcactcctcacccattctttacccgaaattagtaaactattttctggaggcaatgggagaggacaaccttgcatcagtaaggatacagggtcttcctttcccatcttgtgagagatgaacagtgaacatcaggctggcagaggctttgccagccatccagtccaccagccattcatcttttcttagaaaggtgaagactgggcctggtcacatggccaggctggggttgcttagtgacagggctgtggcttggatgcaggtctcctgacacatggttttttttgttttgttttgttttgttttcacacatctcaactctccttcttcgcagcctcctcatccagaatggatcatgagctgcagtgaactttccttctgcctctcacatcctcgagtgcaggacttgcctctggacgagagcaacatggttattcccagtgacacggacttcctggacacgtgggaggtgagctgagccacaccaccaggcagcctcatcctgtgtgggtctccacccaggatgcagtgagccctgagctgcttgtgttcaaagacatcaaggttgtctacctgagatgtggggtttgtggagcaaaaaaggaatcaatacccgaagaactcagagacctcagtgactttcttgttacctttggtttggtatggtgcagttctcttgacacatttgaggggtagctcattatagacctcactttttttctcaaatatttatttatttttttattaaaaaccatatttatttcagaaaatacaggagagttcttctgcattaaactaacattaaaaattttattttcctggcacccagcagtaaccactgttaatgttttatagttcctttttctctcaagcatttcagaatgataaagttggcagcatggaagctcaggctggggaggtgagaccagtgtcggggaaggttaccaagtgtcagcccatttccagggttcagaccaaaaacagccctttactgcaggggcttgcagtaaagacttgagcaggaaattaagggggtggtggatttgagaggttcctggaagttgacccacaggctggggtgggtctcaggcttgggctccagcatggctgaccgagcacgtgtggtcttacagtcttgctaaccatcatgtgggatgggacatcacatttgaggcccaagaagaaagtaagcttaagcttaagcttgctgaggttaggacagagcttgctgggtgaagctctccagggaggaggccagagggaaccctcggacagggaggagtcccaggctaggctccccccatcaatagaagacaaagactgacctaaggtatctgagatgtcaggaccagggcccatgggcctcaactctttctgtcacaatgttttaggtcctaaaagatttgggttaaactctagggtgctcatgtagcaccagcgaggttccggtgattgttgcagagttgaggcagtaactaactgctgcgtgttggcccattggtcactcaggacttgctgctgactacggaccctggcacgaagctatgctcttcctgaagctcaggggcagcctggcttgctggtcagtgaccagctcagagctttaggttgctctgccctaaagtgtcttaaaatagtaagtggagaaggtgggataggagaatggtgatgtatccgtgtgcttaagaaggtcagtgtctcagtggaaagaaaggtgaacaaataaaatccgcagcagacatgcttgccagacatcaggaggaataggaacaagaagagctcacatgtgtcgagtactggacgccagccttagctgacacttcctgtgattccacataacccctaaacatccccgtggcacaggccatgtagacctgtcctgaagctgagaaaattggggccaagtgaggccatgcaacttgcccagcatcctctagccagaaaagatgggactgaaatcagaccttgagtgcagaaatgcttttgaagcttcaagtaaaatattgtaaaaatattgggtccaaccagttttagaataccatacagaactgctgagggacgtagattgtcagtgcagtagacagaagcttcacacccagcagagtcgttctcttataggccatggaggacctggtgatcaccgggctggtgaagaacatcggggtgtcaaacttcaaccatgaacagcttgagaggcttttgaataagcctgggttgaggttcaagccactaaccaaccaggtaagccgatggaagcatcagagagtttaacctgtgtggctggtcccccagctgccacctccacagggctcttctggaaatggaagaatgggtgaagcacaaaacaggcctgttctcctctggcagcactcagaatggtgattaaaggcagcagctaggcaagtggctttcttgaaggtgcatctgggtagatggtactgttggcaggcagggcatgagctggtgcttggccctccatgtgcagtgcaggcaggtcaccaggtgtactcagaagcagtcagggtcctggcaggtgcctcacccttatccaggaacatgggcctcccctctacctcttcccagcctgcagactgcagcaagaaagagtggatgactagatggcttcacgcgaggctcacaggctgctgaaggtgatgcaggcacttcgtttttttaatgcagagaaaagacttgtggggaaataactattgtattttctagactagctttgtatgttcaaagatcatttatacagtacttaagctttttattgaagagtagaagtgcacatgtgaaaatggaactgtataaattctcataaactgagcatagctctgggactagcatccagctcagtaaacagcacgtccagtgcccctgtaacccctgccgagcacagcatcattcccattcccagcagctgggattcacgtctgaactttacacaggtaaaataaaataataatgcaacataaacccctctgtgctcgcctctttcacacagcactgtgtttctgtacatgtgattgtagatagtgctctcttatttcttgtggtattctgttttgtgaattaaccacaattgagttatccattctgctgttaatgggcacttagacagtttccagtttgggactattaagaatagagcatcatgttctatttttttgaataaatatgctttttaaaaaagttctgtatggagtagatgcagaaaagtgtgtgaatcataaaaggcatacatagcttgatgaatttttgcaagtgaacaaactcaagtattcagcacccagaacaagaaaaaagccctcagccattcagtagctcccctgggtcctgttgtagccaccaccatgaagagcaacctggcttctgacccagcttctcatgtagttcagctttgccttgtatacaaccctatatatataagttttgatatatgtttatatggatagtagcttccgttttgtgtcagtatttttagttgttcagcactttaaatacctgggaatgattatggcatagtctgagtagacaaagtggggtggagggtctgctttctgttaggttgatggacaccaggaacacaggatgcggaaggctccagaagggctggcctctcttttggaggctttccaaacaggctgatcttgatgagcttggcatgttcctgagagcaaacgcactattcatagttctctgtaatttacactaaataactatttattttaaatctccttataacctggaattatatgtgagagtttggagaatgtgcaagagacagagatcctgctctctagcttcttaaaattttcattcaagtcacctgtagaatgtatttgtcacatgtagttcctcaatttcattcattcattcagtggatatatttttagcacttcctacatgtctagattgttcttagtgttggtgagacatctatgaacaaaacaaattcaaacaaaaatctctatcttcatgaggcttagatcttggtgacacagaaagacagtgagcaaatatgtaaaatctatgagatgtcagatagtgatagatgctgtagaggaaaataaaggccgggggagatgagagctatggtgtgttaacaatctttatctgagtgctcagggaaggccctgcagagcaggtggtattggaacattcagatgatgtaggtgtccccaaggccgtggactcagagaccatgacacctgctggcctcttggagattgctctgtccagactcctcacaacagaaacacttaggcctggagctgggccccatggctactcggtgacagccaagactttgacgcaggtcttctcttgtagagcttttcttgaacactagtggtctgaattttatgtaagctatgattctgttatagattgagtgccacccatatcttactcagaagaatctgatcagtttttgccaatccagagatgtgtccgtgactgcttaccgtcctcttggtg

SEQ ID NO: 10609 - DNA, 686 bp, Homo sapiens
gggtgaacgaggagccctgtgatctcctgaggttcaagagagacttcagaaggcttctccagggaaagtgaccgaggcagtgaaagaggccattgacgcagggtaccggcacttcgactgtgcttacttttaccacaatgagagggaggttggagcagggatccgttgcaagatcaaggaaggcgctgtaagacgggaggatctgttcattgccactaagctgtggtgcacctgccataagaagtccttggtggaaacagcatgcagaaagagtctcaaggccttgaagctgaactatttggacctctacctcatacactggcccatgggtttcaagcctcctcatccagaatggatcatgagctgcagtgaactttccttctgcctctcacatcctcgagtgcaggacttgcctctggacgagagcaacatggttattcccagtgacacggacttcctggacacgtgggaggccatggaggacctggtgatcaccgggctggtgaagaacatcggggtgtcaaacttcaaccatgaacagcttgagaggcttttgaataagcctgggttgaggttcaagccactaaccaaccagattgagtgccacccatatcttactcagaagaatctgatcagtttttgccaatccagagatgtgtccgtgactgcttaccgtcctcttggtg

SEQ ID NO: 10610 - DNA, 21829 bp, Homo sapiens
acggcgggtcgccagcgccgcagtagctcgcgcggtgcctgtcggtagtcgcgtgcggggcggcggggcggcggggcggccggcggcggccatgggagatatcccagccgtgggcctcagctcctggaaggtgacgcggtcgcgggcagggaggcgcgcctgacctaggggagcgcgggacttgggggcgcccgatgggacccaggccggggctggggagaagtgcggcggcctcccctccgcctggccgacgcccgggaaaggcgctgctgaggtggccgcccaccgcccacaagcagcccggcccggcctttcctaaaacggagtcggtgctgcccgccgaggcgctctctgggagaagcgggaacctcggcagccaagcctcagactctggggctgcggccgcggcgttgggcggggctgctctgtggagaggcggagcccttgaagttactcagaactggagcggggatgccgaggggaggccttggcggcgctggactcggccggaacagggaacctcgaagcctcctctccagcaaagagagaaagaaaagttggggccgggcgtggggtgcgggcttgtaatcccagcactttgggaggccgaggcagtaggatcgcctgagctcaggagttcaagaccagccaggtcaacatggcgaaaccctgtttctacaaaaaatgaacaaatcagctgggcttgggggtgcgcgcctgtggtcccagctactcaggaggctgaggtgggaggatcactggagaccaggaagtcgatgctgcagtgagctttgatggcgccactgcactccagccttggggacagagccagaccttgctggaaaaaaaaaaaaaaaaaagaaaaaaggaaaattggaattgctgattaggctttaaaagaaactttgggatctcatgttgttccctgtttagaagcaacctgccctgatgcctgagacatataatcgctctgtgcatttatggggtgcagcgtaatgttttgagccgtgtatacaattgcaatgtggttaaatcaagctaattaacatatctatcacctctctcagttattattgtttgtggtaagatgtttgaaatgtcttgttattttgaaatacacatgtgtagtaaattattgttgactgttggcatcctagtgcgcagtaagtcttaaaagctgtgtctcctgtgtgtttgaaactttgtaccctttgatcagcaactccccattccctccttcctcacctcccccagcccccagcgtcttataaccaccattctattctacgacctttctctgctttgaacttcacaattcctgccagtgatttgagacagcactgactaaaaagcgtttaaaatttgatctttaaaaaaaaaaagctaaacttagttgttgataaaagctataagaagtcatataggaagttagttactgaaggagtcagaatgttcaaggcctgctcatgaaaatattatttaaattatttctcttacctgcttaccaactcttagaggctaggagtgtcgttttgttcatattggttctcagcatctagtgaaggacgtgcatctgtcagcccttcattcagtaagcactcgatggattaaactgttgagtctcttgcttccctttatttctgcaacaatttggtgcaggagtccagactttcgtgcacacaggataaggaaaaattagtgaaaactgtgcttaacaggtcaaaatattctatttatttttcttggactgcaggtgcatcaaattggattaatcataatcactcatcactggtctatgcaaaggcttatttttactcgtctatttttaatagtgaataaacatcacagacctatccgttatctgttgccccagaaatgctgcatcaatggccaaacaccagacctcagtggtgtacagcagcaagtgtattcctcccacacgggaggtcaggagagcagctctgtggaccttggctgggctcagttgggatggttggggctactccacttggctccgcacatctcctgtcctcgtgcggttagttagggagtgttctcaagatgatggctgaagcacaagagagcaaggggagcggtgagatgtctggagacctcagcctgggctcttcattattaggggccacttgatccatctgtgtgcctgatcggtgctgtcttaattactacagttccttgataagcgcccatacctagtagggcaggtcacctctccctgctgttgtagatttacagtgtacaatttgatgagttttgacagatgcatgtacctgggtcctggctttttattttggcaccttactctccactgtaagttttagaactagcttagaaggttccatgagaaactttattggggttttgattggaactacattaaatctgtagaccagcttggagataattgacacctttgtaatgttaaatcttaacttttctacaagcatggtattcttctctgttaataaattgtcctgaatatggttcatttctaacatcttttcatatggttgtatagtttttcctgaagagaatatatgtcttttgttggaattattattgggttcttgatagtgtgttatactactggaaattatatttctctgaagttacattttctacttgtttcacctgctatattcattacacttccagccactttactaaactgtactgttatttctgttaatttgtgttacatttgtttggattttctacacaaatgatcatatcatcagcaaataatggtagtttactttcctttttttccactctttaagcttaaaattgcttcttcttagttgttcaggtgcttctggaaagcacctccagcacagtggccattcttgttttgtacctgattttaaaggatgtaagatggatattttttaatattgatactctttatcagattaattcttttccccgacttactgggagtttagattttgaatctaaactggtattgaatcttaacaaatattgattgagttgacttttgtttttgtactttaatctgttaatattgatgaattacagattttctaatatcaaaccatccttagatatctgagatacactcaacatgggtgtggtatattatcttttcataaatattgttgcatccaatttgcttttattttacttatgaattttgcaacggtattcatgaataagatgaatgtgtgacttttaatatttttgtctgattttgattcagggttatgctagttttgtagaatgagttgagataagtccgtctttttctgttgtttgaaagtctgtgttaaactgagatgatttttttcttgaaaattttatgaaactggtggttttctcttttttttgaattccttgcattctttaataattatgtaactattcaagctttattcttgggttaaatttttctaggaattttcccattttatctcatttttccaagttattgacatatagttattggtaatattttcttttaagtccattttatctgcatgttttactgtccattcgtgtcagttttttaaaaagttggcctcttcatcaacctagccagaagtctgtttattttactgaagtttttcaaagaactgacttctggttttgttgatcttctctgttacatctttgttttctattttattgatgttattcttaatcatatttttatctttccatccaatttcttgggttctttttctaacttaagatggatacttggttcattagctttcaaccactctgaatctgttgcctataaaatgaagataattatgctgctctaactcctagggttaccgtgaagctccagtgagaaagtggtttgtgaactataaagcccttgtcagtcttcagtttaatgagactgcaaacccgcccacccccatagtcttccctagttctagtcccttcccttgcctgagcttcatttagagtgactgttctcttttctgaactaccttattgcttgtagcattatacattcatttaggttttgttatatacttctttttgtatggataccttcgtgtgagtctacacctcagcctttattattggacgctgtggtatctgagtatacaggataaatcttaagcctctttgcatctcagttattattcattctgtacttttttattgctttgatcattcaggaagcataccatctagctcagttttctgcagacactaaaaataacctatagtttttttttcccaaaatatgtaaaggagttggaacttagattattcataaattccttcataactgatattgcctgtttttagactgattatactagtaccaaattagtgacttaattttttatgtattatgttgtccacatgcttgggtgaaaggggagatttgtgttggattcctctgactgtgagaagacactttgttttgttggttttgcaggcttctccagggaaagtgaccgaggcagtgaaagaggccattgacgcagggtaccggcacttcgactgtgcttacttttaccacaatgagagggaggttggagcagggatccgttgcaagatcaaggaaggcgctgtaagacgggaggatctgttcattgccactaaggtagggcttctctatgcaaggctggcagagcttgggtaatgctacatctctggagggctttctactttctttatgggagttgatgactttgtttcatactcaaatcggaataaacaagaatattcacagcttcatgagcatgctgaattatattgtgtgcaggtttgtttcatattatttacttggtcattcaggtaggagtacacagatatcccccaattaacaatacattatcaaaattcagttagtgatgggcactttgactacagtggtgaataggacaaagtcctagccctcatgaagtctgtttacacagcgattcctaaattcagaatcactggggtgattgttaaatgcagattccaaattctaccccacatctgttgaaggagaaactctgggtgtggaggaagcagcttgagcacaggcataaggcaggaagcagcacggcaggtgcaggggtttgtaggaagcttggtgtattagtctgttctcatgctgctgtacgaacatacctgagactgggtagtttataaagaaaaagaggtttaattgactcacagtttcacatagctggggaggcctcacaatcatggcaaaaggcgaaggaggaacaaaggcacgtcttacatggtagcagacaagagaaagtgtacaggggaactgccgtttataaaaccatcagttgtcacgagacttattcactatcaccagaacagcataggaaaaacttgcccccatgattcagttacctcccactgggtccctcccatgacacgtagggattatgggagctacaattcaagatgagatttggctgtggacacaaccaaaccaaatcacttggtctctctggaccacacaatgtcaggttgcaggagtaatgagaagtgaggctgagtggtggataggctaagccatggaagttcagctgtgccctgtcaggagctgtgcttttacctagagacagaggagccctgtttcatttttaaatagggcagcttgtatcatatgtgagtgcaacttgtgttgtatataggatattttagtaggtgaaagaagcttgcatttgaggcagaggcaggaggccaggtaggagacattaacagcagtgcaggtggaagatgatgaaggcctgcactggcacagtgggtgagggagggagaagaggaaatggatgtggagggtattgggagtcaggacctgtggaagatgcagagtggactacgatagtggagaattcaagaattcctttgcttttgatttggaagcagaatgtaagaccatgagatcaggagtcatgggttcatggtctagctgccattcaggagctgtgagtattagggattagatggctcaggctcacagcttcattatttgtaaaatgagactttggatttgagaatttcctgagtaacttcccagctaaagtttcatacctcaagattcaatgttgtttctatagttgaattgccttctgttttactttatggaagttaatgttcttcaggcaccattgctatctgcactagagcagagggtggtaagagagcagccttggtgtgtgcttggccaagcggggagaatgtcttctgaatagtccaggtagggatgtgagcaactggagatttctaaggctcaccctgcaatttggagcaagttgcttctgtgtggatcgtagtcagcagtggaaatatgttcattattttggaaatttggaaaagtcatagaaatgtaattagaaataaataaatcacacatataagcaccacatggagacaactgtgattaacaatggaatacatttacttccagcattcatttttttatttttgtgaagatactgtgctcgtttgttttcatttatttgattcccctttcttttactttcttttactttactttcttttactttactttcatgtttttcccttgctgtgatggagccttcaggttagcttatgtcacagtcaataaaagtaaaatgaggggaaaaacacaagtttttctacataatgagagtgtggaaggagatagctaaaagaagtaaggcagtgtgagctaactcacctataggctaacccacatggttacagtgccttaggaacagagaactcttaatacggagtctgtgtaagtgagaaacacaagatagagattcttctgatttttcgtcatatcttttctgcctgcaggaatttcattttcgtttttgtttttggtcccaatgaatccaaataaccatcaaatatctcttggattcctgagcttcccttgaggaggagtcaggcagaaggatcccagctttggagcctctccctgcaggtgtcctggaactcttctgaggataatgtccctgtcctcccatcagaacttgccgtgttgtatttgtggtcatctcatcttggctattttgggttcaagacagtagctttgtggggctacagaatgggtgccatgctggctctgggtgggcacgtgtgacgctggtcccctctcctttgtagctgtggtgcacctgccataagaagtccttggtggaaacagcatgcagaaagagtctcaaggccttgaagctgaactatttggacctctacctcatacactggcccatgggtttcaaggtaccgttcagtaggtagttcgttctgcagtttgcaggaccttcctccccgtgctcacaccctgtcttgcggtggggagagcatggaccagcattcagggcaggggttcccaggctgcatctgccacatgctagctgcggcatttgggcagtcctcttgatatctctgggcctcagttaaggagaggcttggcttgacctctgaggcccccacaggtctgtctttcaagccagtcgctttttttccaagccaagagagcagtagatttttttcccttaggtttttaggtgaaagcagtgatcagatgaggaaatactgctgctcagagaaagttcccagtgaattcctaggccttgtctcttcttgcaggttctgttctctttggggagtaaatgctgttttgcaatatgggagatatttgcttgttcacctgcagcagggtccagtgggttgtgctggtagttgacttttccacttggttttattctcttaattgcttcacagtgtgtctggagcatgcatctgagccatggctctgtcactaagctaccccagtctggccgtgcaacttccctactctaggcaacctgcttctgcctcacacgggtcctggccaggatgtccctgcatatttgccctgggctgtgatgacagcctgcctgggcaagggcctgatcacacagttgacacctgtgaaatacagaagcccttgcagggatgttcttcctacaatggaatgggtgactgctgctcagcagtcttctacataccaacctgtgagaaggtccctttatgtgtgccacactgttggttactgttttagagtaaaataacaaaaaacacttcattcctagcacagctttacttaactaaggctttgtatctagtttccataaacgatgtgggcagctgtccgttagtgacactgactaagaggggaagatacccagagggcaaaaccagagtgatgtctgtgccttgaaattcattgcatgcagaaaatcataattaaaacaatggctacagctgtattacactcattgccagccagcattgttgtaattatgtacccagaactatgttaggtactttacacatattaactcatttaattctcatgacagttctacaaagttgacactattaacatccctcttggagagatgatgaaactaagatacagaaagtttaaggtttaagttagattattggagcccagaagcatatgctcaggtcagacatttgttacactttccttgccctcatcctttagcagattcctgtctttggatttctgggtcgtagaaaaggaaaaggtctcagatcatccaacaaattacagaagagaataatgcagcatcgtcagcatgtcttctggccagtaggaactgctaggccttgtgtgatgctggacaattagatcagggtccgagtatgagtcccgggctgcaattttgtggaggcttggataaatggcaacatgggatgtggctttaaagtgagactgttagttacttcagctcatcatggaaaatgcctctttcatgtgtatcaggctggaacatgtgacattcttccactgttgtttaggagtgtgattaggtgtcattaaataaacatgcctatgccattcacccttaacatgctacgtgggagtacatgagggaggtagctggattgcacgtcagtgcttctctgaaagatgactttaggttcttgccctttcaagatgtatctctctgccctctacctcctgtgtacctttgtattctcacttccttacctgtcatcatgatggggattctaagaaagaagacaagaccctaacagtggagttaggagagggttgattgggctctataagacatgaagaaaatgcactcctcacccattctttacccgaaattagtaaactattttctggaggcaatgggagaggacaaccttgcatcagtaaggatacagggtcttcctttcccatcttgtgagagatgaacagtgaacatcaggctggcagaggctttgccagccatccagtccaccagccattcatcttttcttagaaaggtgaagactgggcctggtcacatggccaggctggggttgcttagtgacagggctgtggcttggatgcaggtctcctgacacatggttttttttgttttgttttgttttgttttcacacatctcaactctccttcttcgcagcctcctcatccagaatggatcatgagctgcagtgaactttccttctgcctctcacatcctcgagtgcaggacttgcctctggacgagagcaacatggttattcccagtgacacggacttcctggacacgtgggaggtgagctgagccacaccaccaggcagcctcatcctgtgtgggtctccacccaggatgcagtgagccctgagctgcttgtgttcaaagacatcaaggttgtctacctgagatgtggggtttgtggagcaaaaaaggaatcaatacccgaagaactcagagacctcagtgactttcttgttacctttggtttggtatggtgcagttctcttgacacatttgaggggtagctcattatagacctcactttttttctcaaatatttatttatttttttattaaaaaccatatttatttcagaaaatacaggagagttcttctgcattaaactaacattaaaaattttattttcctggcacccagcagtaaccactgttaatgttttatagttcctttttctctcaagcatttcagaatgataaagttggcagcatggaagctcaggctggggaggtgagaccagtgtcggggaaggttaccaagtgtcagcccatttccagggttcagaccaaaaacagccctttactgcaggggcttgcagtaaagacttgagcaggaaattaagggggtggtggatttgagaggttcctggaagttgacccacaggctggggtgggtctcaggcttgggctccagcatggctgaccgagcacgtgtggtcttacagtcttgctaaccatcatgtgggatgggacatcacatttgaggcccaagaagaaagtaagcttaagcttaagcttgctgaggttaggacagagcttgctgggtgaagctctccagggaggaggccagagggaaccctcggacagggaggagtcccaggctaggctccccccatcaatagaagacaaagactgacctaaggtatctgagatgtcaggaccagggcccatgggcctcaactctttctgtcacaatgttttaggtcctaaaagatttgggttaaactctagggtgctcatgtagcaccagcgaggttccggtgattgttgcagagttgaggcagtaactaactgctgcgtgttggcccattggtcactcaggacttgctgctgactacggaccctggcacgaagctatgctcttcctgaagctcaggggcagcctggcttgctggtcagtgaccagctcagagctttaggttgctctgccctaaagtgtcttaaaatagtaagtggagaaggtgggataggagaatggtgatgtatccgtgtgcttaagaaggtcagtgtctcagtggaaagaaaggtgaacaaataaaatccgcagcagacatgcttgccagacatcaggaggaataggaacaagaagagctcacatgtgtcgagtactggacgccagccttagctgacacttcctgtgattccacataacccctaaacatccccgtggcacaggccatgtagacctgtcctgaagctgagaaaattggggccaagtgaggccatgcaacttgcccagcatcctctagccagaaaagatgggactgaaatcagaccttgagtgcagaaatgcttttgaagcttcaagtaaaatattgtaaaaatattgggtccaaccagttttagaataccatacagaactgctgagggacgtagattgtcagtgcagtagacagaagcttcacacccagcagagtcgttctcttataggccatggaggacctggtgatcaccgggctggtgaagaacatcggggtgtcaaacttcaaccatgaacagcttgagaggcttttgaataagcctgggttgaggttcaagccactaaccaaccaggtaagccgatggaagcatcagagagtttaacctgtgtggctggtcccccagctgccacctccacagggctcttctggaaatggaagaatgggtgaagcacaaaacaggcctgttctcctctggcagcactcagaatggtgattaaaggcagcagctaggcaagtggctttcttgaaggtgcatctgggtagatggtactgttggcaggcagggcatgagctggtgcttggccctccatgtgcagtgcaggcaggtcaccaggtgtactcagaagcagtcagggtcctggcaggtgcctcacccttatccaggaacatgggcctcccctctacctcttcccagcctgcagactgcagcaagaaagagtggatgactagatggcttcacgcgaggctcacaggctgctgaaggtgatgcaggcacttcgtttttttaatgcagagaaaagacttgtggggaaataactattgtattttctagactagctttgtatgttcaaagatcatttatacagtacttaagctttttattgaagagtagaagtgcacatgtgaaaatggaactgtataaattctcataaactgagcatagctctgggactagcatccagctcagtaaacagcacgtccagtgcccctgtaacccctgccgagcacagcatcattcccattcccagcagctgggattcacgtctgaactttacacaggtaaaataaaataataatgcaacataaacccctctgtgctcgcctctttcacacagcactgtgtttctgtacatgtgattgtagatagtgctctcttatttcttgtggtattctgttttgtgaattaaccacaattgagttatccattctgctgttaatgggcacttagacagtttccagtttgggactattaagaatagagcatcatgttctatttttttgaataaatatgctttttaaaaaagttctgtatggagtagatgcagaaaagtgtgtgaatcataaaaggcatacatagcttgatgaatttttgcaagtgaacaaactcaagtattcagcacccagaacaagaaaaaagccctcagccattcagtagctcccctgggtcctgttgtagccaccaccatgaagagcaacctggcttctgacccagcttctcatgtagttcagctttgccttgtatacaaccctatatatataagttttgatatatgtttatatggatagtagcttccgttttgtgtcagtatttttagttgttcagcactttaaatacctgggaatgattatggcatagtctgagtagacaaagtggggtggagggtctgctttctgttaggttgatggacaccaggaacacaggatgcggaaggctccagaagggctggcctctcttttggaggctttccaaacaggctgatcttgatgagcttggcatgttcctgagagcaaacgcactattcatagttctctgtaatttacactaaataactatttattttaaatctccttataacctggaattatatgtgagagtttggagaatgtgcaagagacagagatcctgctctctagcttcttaaaattttcattcaagtcacctgtagaatgtatttgtcacatgtagttcctcaatttcattcattcattcagtggatatatttttagcacttcctacatgtctagattgttcttagtgttggtgagacatctatgaacaaaacaaattcaaacaaaaatctctatcttcatgaggcttagatcttggtgacacagaaagacagtgagcaaatatgtaaaatctatgagatgtcagatagtgatagatgctgtagaggaaaataaaggccgggggagatgagagctatggtgtgttaacaatctttatctgagtgctcagggaaggccctgcagagcaggtggtattggaacattcagatgatgtaggtgtccccaaggccgtggactcagagaccatgacacctgctggcctcttggagattgctctgtccagactcctcacaacagaaacacttaggcctggagctgggccccatggctactcggtgacagccaagactttgacgcaggtcttctcttgtagagcttttcttgaacactagtggtctgaattttatgtaagctatgattctgttatagattgagtgccacccatatcttactcagaagaatctgatcagtttttgccaatccagagatgtgtccgtgactgcttaccgtcctcttggtggctcgtggtaaggatacctcagtggtgtgttagtcagagtccgactgggaagtagatgccaccttctcatttccttgggatgactgagggagggcttaatggaggttttgacagggtgtggagggatggtactatagggggctgtccacacctctcaagcctgggattgaaggcatggtttattattggaagccagggagtggctgtgagtgggctgccctgggagggtcaggacctcttcagggacgtaaatcagcctggagtgacccctttgctgagttccccaccagggtgtcagcccccttctgacctcctgacaaggatgctccccaggcctctccatggttggatgaggcaaagcctgctgtcatctttacccaggccctcctgcagctgtactgtgctcccaagatcagctaagagacctccagccattcagccacctaagccagaagcttggaaatcatcccttcccacatcccgagtccaatccagcaccaaaatctattgattattctgccaggagaagttggactttgtttcatgatttcatttctgccatcactgtcactgccttagttaagtagcattcccgaggtcattagaggagcccctcagctccctccctggcccactccattccaatccattgctcccagtgggagctgaaaggagctgtctctttcctttcctatgatcctatcactttcctgggaaaaattcttcaggtcttggtgtggcctgtgagatgcagccagcctgacctctgcctgcctctggcctcattccttcccatccctgtgaacatcctgggcttcagccacatgaagctgctgtggggtccttggatagaacatgttttctcacctctgtgcctttgcaaatactgttctctttacccacaaatcttttttttttaaatctggcaaactccagtttctaatttaaggttcagtccagcatcatcttctccaggaagccctcctgaccccttatttatgtttcttacacagcccttgtcacactgtcttgtgattttcttctcagtcccttccactagtcaaagcaaccagagtgcaggtatcttatttattcttctcttcccagcttctagctcagcacctgggaaacattgggaaccccgaaaaggctgaaattacttgagttttatcacctgtgtgttttccttgtgaagtggggcatgtgtgtttgaacttggaaccagctggagagtctctagaaggctgggtccattccacagctgagctttggggtagcggatcctctgatggagtgagtcagggagctctcagactgactggggtgggcaactgggcactctgtttggttccttcaggagacctcgaggacgatactagcacaatgcctgaaacagggtgatggctcagtacacactcgttaaaaaactgaatcctcagagttctcagggcccacccgtgcctgagcagaggatgcacagggactctatgaccatcttcaaaaccacttttaaaggttccacgtgttcacaatattcactttttagtagtattttgggcgaacttttctgaaagtatcatcatcaacaaatatcgattcgctgtgctgtgccagggtgtacagtagaagctgagaagtcagagagccctgagagtcgggggagtcaaagcttgagagcccactggctgcatgcgctgacatggccacctggtttttgaggagaaacaccaaatacacatgaaaagtgatgtcgtgtagccttgttcaccaaagtgttagcagtggttatctccatactggaaatgtggggcgatgtgcttttctgcattttaaaatttcctgtagtcggcatgtgtcatgatcagaaaataaatctttcattttggacaaagatttcttctttctaaagaaaggggcatccatgttggatctcctggctcactcccctgtactgtgtctctctagtgagggggttgacctgatagacaaccctgtgatcaagaggattgcaaaggagcacggcaagtctcctgctcaggtagggagggagggctgttctgagccaggtggggttctctgaccgctctacatccttggggagtcctggggcttggcaggtcccaggaagggactggctcacccaggtgagtccatgactcattagaacctcccagcgtcaagcagaatttggtctgcagccgcatttctagtcactcaagccatgtactcttgcctccgagcctgtctagactcagaggaggagtttccaggccttctccctctgccccaccaactgcatgcatggttagtatgagatggtacagaaaagttatttattctagtcttctttgttctaatgtccagtggggggctgggcgcatgttaaggaattctcattaagcagattctctgatctcctccttgggctgatggctgtcattaccaacatattgacagagctgctcagtgaatgccagtaacaatagctgctgtcattgattcttggactcttactgcatgataaaactcacatgttagaaaataacttagactacatgggatttccctttgtgtgatagtagactttttgtttccttgcagattttgatccgatttcaaatccagaggaatgtgatagtgatccccggatctatcaccccaagtcacattaaagagaatatccaggtaggtgtattccttcttttatttggcgggtttcagatcatgtgttagatgggaagggatgactgctgtagcatacagcctcagggttgcggagcttgatgcaacaggggcttctccctctgcactgtgggtgttggtggttgaccttccctcagcgatcaaaggacccaggctccttccatcttagggccctttctcccctagggtgttggtgtcttctccatccagcccaagattaggaaggagggaagagcatcttgttgggatgatttgtgtgggccaggctggagcatgtgcaccagtcacatggctgcgctcgcccacaggggaggctggatgtctcctaagcgtgcactcaggagaaaggggaggcagttggtggacaggtcaccacctctgtcgcatggaggcatgcccacgtggcctgagggcactgctttgagttgtgtgggaagattctggtcctgactcctgtctagtgacttctgagaggcaggagtgaagactggaacaggtggagcgtgtgcagaacacagagaggcagcggtccttttcagggcaatcttttcacctaagccaagaaccacagaagtgtgtgaagtgtgtgaaatctatttttggagctatgtgaaggaactctgtgtggcttcaaccctgacgacatagtctgtaacccagtcagggccatggacttgggattcccacagtctcactcacgatttaactgctgcatgacctctctcagcctttgtttcttcagtagagcacccttctgataggatcactgagggtgaaatgtaatgatacagtgaagggatagcatagtgcctggcgtatggaagtacctgatgctcttagctgccagtcaccctcagtcacggatgtcacctgtgatgatctcacaggcaacgacaggcattggtggcagcccacacccattgatcatgtcagcataggtgtgtgtgatcctggggccagctgcacagctgcattttcatagacagcatgtgcccaggagtatgctccctcttggtgtctgagctgcccatgagctccacaaggcactgctgcatcctgagggctcggtttggttgtgccaagcaagcatcgccattggggtttattgacccatctgtaacagtgcctgtgccctcaggcttgctgtgcatgccaagctggctgcaggtgggcatagccctgccattggcaggagaggcaggccacccacgatgggaggaccaggggatgggcaggttcctcatggtgtctacagcactctccctgccgggcccttgtccagctcacctgctgcccgcatgcccttctcctctcctttctcaggcgtcctgctctttgaatggcccagagcagctctgggtgaccagccaaccttaagcctgaaaggtatggatttggctaaactgtaaactcagttctctccaatggctgctgacgggcctcttggaacgagactgcaggtctcttgtagtggttagaattgagcactgctgactgaccggcatctgctccacatggtgtgtccggaattggtgggttcttggtctcactgacttcaggaatgaagccgcggacccttgcggtgagtgttacagttcttaaaggtggtgtgtccggagtttgttccttctgatgttcggatgtgttcggagtttcttccttctggtgggttcatggtctcactggcttaggagtgaaggtgaggacctttgcggtgagtgttacagctcttaaggtggcgcgtctggagttgttcgttcctcccggtgggttcgtggtcttattggcttcaggagtgatgctgcagacctttgcggtgagtgttacagctcataaaggcagtgtggacccaaagagtgagcagcagcaagatctattgcaaagaccgaaacaacaaagcttccgcagtgtggaaggggacgggagtgggttgccagtgctggcttgggcagcctgcttttattctcttatctggccccacccacatcctgctgattggtccattttacagagagccgagtggtctgttttgacagggtgctgattggtgcatttacaatccctgagctagacacaaaggttctccacatccccactagattagctagatacagagtgtcaacacaaaggttctccaagtccccaccagagtagctagatacagagtgtcgattggtgcattcacaaaccgtgagctagacacagggtgctgattggtgtgtttacaaaccgtgagctagatacagagtgccgattggtgtatttacaatcccctagctagacataaaggttttccaagtccccaccagtcaggagcctagctggcttcacccagtggatcccgcacggggccgcaggtgaaggcgcctgccagtcccgggcggtgtgccggcactcctcagcccttgggtggtctatgggacctggtgccatggagcagggggcggtgctcgttggggaggctcctgctgcagaggagcccacggagggtcaggggaggctcaggcatggcgggctgcaggtcccgagccctgccctgcggggaggcagctaaggcctggcgagaaatggagcgcagcgccggtgggccagcactgctgggggacctagcacgccctcctcagccgctggcccgagtgctaagcccctcattgcccagggccagcagggcttgccagccgctccgagtgccgggcccaccaagcccacacccacccggaattcgtgctggcctgcaagcaccacgcgcagccccgattcccaccggcgtctctccctccacacctccccgcaagctgagggagccgactccggcctcggccagcccaggaaggggctcccacagtgcaacggtgggctgaagggctcctcaagtgccgccaaagtgggagcccaggcagaggaggcccggagagctagtgagggttgtgagggctgccagcatgctgtcacccctcaatgggggctgccagcatgctgtcacccctcaatgggggcctggcctaaggtgccctctgtgccctgcagggcagctaggattgcccctgggaggacataggctggggaagattatctgaccctcccatgggaggagccaccgagtgagcagctcagcaggtggcagggggccacatcgccccagttctgcccttctgccgtcgtggctctcaatgcccgggatccccatggcctagcaaaagtgaatgtgacacggggaccttgggcccagctgagatgcccccattcctctgttaggtctgctacacactgaggggaaatgccatcctcaggcagtgagacaggaccaggctgacgtgagacctgagggccaaagccgaagtgatctgatggctgaggacagacagcagcggcgggttaggaggggccggaggaagtgcttatgctgtcaggaggaggtgggagccaggtccacaagactcaccagggaggagaaaggcatccagtgcagggggctgccccggcccgccccctgtggccccagtgccgctcagaactgctgctgcaaggctgcctaccctttataaggagtcttctagaactgcttgctgttccccttaaacccaagaatccgcctaccccggccccagcactccccactacctccagatgacacgctgaggctactttctcctgccctcaggaggggaaggctcttgtggggaagagcctggggtgctccaggtccttgcattggaatcactcagtgcacccctcctcccgccgcaagacagccactctgccaggccggggtggatgctgatgctgtggccatgggtcctgttcctcagtgtgtggggacaacaaaaggggagggaagggctgagaagaatactattttcaaggaagaaaaatggatcactcagaaaatgtactctgtgatatgggtactgttagagttcatagtcccagggccaagtgggtccctagttggcaggtgtatggaacaaattgttttgttggggttttgaggggtagcagagtcagtgggaaaaattctgtgccatccttttttttttttttgagatggagtctcactctgtcatccaagctggagtgcagtggtgcgatctcggctcactgcaacctccacctcctgggttcaagcggttctcctgcctcagcctcctgaatagctgggactagaggcatatgccaccatgtccggctaatttttaaatttttagtagagatggggtttcaccatattggccaggctggtctcaaactcctgacctcgtggtctgcccatcttggcctcccaaagtgctgggattacaggcgtgaaccaccgcgcccagccgctataacttttaacaattcccatatgtcctttattccactaagatgagtgcagtatatatttccatctgtccaaggcttcctaaatgtagccaaggccaagccaacaccagtcacatgatcaaaatcaaagggcatttggggaatccaggctgtgattcagggaagttccaagtgtctgatgaagtgtttgttttacatctttgtgtcccttgcaggtctagcactgtgctatgtaggtaacatgtgctccattaaatgtgaattaaactaagttttctacaaacattgtgttttggttccaggtgtttgattttgaattaacacagcacgatatggataacatcctcagcctaaacaggaatctccgactggccatgttccccatgtaaatatggctccttctttttaaaacagagggaagaatatacagattgaatgattggtgtctgaataggtatttatcatacacattttagattaattaaactttctcattataattctttcctgtttgaagatgagccactgaatgaagctaatttcatgcactggggagtttaaaagtatataccatttaaaatgtttctcttaaaaaataatcattctttgttcctatttttgatttgtttttctgtttttcagaactaaaaatcacaaagactatcctttccacatagaatactgaggacgcttccccttccttgtttctgctcagcccagatgcacagacactattggcaatgttgaccctcctctgtcatcacagcgccagggcagctgtgcctgggacaggagccacacagtcagagggggatgtaagagccaccttctctgacaaatctggagaattgagtgtgttctaagtgaaggcaatggggtttctccaagacagcctgtgtggcctctactctgaacaaatacactgatgagtcatcagtgaaatttgccttcacattttaagaaaactttatcttatggagttatttaagccatctacagagctgaggaaacagtgtaatgtgtctctgccccattgcgcagctccacccattgtgccccaggccagcccgcgtcacctacacttccttctgtgccctgccagtgacccccaggttattctaaagcagagtccttcccttcccccagtgagaaggaaaatgggataagtctgggacactgtttcagttcaataaagaggcttttttcttccttaaaaa

SEQ ID NO: 10611 - DNA, 1655 bp, Homo sapiens
acggcgggtcgccagcgccgcagtagctcgcgcggtgcctgtcggtagtcgcgtgcggggcggcggggcggcggggcggccggcggcggccatgggagatatcccagccgtgggcctcagctcctggaaggcttctccagggaaagtgaccgaggcagtgaaagaggccattgacgcagggtaccggcacttcgactgtgcttacttttaccacaatgagagggaggttggagcagggatccgttgcaagatcaaggaaggcgctgtaagacgggaggatctgttcattgccactaagctgtggtgcacctgccataagaagtccttggtggaaacagcatgcagaaagagtctcaaggccttgaagctgaactatttggacctctacctcatacactggcccatgggtttcaagcctcctcatccagaatggatcatgagctgcagtgaactttccttctgcctctcacatcctcgagtgcaggacttgcctctggacgagagcaacatggttattcccagtgacacggacttcctggacacgtgggaggccatggaggacctggtgatcaccgggctggtgaagaacatcggggtgtcaaacttcaaccatgaacagcttgagaggcttttgaataagcctgggttgaggttcaagccactaaccaaccagattgagtgccacccatatcttactcagaagaatctgatcagtttttgccaatccagagatgtgtccgtgactgcttaccgtcctcttggtggctcgtgtgagggggttgacctgatagacaaccctgtgatcaagaggattgcaaaggagcacggcaagtctcctgctcagattttgatccgatttcaaatccagaggaatgtgatagtgatccccggatctatcaccccaagtcacattaaagagaatatccaggtgtttgattttgaattaacacagcacgatatggataacatcctcagcctaaacaggaatctccgactggccatgttccccatgtaaatatggctccttctttttaaaacagagggaagaatatacagattgaatgattggtgtctgaatagaactaaaaatcacaaagactatcctttccacatagaatactgaggacgcttccccttccttgtttctgctcagcccagatgcacagacactattggcaatgttgaccctcctctgtcatcacagcgccagggcagctgtgcctgggacaggagccacacagtcagagggggatgtaagagccaccttctctgacaaatctggagaattgagtgtgttctaagtgaaggcaatggggtttctccaagacagcctgtgtggcctctactctgaacaaatacactgatgagtcatcagtgaaatttgccttcacattttaagaaaactttatcttatggagttatttaagccatctacagagctgaggaaacagtgtaatgtgtctctgccccattgcgcagctccacccattgtgccccaggccagcccgcgtcacctacacttccttctgtgccctgccagtgacccccaggttattctaaagcagagtccttcccttcccccagtgagaaggaaaatgggataagtctgggacactgtttcagttcaataaagaggcttttttcttccttaaaaa

SEQ ID NO: 10612 - DNA, 21886 bp, Homo sapiens
atgcttccagccattgtcggagtgtcagccgtcacaaggcacttccagccagtcgcaacggcgggtcgccagcgccgcagtagctcgcgcggtgcctgtcggtagtcgcgtgcggggcggcggggcggcggggcggccggcggcggccatgggagatatcccagccgtgggcctcagctcctggaaggtgacgcggtcgcgggcagggaggcgcgcctgacctaggggagcgcgggacttgggggcgcccgatgggacccaggccggggctggggagaagtgcggcggcctcccctccgcctggccgacgcccgggaaaggcgctgctgaggtggccgcccaccgcccacaagcagcccggcccggcctttcctaaaacggagtcggtgctgcccgccgaggcgctctctgggagaagcgggaacctcggcagccaagcctcagactctggggctgcggccgcggcgttgggcggggctgctctgtggagaggcggagcccttgaagttactcagaactggagcggggatgccgaggggaggccttggcggcgctggactcggccggaacagggaacctcgaagcctcctctccagcaaagagagaaagaaaagttggggccgggcgtggggtgcgggcttgtaatcccagcactttgggaggccgaggcagtaggatcgcctgagctcaggagttcaagaccagccaggtcaacatggcgaaaccctgtttctacaaaaaatgaacaaatcagctgggcttgggggtgcgcgcctgtggtcccagctactcaggaggctgaggtgggaggatcactggagaccaggaagtcgatgctgcagtgagctttgatggcgccactgcactccagccttggggacagagccagaccttgctggaaaaaaaaaaaaaaaaaagaaaaaaggaaaattggaattgctgattaggctttaaaagaaactttgggatctcatgttgttccctgtttagaagcaacctgccctgatgcctgagacatataatcgctctgtgcatttatggggtgcagcgtaatgttttgagccgtgtatacaattgcaatgtggttaaatcaagctaattaacatatctatcacctctctcagttattattgtttgtggtaagatgtttgaaatgtcttgttattttgaaatacacatgtgtagtaaattattgttgactgttggcatcctagtgcgcagtaagtcttaaaagctgtgtctcctgtgtgtttgaaactttgtaccctttgatcagcaactccccattccctccttcctcacctcccccagcccccagcgtcttataaccaccattctattctacgacctttctctgctttgaacttcacaattcctgccagtgatttgagacagcactgactaaaaagcgtttaaaatttgatctttaaaaaaaaaaagctaaacttagttgttgataaaagctataagaagtcatataggaagttagttactgaaggagtcagaatgttcaaggcctgctcatgaaaatattatttaaattatttctcttacctgcttaccaactcttagaggctaggagtgtcgttttgttcatattggttctcagcatctagtgaaggacgtgcatctgtcagcccttcattcagtaagcactcgatggattaaactgttgagtctcttgcttccctttatttctgcaacaatttggtgcaggagtccagactttcgtgcacacaggataaggaaaaattagtgaaaactgtgcttaacaggtcaaaatattctatttatttttcttggactgcaggtgcatcaaattggattaatcataatcactcatcactggtctatgcaaaggcttatttttactcgtctatttttaatagtgaataaacatcacagacctatccgttatctgttgccccagaaatgctgcatcaatggccaaacaccagacctcagtggtgtacagcagcaagtgtattcctcccacacgggaggtcaggagagcagctctgtggaccttggctgggctcagttgggatggttggggctactccacttggctccgcacatctcctgtcctcgtgcggttagttagggagtgttctcaagatgatggctgaagcacaagagagcaaggggagcggtgagatgtctggagacctcagcctgggctcttcattattaggggccacttgatccatctgtgtgcctgatcggtgctgtcttaattactacagttccttgataagcgcccatacctagtagggcaggtcacctctccctgctgttgtagatttacagtgtacaatttgatgagttttgacagatgcatgtacctgggtcctggctttttattttggcaccttactctccactgtaagttttagaactagcttagaaggttccatgagaaactttattggggttttgattggaactacattaaatctgtagaccagcttggagataattgacacctttgtaatgttaaatcttaacttttctacaagcatggtattcttctctgttaataaattgtcctgaatatggttcatttctaacatcttttcatatggttgtatagtttttcctgaagagaatatatgtcttttgttggaattattattgggttcttgatagtgtgttatactactggaaattatatttctctgaagttacattttctacttgtttcacctgctatattcattacacttccagccactttactaaactgtactgttatttctgttaatttgtgttacatttgtttggattttctacacaaatgatcatatcatcagcaaataatggtagtttactttcctttttttccactctttaagcttaaaattgcttcttcttagttgttcaggtgcttctggaaagcacctccagcacagtggccattcttgttttgtacctgattttaaaggatgtaagatggatattttttaatattgatactctttatcagattaattcttttccccgacttactgggagtttagattttgaatctaaactggtattgaatcttaacaaatattgattgagttgacttttgtttttgtactttaatctgttaatattgatgaattacagattttctaatatcaaaccatccttagatatctgagatacactcaacatgggtgtggtatattatcttttcataaatattgttgcatccaatttgcttttattttacttatgaattttgcaacggtattcatgaataagatgaatgtgtgacttttaatatttttgtctgattttgattcagggttatgctagttttgtagaatgagttgagataagtccgtctttttctgttgtttgaaagtctgtgttaaactgagatgatttttttcttgaaaattttatgaaactggtggttttctcttttttttgaattccttgcattctttaataattatgtaactattcaagctttattcttgggttaaatttttctaggaattttcccattttatctcatttttccaagttattgacatatagttattggtaatattttcttttaagtccattttatctgcatgttttactgtccattcgtgtcagttttttaaaaagttggcctcttcatcaacctagccagaagtctgtttattttactgaagtttttcaaagaactgacttctggttttgttgatcttctctgttacatctttgttttctattttattgatgttattcttaatcatatttttatctttccatccaatttcttgggttctttttctaacttaagatggatacttggttcattagctttcaaccactctgaatctgttgcctataaaatgaagataattatgctgctctaactcctagggttaccgtgaagctccagtgagaaagtggtttgtgaactataaagcccttgtcagtcttcagtttaatgagactgcaaacccgcccacccccatagtcttccctagttctagtcccttcccttgcctgagcttcatttagagtgactgttctcttttctgaactaccttattgcttgtagcattatacattcatttaggttttgttatatacttctttttgtatggataccttcgtgtgagtctacacctcagcctttattattggacgctgtggtatctgagtatacaggataaatcttaagcctctttgcatctcagttattattcattctgtacttttttattgctttgatcattcaggaagcataccatctagctcagttttctgcagacactaaaaataacctatagtttttttttcccaaaatatgtaaaggagttggaacttagattattcataaattccttcataactgatattgcctgtttttagactgattatactagtaccaaattagtgacttaattttttatgtattatgttgtccacatgcttgggtgaaaggggagatttgtgttggattcctctgactgtgagaagacactttgttttgttggttttgcaggcttctccagggaaagtgaccgaggcagtgaaagaggccattgacgcagggtaccggcacttcgactgtgcttacttttaccacaatgagagggaggttggagcagggatccgttgcaagatcaaggaaggcgctgtaagacgggaggatctgttcattgccactaaggtagggcttctctatgcaaggctggcagagcttgggtaatgctacatctctggagggctttctactttctttatgggagttgatgactttgtttcatactcaaatcggaataaacaagaatattcacagcttcatgagcatgctgaattatattgtgtgcaggtttgtttcatattatttacttggtcattcaggtaggagtacacagatatcccccaattaacaatacattatcaaaattcagttagtgatgggcactttgactacagtggtgaataggacaaagtcctagccctcatgaagtctgtttacacagcgattcctaaattcagaatcactggggtgattgttaaatgcagattccaaattctaccccacatctgttgaaggagaaactctgggtgtggaggaagcagcttgagcacaggcataaggcaggaagcagcacggcaggtgcaggggtttgtaggaagcttggtgtattagtctgttctcatgctgctgtacgaacatacctgagactgggtagtttataaagaaaaagaggtttaattgactcacagtttcacatagctggggaggcctcacaatcatggcaaaaggcgaaggaggaacaaaggcacgtcttacatggtagcagacaagagaaagtgtacaggggaactgccgtttataaaaccatcagttgtcacgagacttattcactatcaccagaacagcataggaaaaacttgcccccatgattcagttacctcccactgggtccctcccatgacacgtagggattatgggagctacaattcaagatgagatttggctgtggacacaaccaaaccaaatcacttggtctctctggaccacacaatgtcaggttgcaggagtaatgagaagtgaggctgagtggtggataggctaagccatggaagttcagctgtgccctgtcaggagctgtgcttttacctagagacagaggagccctgtttcatttttaaatagggcagcttgtatcatatgtgagtgcaacttgtgttgtatataggatattttagtaggtgaaagaagcttgcatttgaggcagaggcaggaggccaggtaggagacattaacagcagtgcaggtggaagatgatgaaggcctgcactggcacagtgggtgagggagggagaagaggaaatggatgtggagggtattgggagtcaggacctgtggaagatgcagagtggactacgatagtggagaattcaagaattcctttgcttttgatttggaagcagaatgtaagaccatgagatcaggagtcatgggttcatggtctagctgccattcaggagctgtgagtattagggattagatggctcaggctcacagcttcattatttgtaaaatgagactttggatttgagaatttcctgagtaacttcccagctaaagtttcatacctcaagattcaatgttgtttctatagttgaattgccttctgttttactttatggaagttaatgttcttcaggcaccattgctatctgcactagagcagagggtggtaagagagcagccttggtgtgtgcttggccaagcggggagaatgtcttctgaatagtccaggtagggatgtgagcaactggagatttctaaggctcaccctgcaatttggagcaagttgcttctgtgtggatcgtagtcagcagtggaaatatgttcattattttggaaatttggaaaagtcatagaaatgtaattagaaataaataaatcacacatataagcaccacatggagacaactgtgattaacaatggaatacatttacttccagcattcatttttttatttttgtgaagatactgtgctcgtttgttttcatttatttgattcccctttcttttactttcttttactttactttcttttactttactttcatgtttttcccttgctgtgatggagccttcaggttagcttatgtcacagtcaataaaagtaaaatgaggggaaaaacacaagtttttctacataatgagagtgtggaaggagatagctaaaagaagtaaggcagtgtgagctaactcacctataggctaacccacatggttacagtgccttaggaacagagaactcttaatacggagtctgtgtaagtgagaaacacaagatagagattcttctgatttttcgtcatatcttttctgcctgcaggaatttcattttcgtttttgtttttggtcccaatgaatccaaataaccatcaaatatctcttggattcctgagcttcccttgaggaggagtcaggcagaaggatcccagctttggagcctctccctgcaggtgtcctggaactcttctgaggataatgtccctgtcctcccatcagaacttgccgtgttgtatttgtggtcatctcatcttggctattttgggttcaagacagtagctttgtggggctacagaatgggtgccatgctggctctgggtgggcacgtgtgacgctggtcccctctcctttgtagctgtggtgcacctgccataagaagtccttggtggaaacagcatgcagaaagagtctcaaggccttgaagctgaactatttggacctctacctcatacactggcccatgggtttcaaggtaccgttcagtaggtagttcgttctgcagtttgcaggaccttcctccccgtgctcacaccctgtcttgcggtggggagagcatggaccagcattcagggcaggggttcccaggctgcatctgccacatgctagctgcggcatttgggcagtcctcttgatatctctgggcctcagttaaggagaggcttggcttgacctctgaggcccccacaggtctgtctttcaagccagtcgctttttttccaagccaagagagcagtagatttttttcccttaggtttttaggtgaaagcagtgatcagatgaggaaatactgctgctcagagaaagttcccagtgaattcctaggccttgtctcttcttgcaggttctgttctctttggggagtaaatgctgttttgcaatatgggagatatttgcttgttcacctgcagcagggtccagtgggttgtgctggtagttgacttttccacttggttttattctcttaattgcttcacagtgtgtctggagcatgcatctgagccatggctctgtcactaagctaccccagtctggccgtgcaacttccctactctaggcaacctgcttctgcctcacacgggtcctggccaggatgtccctgcatatttgccctgggctgtgatgacagcctgcctgggcaagggcctgatcacacagttgacacctgtgaaatacagaagcccttgcagggatgttcttcctacaatggaatgggtgactgctgctcagcagtcttctacataccaacctgtgagaaggtccctttatgtgtgccacactgttggttactgttttagagtaaaataacaaaaaacacttcattcctagcacagctttacttaactaaggctttgtatctagtttccataaacgatgtgggcagctgtccgttagtgacactgactaagaggggaagatacccagagggcaaaaccagagtgatgtctgtgccttgaaattcattgcatgcagaaaatcataattaaaacaatggctacagctgtattacactcattgccagccagcattgttgtaattatgtacccagaactatgttaggtactttacacatattaactcatttaattctcatgacagttctacaaagttgacactattaacatccctcttggagagatgatgaaactaagatacagaaagtttaaggtttaagttagattattggagcccagaagcatatgctcaggtcagacatttgttacactttccttgccctcatcctttagcagattcctgtctttggatttctgggtcgtagaaaaggaaaaggtctcagatcatccaacaaattacagaagagaataatgcagcatcgtcagcatgtcttctggccagtaggaactgctaggccttgtgtgatgctggacaattagatcagggtccgagtatgagtcccgggctgcaattttgtggaggcttggataaatggcaacatgggatgtggctttaaagtgagactgttagttacttcagctcatcatggaaaatgcctctttcatgtgtatcaggctggaacatgtgacattcttccactgttgtttaggagtgtgattaggtgtcattaaataaacatgcctatgccattcacccttaacatgctacgtgggagtacatgagggaggtagctggattgcacgtcagtgcttctctgaaagatgactttaggttcttgccctttcaagatgtatctctctgccctctacctcctgtgtacctttgtattctcacttccttacctgtcatcatgatggggattctaagaaagaagacaagaccctaacagtggagttaggagagggttgattgggctctataagacatgaagaaaatgcactcctcacccattctttacccgaaattagtaaactattttctggaggcaatgggagaggacaaccttgcatcagtaaggatacagggtcttcctttcccatcttgtgagagatgaacagtgaacatcaggctggcagaggctttgccagccatccagtccaccagccattcatcttttcttagaaaggtgaagactgggcctggtcacatggccaggctggggttgcttagtgacagggctgtggcttggatgcaggtctcctgacacatggttttttttgttttgttttgttttgttttcacacatctcaactctccttcttcgcagcctcctcatccagaatggatcatgagctgcagtgaactttccttctgcctctcacatcctcgagtgcaggacttgcctctggacgagagcaacatggttattcccagtgacacggacttcctggacacgtgggaggtgagctgagccacaccaccaggcagcctcatcctgtgtgggtctccacccaggatgcagtgagccctgagctgcttgtgttcaaagacatcaaggttgtctacctgagatgtggggtttgtggagcaaaaaaggaatcaatacccgaagaactcagagacctcagtgactttcttgttacctttggtttggtatggtgcagttctcttgacacatttgaggggtagctcattatagacctcactttttttctcaaatatttatttatttttttattaaaaaccatatttatttcagaaaatacaggagagttcttctgcattaaactaacattaaaaattttattttcctggcacccagcagtaaccactgttaatgttttatagttcctttttctctcaagcatttcagaatgataaagttggcagcatggaagctcaggctggggaggtgagaccagtgtcggggaaggttaccaagtgtcagcccatttccagggttcagaccaaaaacagccctttactgcaggggcttgcagtaaagacttgagcaggaaattaagggggtggtggatttgagaggttcctggaagttgacccacaggctggggtgggtctcaggcttgggctccagcatggctgaccgagcacgtgtggtcttacagtcttgctaaccatcatgtgggatgggacatcacatttgaggcccaagaagaaagtaagcttaagcttaagcttgctgaggttaggacagagcttgctgggtgaagctctccagggaggaggccagagggaaccctcggacagggaggagtcccaggctaggctccccccatcaatagaagacaaagactgacctaaggtatctgagatgtcaggaccagggcccatgggcctcaactctttctgtcacaatgttttaggtcctaaaagatttgggttaaactctagggtgctcatgtagcaccagcgaggttccggtgattgttgcagagttgaggcagtaactaactgctgcgtgttggcccattggtcactcaggacttgctgctgactacggaccctggcacgaagctatgctcttcctgaagctcaggggcagcctggcttgctggtcagtgaccagctcagagctttaggttgctctgccctaaagtgtcttaaaatagtaagtggagaaggtgggataggagaatggtgatgtatccgtgtgcttaagaaggtcagtgtctcagtggaaagaaaggtgaacaaataaaatccgcagcagacatgcttgccagacatcaggaggaataggaacaagaagagctcacatgtgtcgagtactggacgccagccttagctgacacttcctgtgattccacataacccctaaacatccccgtggcacaggccatgtagacctgtcctgaagctgagaaaattggggccaagtgaggccatgcaacttgcccagcatcctctagccagaaaagatgggactgaaatcagaccttgagtgcagaaatgcttttgaagcttcaagtaaaatattgtaaaaatattgggtccaaccagttttagaataccatacagaactgctgagggacgtagattgtcagtgcagtagacagaagcttcacacccagcagagtcgttctcttataggccatggaggacctggtgatcaccgggctggtgaagaacatcggggtgtcaaacttcaaccatgaacagcttgagaggcttttgaataagcctgggttgaggttcaagccactaaccaaccaggtaagccgatggaagcatcagagagtttaacctgtgtggctggtcccccagctgccacctccacagggctcttctggaaatggaagaatgggtgaagcacaaaacaggcctgttctcctctggcagcactcagaatggtgattaaaggcagcagctaggcaagtggctttcttgaaggtgcatctgggtagatggtactgttggcaggcagggcatgagctggtgcttggccctccatgtgcagtgcaggcaggtcaccaggtgtactcagaagcagtcagggtcctggcaggtgcctcacccttatccaggaacatgggcctcccctctacctcttcccagcctgcagactgcagcaagaaagagtggatgactagatggcttcacgcgaggctcacaggctgctgaaggtgatgcaggcacttcgtttttttaatgcagagaaaagacttgtggggaaataactattgtattttctagactagctttgtatgttcaaagatcatttatacagtacttaagctttttattgaagagtagaagtgcacatgtgaaaatggaactgtataaattctcataaactgagcatagctctgggactagcatccagctcagtaaacagcacgtccagtgcccctgtaacccctgccgagcacagcatcattcccattcccagcagctgggattcacgtctgaactttacacaggtaaaataaaataataatgcaacataaacccctctgtgctcgcctctttcacacagcactgtgtttctgtacatgtgattgtagatagtgctctcttatttcttgtggtattctgttttgtgaattaaccacaattgagttatccattctgctgttaatgggcacttagacagtttccagtttgggactattaagaatagagcatcatgttctatttttttgaataaatatgctttttaaaaaagttctgtatggagtagatgcagaaaagtgtgtgaatcataaaaggcatacatagcttgatgaatttttgcaagtgaacaaactcaagtattcagcacccagaacaagaaaaaagccctcagccattcagtagctcccctgggtcctgttgtagccaccaccatgaagagcaacctggcttctgacccagcttctcatgtagttcagctttgccttgtatacaaccctatatatataagttttgatatatgtttatatggatagtagcttccgttttgtgtcagtatttttagttgttcagcactttaaatacctgggaatgattatggcatagtctgagtagacaaagtggggtggagggtctgctttctgttaggttgatggacaccaggaacacaggatgcggaaggctccagaagggctggcctctcttttggaggctttccaaacaggctgatcttgatgagcttggcatgttcctgagagcaaacgcactattcatagttctctgtaatttacactaaataactatttattttaaatctccttataacctggaattatatgtgagagtttggagaatgtgcaagagacagagatcctgctctctagcttcttaaaattttcattcaagtcacctgtagaatgtatttgtcacatgtagttcctcaatttcattcattcattcagtggatatatttttagcacttcctacatgtctagattgttcttagtgttggtgagacatctatgaacaaaacaaattcaaacaaaaatctctatcttcatgaggcttagatcttggtgacacagaaagacagtgagcaaatatgtaaaatctatgagatgtcagatagtgatagatgctgtagaggaaaataaaggccgggggagatgagagctatggtgtgttaacaatctttatctgagtgctcagggaaggccctgcagagcaggtggtattggaacattcagatgatgtaggtgtccccaaggccgtggactcagagaccatgacacctgctggcctcttggagattgctctgtccagactcctcacaacagaaacacttaggcctggagctgggccccatggctactcggtgacagccaagactttgacgcaggtcttctcttgtagagcttttcttgaacactagtggtctgaattttatgtaagctatgattctgttatagattgagtgccacccatatcttactcagaagaatctgatcagtttttgccaatccagagatgtgtccgtgactgcttaccgtcctcttggtggctcgtggtaaggatacctcagtggtgtgttagtcagagtccgactgggaagtagatgccaccttctcatttccttgggatgactgagggagggcttaatggaggttttgacagggtgtggagggatggtactatagggggctgtccacacctctcaagcctgggattgaaggcatggtttattattggaagccagggagtggctgtgagtgggctgccctgggagggtcaggacctcttcagggacgtaaatcagcctggagtgacccctttgctgagttccccaccagggtgtcagcccccttctgacctcctgacaaggatgctccccaggcctctccatggttggatgaggcaaagcctgctgtcatctttacccaggccctcctgcagctgtactgtgctcccaagatcagctaagagacctccagccattcagccacctaagccagaagcttggaaatcatcccttcccacatcccgagtccaatccagcaccaaaatctattgattattctgccaggagaagttggactttgtttcatgatttcatttctgccatcactgtcactgccttagttaagtagcattcccgaggtcattagaggagcccctcagctccctccctggcccactccattccaatccattgctcccagtgggagctgaaaggagctgtctctttcctttcctatgatcctatcactttcctgggaaaaattcttcaggtcttggtgtggcctgtgagatgcagccagcctgacctctgcctgcctctggcctcattccttcccatccctgtgaacatcctgggcttcagccacatgaagctgctgtggggtccttggatagaacatgttttctcacctctgtgcctttgcaaatactgttctctttacccacaaatcttttttttttaaatctggcaaactccagtttctaatttaaggttcagtccagcatcatcttctccaggaagccctcctgaccccttatttatgtttcttacacagcccttgtcacactgtcttgtgattttcttctcagtcccttccactagtcaaagcaaccagagtgcaggtatcttatttattcttctcttcccagcttctagctcagcacctgggaaacattgggaaccccgaaaaggctgaaattacttgagttttatcacctgtgtgttttccttgtgaagtggggcatgtgtgtttgaacttggaaccagctggagagtctctagaaggctgggtccattccacagctgagctttggggtagcggatcctctgatggagtgagtcagggagctctcagactgactggggtgggcaactgggcactctgtttggttccttcaggagacctcgaggacgatactagcacaatgcctgaaacagggtgatggctcagtacacactcgttaaaaaactgaatcctcagagttctcagggcccacccgtgcctgagcagaggatgcacagggactctatgaccatcttcaaaaccacttttaaaggttccacgtgttcacaatattcactttttagtagtattttgggcgaacttttctgaaagtatcatcatcaacaaatatcgattcgctgtgctgtgccagggtgtacagtagaagctgagaagtcagagagccctgagagtcgggggagtcaaagcttgagagcccactggctgcatgcgctgacatggccacctggtttttgaggagaaacaccaaatacacatgaaaagtgatgtcgtgtagccttgttcaccaaagtgttagcagtggttatctccatactggaaatgtggggcgatgtgcttttctgcattttaaaatttcctgtagtcggcatgtgtcatgatcagaaaataaatctttcattttggacaaagatttcttctttctaaagaaaggggcatccatgttggatctcctggctcactcccctgtactgtgtctctctagtgagggggttgacctgatagacaaccctgtgatcaagaggattgcaaaggagcacggcaagtctcctgctcaggtagggagggagggctgttctgagccaggtggggttctctgaccgctctacatccttggggagtcctggggcttggcaggtcccaggaagggactggctcacccaggtgagtccatgactcattagaacctcccagcgtcaagcagaatttggtctgcagccgcatttctagtcactcaagccatgtactcttgcctccgagcctgtctagactcagaggaggagtttccaggccttctccctctgccccaccaactgcatgcatggttagtatgagatggtacagaaaagttatttattctagtcttctttgttctaatgtccagtggggggctgggcgcatgttaaggaattctcattaagcagattctctgatctcctccttgggctgatggctgtcattaccaacatattgacagagctgctcagtgaatgccagtaacaatagctgctgtcattgattcttggactcttactgcatgataaaactcacatgttagaaaataacttagactacatgggatttccctttgtgtgatagtagactttttgtttccttgcagattttgatccgatttcaaatccagaggaatgtgatagtgatccccggatctatcaccccaagtcacattaaagagaatatccaggtaggtgtattccttcttttatttggcgggtttcagatcatgtgttagatgggaagggatgactgctgtagcatacagcctcagggttgcggagcttgatgcaacaggggcttctccctctgcactgtgggtgttggtggttgaccttccctcagcgatcaaaggacccaggctccttccatcttagggccctttctcccctagggtgttggtgtcttctccatccagcccaagattaggaaggagggaagagcatcttgttgggatgatttgtgtgggccaggctggagcatgtgcaccagtcacatggctgcgctcgcccacaggggaggctggatgtctcctaagcgtgcactcaggagaaaggggaggcagttggtggacaggtcaccacctctgtcgcatggaggcatgcccacgtggcctgagggcactgctttgagttgtgtgggaagattctggtcctgactcctgtctagtgacttctgagaggcaggagtgaagactggaacaggtggagcgtgtgcagaacacagagaggcagcggtccttttcagggcaatcttttcacctaagccaagaaccacagaagtgtgtgaagtgtgtgaaatctatttttggagctatgtgaaggaactctgtgtggcttcaaccctgacgacatagtctgtaacccagtcagggccatggacttgggattcccacagtctcactcacgatttaactgctgcatgacctctctcagcctttgtttcttcagtagagcacccttctgataggatcactgagggtgaaatgtaatgatacagtgaagggatagcatagtgcctggcgtatggaagtacctgatgctcttagctgccagtcaccctcagtcacggatgtcacctgtgatgatctcacaggcaacgacaggcattggtggcagcccacacccattgatcatgtcagcataggtgtgtgtgatcctggggccagctgcacagctgcattttcatagacagcatgtgcccaggagtatgctccctcttggtgtctgagctgcccatgagctccacaaggcactgctgcatcctgagggctcggtttggttgtgccaagcaagcatcgccattggggtttattgacccatctgtaacagtgcctgtgccctcaggcttgctgtgcatgccaagctggctgcaggtgggcatagccctgccattggcaggagaggcaggccacccacgatgggaggaccaggggatgggcaggttcctcatggtgtctacagcactctccctgccgggcccttgtccagctcacctgctgcccgcatgcccttctcctctcctttctcaggcgtcctgctctttgaatggcccagagcagctctgggtgaccagccaaccttaagcctgaaaggtatggatttggctaaactgtaaactcagttctctccaatggctgctgacgggcctcttggaacgagactgcaggtctcttgtagtggttagaattgagcactgctgactgaccggcatctgctccacatggtgtgtccggaattggtgggttcttggtctcactgacttcaggaatgaagccgcggacccttgcggtgagtgttacagttcttaaaggtggtgtgtccggagtttgttccttctgatgttcggatgtgttcggagtttcttccttctggtgggttcatggtctcactggcttaggagtgaaggtgaggacctttgcggtgagtgttacagctcttaaggtggcgcgtctggagttgttcgttcctcccggtgggttcgtggtcttattggcttcaggagtgatgctgcagacctttgcggtgagtgttacagctcataaaggcagtgtggacccaaagagtgagcagcagcaagatctattgcaaagaccgaaacaacaaagcttccgcagtgtggaaggggacgggagtgggttgccagtgctggcttgggcagcctgcttttattctcttatctggccccacccacatcctgctgattggtccattttacagagagccgagtggtctgttttgacagggtgctgattggtgcatttacaatccctgagctagacacaaaggttctccacatccccactagattagctagatacagagtgtcaacacaaaggttctccaagtccccaccagagtagctagatacagagtgtcgattggtgcattcacaaaccgtgagctagacacagggtgctgattggtgtgtttacaaaccgtgagctagatacagagtgccgattggtgtatttacaatcccctagctagacataaaggttttccaagtccccaccagtcaggagcctagctggcttcacccagtggatcccgcacggggccgcaggtgaaggcgcctgccagtcccgggcggtgtgccggcactcctcagcccttgggtggtctatgggacctggtgccatggagcagggggcggtgctcgttggggaggctcctgctgcagaggagcccacggagggtcaggggaggctcaggcatggcgggctgcaggtcccgagccctgccctgcggggaggcagctaaggcctggcgagaaatggagcgcagcgccggtgggccagcactgctgggggacctagcacgccctcctcagccgctggcccgagtgctaagcccctcattgcccagggccagcagggcttgccagccgctccgagtgccgggcccaccaagcccacacccacccggaattcgtgctggcctgcaagcaccacgcgcagccccgattcccaccggcgtctctccctccacacctccccgcaagctgagggagccgactccggcctcggccagcccaggaaggggctcccacagtgcaacggtgggctgaagggctcctcaagtgccgccaaagtgggagcccaggcagaggaggcccggagagctagtgagggttgtgagggctgccagcatgctgtcacccctcaatgggggctgccagcatgctgtcacccctcaatgggggcctggcctaaggtgccctctgtgccctgcagggcagctaggattgcccctgggaggacataggctggggaagattatctgaccctcccatgggaggagccaccgagtgagcagctcagcaggtggcagggggccacatcgccccagttctgcccttctgccgtcgtggctctcaatgcccgggatccccatggcctagcaaaagtgaatgtgacacggggaccttgggcccagctgagatgcccccattcctctgttaggtctgctacacactgaggggaaatgccatcctcaggcagtgagacaggaccaggctgacgtgagacctgagggccaaagccgaagtgatctgatggctgaggacagacagcagcggcgggttaggaggggccggaggaagtgcttatgctgtcaggaggaggtgggagccaggtccacaagactcaccagggaggagaaaggcatccagtgcagggggctgccccggcccgccccctgtggccccagtgccgctcagaactgctgctgcaaggctgcctaccctttataaggagtcttctagaactgcttgctgttccccttaaacccaagaatccgcctaccccggccccagcactccccactacctccagatgacacgctgaggctactttctcctgccctcaggaggggaaggctcttgtggggaagagcctggggtgctccaggtccttgcattggaatcactcagtgcacccctcctcccgccgcaagacagccactctgccaggccggggtggatgctgatgctgtggccatgggtcctgttcctcagtgtgtggggacaacaaaaggggagggaagggctgagaagaatactattttcaaggaagaaaaatggatcactcagaaaatgtactctgtgatatgggtactgttagagttcatagtcccagggccaagtgggtccctagttggcaggtgtatggaacaaattgttttgttggggttttgaggggtagcagagtcagtgggaaaaattctgtgccatccttttttttttttttgagatggagtctcactctgtcatccaagctggagtgcagtggtgcgatctcggctcactgcaacctccacctcctgggttcaagcggttctcctgcctcagcctcctgaatagctgggactagaggcatatgccaccatgtccggctaatttttaaatttttagtagagatggggtttcaccatattggccaggctggtctcaaactcctgacctcgtggtctgcccatcttggcctcccaaagtgctgggattacaggcgtgaaccaccgcgcccagccgctataacttttaacaattcccatatgtcctttattccactaagatgagtgcagtatatatttccatctgtccaaggcttcctaaatgtagccaaggccaagccaacaccagtcacatgatcaaaatcaaagggcatttggggaatccaggctgtgattcagggaagttccaagtgtctgatgaagtgtttgttttacatctttgtgtcccttgcaggtctagcactgtgctatgtaggtaacatgtgctccattaaatgtgaattaaactaagttttctacaaacattgtgttttggttccaggtgtttgattttgaattaacacagcacgatatggataacatcctcagcctaaacaggaatctccgactggccatgttccccatgtaaatatggctccttctttttaaaacagagggaagaatatacagattgaatgattggtgtctgaataggtatttatcatacacattttagattaattaaactttctcattataattctttcctgtttgaagatgagccactgaatgaagctaatttcatgcactggggagtttaaaagtatataccatttaaaatgtttctcttaaaaaataatcattctttgttcctatttttgatttgtttttctgtttttcagaactaaaaatcacaaagactatcctttccacatagaatactgaggacgcttccccttccttgtttctgctcagcccagatgcacagacactattggcaatgttgaccctcctctgtcatcacagcgccagggcagctgtgcctgggacaggagccacacagtcagagggggatgtaagagccaccttctctgacaaatctggagaattgagtgtgttctaagtgaaggcaatggggtttctccaagacagcctgtgtggcctctactctgaacaaatacactgatgagtcatcagtgaaatttgccttcacattttaagaaaactttatcttatggagttatttaagccatctacagagctgaggaaacagtgtaatgtgtctctgccccattgcgcagctccacccattgtgccccaggccagcccgcgtcacctacacttccttctgtgccctgccagtgacccccaggttattctaaagcagagtccttcccttcccccagtgagaaggaaaatgggataagtctgggacactgtttcagttcaataaagaggcttttttcttccttaaaaa

SEQ ID NO: 10613 - DNA, 1626 bp, Homo sapiens
atgcttccagccattgtcggagtgtcagccgtcacaaggcacttccagccagtcgcaacggcgggtcgccagcgccgcagtagctcgcgcggtgcctgtcggcttctccagggaaagtgaccgaggcagtgaaagaggccattgacgcagggtaccggcacttcgactgtgcttacttttaccacaatgagagggaggttggagcagggatccgttgcaagatcaaggaaggcgctgtaagacgggaggatctgttcattgccactaagctgtggtgcacctgccataagaagtccttggtggaaacagcatgcagaaagagtctcaaggccttgaagctgaactatttggacctctacctcatacactggcccatgggtttcaagcctcctcatccagaatggatcatgagctgcagtgaactttccttctgcctctcacatcctcgagtgcaggacttgcctctggacgagagcaacatggttattcccagtgacacggacttcctggacacgtgggaggccatggaggacctggtgatcaccgggctggtgaagaacatcggggtgtcaaacttcaaccatgaacagcttgagaggcttttgaataagcctgggttgaggttcaagccactaaccaaccagattgagtgccacccatatcttactcagaagaatctgatcagtttttgccaatccagagatgtgtccgtgactgcttaccgtcctcttggtggctcgtgtgagggggttgacctgatagacaaccctgtgatcaagaggattgcaaaggagcacggcaagtctcctgctcagattttgatccgatttcaaatccagaggaatgtgatagtgatccccggatctatcaccccaagtcacattaaagagaatatccaggtgtttgattttgaattaacacagcacgatatggataacatcctcagcctaaacaggaatctccgactggccatgttccccatgtaaatatggctccttctttttaaaacagagggaagaatatacagattgaatgattggtgtctgaatagaactaaaaatcacaaagactatcctttccacatagaatactgaggacgcttccccttccttgtttctgctcagcccagatgcacagacactattggcaatgttgaccctcctctgtcatcacagcgccagggcagctgtgcctgggacaggagccacacagtcagagggggatgtaagagccaccttctctgacaaatctggagaattgagtgtgttctaagtgaaggcaatggggtttctccaagacagcctgtgtggcctctactctgaacaaatacactgatgagtcatcagtgaaatttgccttcacattttaagaaaactttatcttatggagttatttaagccatctacagagctgaggaaacagtgtaatgtgtctctgccccattgcgcagctccacccattgtgccccaggccagcccgcgtcacctacacttccttctgtgccctgccagtgacccccaggttattctaaagcagagtccttcccttcccccagtgagaaggaaaatgggataagtctgggacactgtttcagttcaataaagaggcttttttcttccttaaaaa

SEQ ID NO: 10614 - DNA, 7562 bp, Homo sapiens
gagatgtgtccgtgactgcttaccgtcctcttggtggctcgtggtaaggatacctcagtggtgtgttagtcagagtccgactgggaagtagatgccaccttctcatttccttgggatgactgagggagggcttaatggaggttttgacagggtgtggagggatggtactatagggggctgtccacacctctcaagcctgggattgaaggcatggtttattattggaagccagggagtggctgtgagtgggctgccctgggagggtcaggacctcttcagggacgtaaatcagcctggagtgacccctttgctgagttccccaccagggtgtcagcccccttctgacctcctgacaaggatgctccccaggcctctccatggttggatgaggcaaagcctgctgtcatctttacccaggccctcctgcagctgtactgtgctcccaagatcagctaagagacctccagccattcagccacctaagccagaagcttggaaatcatcccttcccacatcccgagtccaatccagcaccaaaatctattgattattctgccaggagaagttggactttgtttcatgatttcatttctgccatcactgtcactgccttagttaagtagcattcccgaggtcattagaggagcccctcagctccctccctggcccactccattccaatccattgctcccagtgggagctgaaaggagctgtctctttcctttcctatgatcctatcactttcctgggaaaaattcttcaggtcttggtgtggcctgtgagatgcagccagcctgacctctgcctgcctctggcctcattccttcccatccctgtgaacatcctgggcttcagccacatgaagctgctgtggggtccttggatagaacatgttttctcacctctgtgcctttgcaaatactgttctctttacccacaaatcttttttttttaaatctggcaaactccagtttctaatttaaggttcagtccagcatcatcttctccaggaagccctcctgaccccttatttatgtttcttacacagcccttgtcacactgtcttgtgattttcttctcagtcccttccactagtcaaagcaaccagagtgcaggtatcttatttattcttctcttcccagcttctagctcagcacctgggaaacattgggaaccccgaaaaggctgaaattacttgagttttatcacctgtgtgttttccttgtgaagtggggcatgtgtgtttgaacttggaaccagctggagagtctctagaaggctgggtccattccacagctgagctttggggtagcggatcctctgatggagtgagtcagggagctctcagactgactggggtgggcaactgggcactctgtttggttccttcaggagacctcgaggacgatactagcacaatgcctgaaacagggtgatggctcagtacacactcgttaaaaaactgaatcctcagagttctcagggcccacccgtgcctgagcagaggatgcacagggactctatgaccatcttcaaaaccacttttaaaggttccacgtgttcacaatattcactttttagtagtattttgggcgaacttttctgaaagtatcatcatcaacaaatatcgattcgctgtgctgtgccagggtgtacagtagaagctgagaagtcagagagccctgagagtcgggggagtcaaagcttgagagcccactggctgcatgcgctgacatggccacctggtttttgaggagaaacaccaaatacacatgaaaagtgatgtcgtgtagccttgttcaccaaagtgttagcagtggttatctccatactggaaatgtggggcgatgtgcttttctgcattttaaaatttcctgtagtcggcatgtgtcatgatcagaaaataaatctttcattttggacaaagatttcttctttctaaagaaaggggcatccatgttggatctcctggctcactcccctgtactgtgtctctctagtgagggggttgacctgatagacaaccctgtgatcaagaggattgcaaaggagcacggcaagtctcctgctcaggtagggagggagggctgttctgagccaggtggggttctctgaccgctctacatccttggggagtcctggggcttggcaggtcccaggaagggactggctcacccaggtgagtccatgactcattagaacctcccagcgtcaagcagaatttggtctgcagccgcatttctagtcactcaagccatgtactcttgcctccgagcctgtctagactcagaggaggagtttccaggccttctccctctgccccaccaactgcatgcatggttagtatgagatggtacagaaaagttatttattctagtcttctttgttctaatgtccagtggggggctgggcgcatgttaaggaattctcattaagcagattctctgatctcctccttgggctgatggctgtcattaccaacatattgacagagctgctcagtgaatgccagtaacaatagctgctgtcattgattcttggactcttactgcatgataaaactcacatgttagaaaataacttagactacatgggatttccctttgtgtgatagtagactttttgtttccttgcagattttgatccgatttcaaatccagaggaatgtgatagtgatccccggatctatcaccccaagtcacattaaagagaatatccaggtaggtgtattccttcttttatttggcgggtttcagatcatgtgttagatgggaagggatgactgctgtagcatacagcctcagggttgcggagcttgatgcaacaggggcttctccctctgcactgtgggtgttggtggttgaccttccctcagcgatcaaaggacccaggctccttccatcttagggccctttctcccctagggtgttggtgtcttctccatccagcccaagattaggaaggagggaagagcatcttgttgggatgatttgtgtgggccaggctggagcatgtgcaccagtcacatggctgcgctcgcccacaggggaggctggatgtctcctaagcgtgcactcaggagaaaggggaggcagttggtggacaggtcaccacctctgtcgcatggaggcatgcccacgtggcctgagggcactgctttgagttgtgtgggaagattctggtcctgactcctgtctagtgacttctgagaggcaggagtgaagactggaacaggtggagcgtgtgcagaacacagagaggcagcggtccttttcagggcaatcttttcacctaagccaagaaccacagaagtgtgtgaagtgtgtgaaatctatttttggagctatgtgaaggaactctgtgtggcttcaaccctgacgacatagtctgtaacccagtcagggccatggacttgggattcccacagtctcactcacgatttaactgctgcatgacctctctcagcctttgtttcttcagtagagcacccttctgataggatcactgagggtgaaatgtaatgatacagtgaagggatagcatagtgcctggcgtatggaagtacctgatgctcttagctgccagtcaccctcagtcacggatgtcacctgtgatgatctcacaggcaacgacaggcattggtggcagcccacacccattgatcatgtcagcataggtgtgtgtgatcctggggccagctgcacagctgcattttcatagacagcatgtgcccaggagtatgctccctcttggtgtctgagctgcccatgagctccacaaggcactgctgcatcctgagggctcggtttggttgtgccaagcaagcatcgccattggggtttattgacccatctgtaacagtgcctgtgccctcaggcttgctgtgcatgccaagctggctgcaggtgggcatagccctgccattggcaggagaggcaggccacccacgatgggaggaccaggggatgggcaggttcctcatggtgtctacagcactctccctgccgggcccttgtccagctcacctgctgcccgcatgcccttctcctctcctttctcaggcgtcctgctctttgaatggcccagagcagctctgggtgaccagccaaccttaagcctgaaaggtatggatttggctaaactgtaaactcagttctctccaatggctgctgacgggcctcttggaacgagactgcaggtctcttgtagtggttagaattgagcactgctgactgaccggcatctgctccacatggtgtgtccggaattggtgggttcttggtctcactgacttcaggaatgaagccgcggacccttgcggtgagtgttacagttcttaaaggtggtgtgtccggagtttgttccttctgatgttcggatgtgttcggagtttcttccttctggtgggttcatggtctcactggcttaggagtgaaggtgaggacctttgcggtgagtgttacagctcttaaggtggcgcgtctggagttgttcgttcctcccggtgggttcgtggtcttattggcttcaggagtgatgctgcagacctttgcggtgagtgttacagctcataaaggcagtgtggacccaaagagtgagcagcagcaagatctattgcaaagaccgaaacaacaaagcttccgcagtgtggaaggggacgggagtgggttgccagtgctggcttgggcagcctgcttttattctcttatctggccccacccacatcctgctgattggtccattttacagagagccgagtggtctgttttgacagggtgctgattggtgcatttacaatccctgagctagacacaaaggttctccacatccccactagattagctagatacagagtgtcaacacaaaggttctccaagtccccaccagagtagctagatacagagtgtcgattggtgcattcacaaaccgtgagctagacacagggtgctgattggtgtgtttacaaaccgtgagctagatacagagtgccgattggtgtatttacaatcccctagctagacataaaggttttccaagtccccaccagtcaggagcctagctggcttcacccagtggatcccgcacggggccgcaggtgaaggcgcctgccagtcccgggcggtgtgccggcactcctcagcccttgggtggtctatgggacctggtgccatggagcagggggcggtgctcgttggggaggctcctgctgcagaggagcccacggagggtcaggggaggctcaggcatggcgggctgcaggtcccgagccctgccctgcggggaggcagctaaggcctggcgagaaatggagcgcagcgccggtgggccagcactgctgggggacctagcacgccctcctcagccgctggcccgagtgctaagcccctcattgcccagggccagcagggcttgccagccgctccgagtgccgggcccaccaagcccacacccacccggaattcgtgctggcctgcaagcaccacgcgcagccccgattcccaccggcgtctctccctccacacctccccgcaagctgagggagccgactccggcctcggccagcccaggaaggggctcccacagtgcaacggtgggctgaagggctcctcaagtgccgccaaagtgggagcccaggcagaggaggcccggagagctagtgagggttgtgagggctgccagcatgctgtcacccctcaatgggggctgccagcatgctgtcacccctcaatgggggcctggcctaaggtgccctctgtgccctgcagggcagctaggattgcccctgggaggacataggctggggaagattatctgaccctcccatgggaggagccaccgagtgagcagctcagcaggtggcagggggccacatcgccccagttctgcccttctgccgtcgtggctctcaatgcccgggatccccatggcctagcaaaagtgaatgtgacacggggaccttgggcccagctgagatgcccccattcctctgttaggtctgctacacactgaggggaaatgccatcctcaggcagtgagacaggaccaggctgacgtgagacctgagggccaaagccgaagtgatctgatggctgaggacagacagcagcggcgggttaggaggggccggaggaagtgcttatgctgtcaggaggaggtgggagccaggtccacaagactcaccagggaggagaaaggcatccagtgcagggggctgccccggcccgccccctgtggccccagtgccgctcagaactgctgctgcaaggctgcctaccctttataaggagtcttctagaactgcttgctgttccccttaaacccaagaatccgcctaccccggccccagcactccccactacctccagatgacacgctgaggctactttctcctgccctcaggaggggaaggctcttgtggggaagagcctggggtgctccaggtccttgcattggaatcactcagtgcacccctcctcccgccgcaagacagccactctgccaggccggggtggatgctgatgctgtggccatgggtcctgttcctcagtgtgtggggacaacaaaaggggagggaagggctgagaagaatactattttcaaggaagaaaaatggatcactcagaaaatgtactctgtgatatgggtactgttagagttcatagtcccagggccaagtgggtccctagttggcaggtgtatggaacaaattgttttgttggggttttgaggggtagcagagtcagtgggaaaaattctgtgccatccttttttttttttttgagatggagtctcactctgtcatccaagctggagtgcagtggtgcgatctcggctcactgcaacctccacctcctgggttcaagcggttctcctgcctcagcctcctgaatagctgggactagaggcatatgccaccatgtccggctaatttttaaatttttagtagagatggggtttcaccatattggccaggctggtctcaaactcctgacctcgtggtctgcccatcttggcctcccaaagtgctgggattacaggcgtgaaccaccgcgcccagccgctataacttttaacaattcccatatgtcctttattccactaagatgagtgcagtatatatttccatctgtccaaggcttcctaaatgtagccaaggccaagccaacaccagtcacatgatcaaaatcaaagggcatttggggaatccaggctgtgattcagggaagttccaagtgtctgatgaagtgtttgttttacatctttgtgtcccttgcaggtctagcactgtgctatgtaggtaacatgtgctccattaaatgtgaattaaactaagttttctacaaacattgtgttttggttccaggtgtttgattttgaattaacacagcacgatatggataacatcctcagcctaaacaggaatctccgactggccatgttccccatgtaaatatggctccttctttttaaaacagagggaagaatatacagattgaatgattggtgtctgaataggtatttatcatacacattttagattaattaaactttctcattataa

SEQ ID NO: 10615 - DNA, 381 bp, Homo sapiens
gagatgtgtccgtgactgcttaccgtcctcttggtggctcgtgtgagggggttgacctgatagacaaccctgtgatcaagaggattgcaaaggagcacgattttgatccgatttcaaatccagaggaatgtgatagtgatccccggatctatcaccccaagtcacattaaagagaatatccaggtgtttgattttgaattaacacagcacgatatggataacatcctcagcctaaacaggaatctccgactggccatgttccccatgtaaatatggctccttctttttaaaacagagggaagaatatacagattgaatgattggtgtctgaataggtatttatcatacacattttagattaattaaactttctcattataa

SEQ ID NO: 10616 - DNA, 19945 bp, Homo sapiens
agtagctcgcgcggtgcctgtcggtagtcgcgtgcggggcggcggggcggcggggcggccggcggcggccatgggagatatcccagccgtgggcctcagctcctggaaggtgacgcggtcgcgggcagggaggcgcgcctgacctaggggagcgcgggacttgggggcgcccgatgggacccaggccggggctggggagaagtgcggcggcctcccctccgcctggccgacgcccgggaaaggcgctgctgaggtggccgcccaccgcccacaagcagcccggcccggcctttcctaaaacggagtcggtgctgcccgccgaggcgctctctgggagaagcgggaacctcggcagccaagcctcagactctggggctgcggccgcggcgttgggcggggctgctctgtggagaggcggagcccttgaagttactcagaactggagcggggatgccgaggggaggccttggcggcgctggactcggccggaacagggaacctcgaagcctcctctccagcaaagagagaaagaaaagttggggccgggcgtggggtgcgggcttgtaatcccagcactttgggaggccgaggcagtaggatcgcctgagctcaggagttcaagaccagccaggtcaacatggcgaaaccctgtttctacaaaaaatgaacaaatcagctgggcttgggggtgcgcgcctgtggtcccagctactcaggaggctgaggtgggaggatcactggagaccaggaagtcgatgctgcagtgagctttgatggcgccactgcactccagccttggggacagagccagaccttgctggaaaaaaaaaaaaaaaaaagaaaaaaggaaaattggaattgctgattaggctttaaaagaaactttgggatctcatgttgttccctgtttagaagcaacctgccctgatgcctgagacatataatcgctctgtgcatttatggggtgcagcgtaatgttttgagccgtgtatacaattgcaatgtggttaaatcaagctaattaacatatctatcacctctctcagttattattgtttgtggtaagatgtttgaaatgtcttgttattttgaaatacacatgtgtagtaaattattgttgactgttggcatcctagtgcgcagtaagtcttaaaagctgtgtctcctgtgtgtttgaaactttgtaccctttgatcagcaactccccattccctccttcctcacctcccccagcccccagcgtcttataaccaccattctattctacgacctttctctgctttgaacttcacaattcctgccagtgatttgagacagcactgactaaaaagcgtttaaaatttgatctttaaaaaaaaaaagctaaacttagttgttgataaaagctataagaagtcatataggaagttagttactgaaggagtcagaatgttcaaggcctgctcatgaaaatattatttaaattatttctcttacctgcttaccaactcttagaggctaggagtgtcgttttgttcatattggttctcagcatctagtgaaggacgtgcatctgtcagcccttcattcagtaagcactcgatggattaaactgttgagtctcttgcttccctttatttctgcaacaatttggtgcaggagtccagactttcgtgcacacaggataaggaaaaattagtgaaaactgtgcttaacaggtcaaaatattctatttatttttcttggactgcaggtgcatcaaattggattaatcataatcactcatcactggtctatgcaaaggcttatttttactcgtctatttttaatagtgaataaacatcacagacctatccgttatctgttgccccagaaatgctgcatcaatggccaaacaccagacctcagtggtgtacagcagcaagtgtattcctcccacacgggaggtcaggagagcagctctgtggaccttggctgggctcagttgggatggttggggctactccacttggctccgcacatctcctgtcctcgtgcggttagttagggagtgttctcaagatgatggctgaagcacaagagagcaaggggagcggtgagatgtctggagacctcagcctgggctcttcattattaggggccacttgatccatctgtgtgcctgatcggtgctgtcttaattactacagttccttgataagcgcccatacctagtagggcaggtcacctctccctgctgttgtagatttacagtgtacaatttgatgagttttgacagatgcatgtacctgggtcctggctttttattttggcaccttactctccactgtaagttttagaactagcttagaaggttccatgagaaactttattggggttttgattggaactacattaaatctgtagaccagcttggagataattgacacctttgtaatgttaaatcttaacttttctacaagcatggtattcttctctgttaataaattgtcctgaatatggttcatttctaacatcttttcatatggttgtatagtttttcctgaagagaatatatgtcttttgttggaattattattgggttcttgatagtgtgttatactactggaaattatatttctctgaagttacattttctacttgtttcacctgctatattcattacacttccagccactttactaaactgtactgttatttctgttaatttgtgttacatttgtttggattttctacacaaatgatcatatcatcagcaaataatggtagtttactttcctttttttccactctttaagcttaaaattgcttcttcttagttgttcaggtgcttctggaaagcacctccagcacagtggccattcttgttttgtacctgattttaaaggatgtaagatggatattttttaatattgatactctttatcagattaattcttttccccgacttactgggagtttagattttgaatctaaactggtattgaatcttaacaaatattgattgagttgacttttgtttttgtactttaatctgttaatattgatgaattacagattttctaatatcaaaccatccttagatatctgagatacactcaacatgggtgtggtatattatcttttcataaatattgttgcatccaatttgcttttattttacttatgaattttgcaacggtattcatgaataagatgaatgtgtgacttttaatatttttgtctgattttgattcagggttatgctagttttgtagaatgagttgagataagtccgtctttttctgttgtttgaaagtctgtgttaaactgagatgatttttttcttgaaaattttatgaaactggtggttttctcttttttttgaattccttgcattctttaataattatgtaactattcaagctttattcttgggttaaatttttctaggaattttcccattttatctcatttttccaagttattgacatatagttattggtaatattttcttttaagtccattttatctgcatgttttactgtccattcgtgtcagttttttaaaaagttggcctcttcatcaacctagccagaagtctgtttattttactgaagtttttcaaagaactgacttctggttttgttgatcttctctgttacatctttgttttctattttattgatgttattcttaatcatatttttatctttccatccaatttcttgggttctttttctaacttaagatggatacttggttcattagctttcaaccactctgaatctgttgcctataaaatgaagataattatgctgctctaactcctagggttaccgtgaagctccagtgagaaagtggtttgtgaactataaagcccttgtcagtcttcagtttaatgagactgcaaacccgcccacccccatagtcttccctagttctagtcccttcccttgcctgagcttcatttagagtgactgttctcttttctgaactaccttattgcttgtagcattatacattcatttaggttttgttatatacttctttttgtatggataccttcgtgtgagtctacacctcagcctttattattggacgctgtggtatctgagtatacaggataaatcttaagcctctttgcatctcagttattattcattctgtacttttttattgctttgatcattcaggaagcataccatctagctcagttttctgcagacactaaaaataacctatagtttttttttcccaaaatatgtaaaggagttggaacttagattattcataaattccttcataactgatattgcctgtttttagactgattatactagtaccaaattagtgacttaattttttatgtattatgttgtccacatgcttgggtgaaaggggagatttgtgttggattcctctgactgtgagaagacactttgttttgttggttttgcaggcttctccagggaaagtgaccgaggcagtgaaagaggccattgacgcagggtaccggcacttcgactgtgcttacttttaccacaatgagagggaggttggagcagggatccgttgcaagatcaaggaaggcgctgtaagacgggaggatctgttcattgccactaaggtagggcttctctatgcaaggctggcagagcttgggtaatgctacatctctggagggctttctactttctttatgggagttgatgactttgtttcatactcaaatcggaataaacaagaatattcacagcttcatgagcatgctgaattatattgtgtgcaggtttgtttcatattatttacttggtcattcaggtaggagtacacagatatcccccaattaacaatacattatcaaaattcagttagtgatgggcactttgactacagtggtgaataggacaaagtcctagccctcatgaagtctgtttacacagcgattcctaaattcagaatcactggggtgattgttaaatgcagattccaaattctaccccacatctgttgaaggagaaactctgggtgtggaggaagcagcttgagcacaggcataaggcaggaagcagcacggcaggtgcaggggtttgtaggaagcttggtgtattagtctgttctcatgctgctgtacgaacatacctgagactgggtagtttataaagaaaaagaggtttaattgactcacagtttcacatagctggggaggcctcacaatcatggcaaaaggcgaaggaggaacaaaggcacgtcttacatggtagcagacaagagaaagtgtacaggggaactgccgtttataaaaccatcagttgtcacgagacttattcactatcaccagaacagcataggaaaaacttgcccccatgattcagttacctcccactgggtccctcccatgacacgtagggattatgggagctacaattcaagatgagatttggctgtggacacaaccaaaccaaatcacttggtctctctggaccacacaatgtcaggttgcaggagtaatgagaagtgaggctgagtggtggataggctaagccatggaagttcagctgtgccctgtcaggagctgtgcttttacctagagacagaggagccctgtttcatttttaaatagggcagcttgtatcatatgtgagtgcaacttgtgttgtatataggatattttagtaggtgaaagaagcttgcatttgaggcagaggcaggaggccaggtaggagacattaacagcagtgcaggtggaagatgatgaaggcctgcactggcacagtgggtgagggagggagaagaggaaatggatgtggagggtattgggagtcaggacctgtggaagatgcagagtggactacgatagtggagaattcaagaattcctttgcttttgatttggaagcagaatgtaagaccatgagatcaggagtcatgggttcatggtctagctgccattcaggagctgtgagtattagggattagatggctcaggctcacagcttcattatttgtaaaatgagactttggatttgagaatttcctgagtaacttcccagctaaagtttcatacctcaagattcaatgttgtttctatagttgaattgccttctgttttactttatggaagttaatgttcttcaggcaccattgctatctgcactagagcagagggtggtaagagagcagccttggtgtgtgcttggccaagcggggagaatgtcttctgaatagtccaggtagggatgtgagcaactggagatttctaaggctcaccctgcaatttggagcaagttgcttctgtgtggatcgtagtcagcagtggaaatatgttcattattttggaaatttggaaaagtcatagaaatgtaattagaaataaataaatcacacatataagcaccacatggagacaactgtgattaacaatggaatacatttacttccagcattcatttttttatttttgtgaagatactgtgctcgtttgttttcatttatttgattcccctttcttttactttcttttactttactttcttttactttactttcatgtttttcccttgctgtgatggagccttcaggttagcttatgtcacagtcaataaaagtaaaatgaggggaaaaacacaagtttttctacataatgagagtgtggaaggagatagctaaaagaagtaaggcagtgtgagctaactcacctataggctaacccacatggttacagtgccttaggaacagagaactcttaatacggagtctgtgtaagtgagaaacacaagatagagattcttctgatttttcgtcatatcttttctgcctgcaggaatttcattttcgtttttgtttttggtcccaatgaatccaaataaccatcaaatatctcttggattcctgagcttcccttgaggaggagtcaggcagaaggatcccagctttggagcctctccctgcaggtgtcctggaactcttctgaggataatgtccctgtcctcccatcagaacttgccgtgttgtatttgtggtcatctcatcttggctattttgggttcaagacagtagctttgtggggctacagaatgggtgccatgctggctctgggtgggcacgtgtgacgctggtcccctctcctttgtagctgtggtgcacctgccataagaagtccttggtggaaacagcatgcagaaagagtctcaaggccttgaagctgaactatttggacctctacctcatacactggcccatgggtttcaaggtaccgttcagtaggtagttcgttctgcagtttgcaggaccttcctccccgtgctcacaccctgtcttgcggtggggagagcatggaccagcattcagggcaggggttcccaggctgcatctgccacatgctagctgcggcatttgggcagtcctcttgatatctctgggcctcagttaaggagaggcttggcttgacctctgaggcccccacaggtctgtctttcaagccagtcgctttttttccaagccaagagagcagtagatttttttcccttaggtttttaggtgaaagcagtgatcagatgaggaaatactgctgctcagagaaagttcccagtgaattcctaggccttgtctcttcttgcaggttctgttctctttggggagtaaatgctgttttgcaatatgggagatatttgcttgttcacctgcagcagggtccagtgggttgtgctggtagttgacttttccacttggttttattctcttaattgcttcacagtgtgtctggagcatgcatctgagccatggctctgtcactaagctaccccagtctggccgtgcaacttccctactctaggcaacctgcttctgcctcacacgggtcctggccaggatgtccctgcatatttgccctgggctgtgatgacagcctgcctgggcaagggcctgatcacacagttgacacctgtgaaatacagaagcccttgcagggatgttcttcctacaatggaatgggtgactgctgctcagcagtcttctacataccaacctgtgagaaggtccctttatgtgtgccacactgttggttactgttttagagtaaaataacaaaaaacacttcattcctagcacagctttacttaactaaggctttgtatctagtttccataaacgatgtgggcagctgtccgttagtgacactgactaagaggggaagatacccagagggcaaaaccagagtgatgtctgtgccttgaaattcattgcatgcagaaaatcataattaaaacaatggctacagctgtattacactcattgccagccagcattgttgtaattatgtacccagaactatgttaggtactttacacatattaactcatttaattctcatgacagttctacaaagttgacactattaacatccctcttggagagatgatgaaactaagatacagaaagtttaaggtttaagttagattattggagcccagaagcatatgctcaggtcagacatttgttacactttccttgccctcatcctttagcagattcctgtctttggatttctgggtcgtagaaaaggaaaaggtctcagatcatccaacaaattacagaagagaataatgcagcatcgtcagcatgtcttctggccagtaggaactgctaggccttgtgtgatgctggacaattagatcagggtccgagtatgagtcccgggctgcaattttgtggaggcttggataaatggcaacatgggatgtggctttaaagtgagactgttagttacttcagctcatcatggaaaatgcctctttcatgtgtatcaggctggaacatgtgacattcttccactgttgtttaggagtgtgattaggtgtcattaaataaacatgcctatgccattcacccttaacatgctacgtgggagtacatgagggaggtagctggattgcacgtcagtgcttctctgaaagatgactttaggttcttgccctttcaagatgtatctctctgccctctacctcctgtgtacctttgtattctcacttccttacctgtcatcatgatggggattctaagaaagaagacaagaccctaacagtggagttaggagagggttgattgggctctataagacatgaagaaaatgcactcctcacccattctttacccgaaattagtaaactattttctggaggcaatgggagaggacaaccttgcatcagtaaggatacagggtcttcctttcccatcttgtgagagatgaacagtgaacatcaggctggcagaggctttgccagccatccagtccaccagccattcatcttttcttagaaaggtgaagactgggcctggtcacatggccaggctggggttgcttagtgacagggctgtggcttggatgcaggtctcctgacacatggttttttttgttttgttttgttttgttttcacacatctcaactctccttcttcgcagcctcctcatccagaatggatcatgagctgcagtgaactttccttctgcctctcacatcctcgagtgcaggacttgcctctggacgagagcaacatggttattcccagtgacacggacttcctggacacgtgggaggtgagctgagccacaccaccaggcagcctcatcctgtgtgggtctccacccaggatgcagtgagccctgagctgcttgtgttcaaagacatcaaggttgtctacctgagatgtggggtttgtggagcaaaaaaggaatcaatacccgaagaactcagagacctcagtgactttcttgttacctttggtttggtatggtgcagttctcttgacacatttgaggggtagctcattatagacctcactttttttctcaaatatttatttatttttttattaaaaaccatatttatttcagaaaatacaggagagttcttctgcattaaactaacattaaaaattttattttcctggcacccagcagtaaccactgttaatgttttatagttcctttttctctcaagcatttcagaatgataaagttggcagcatggaagctcaggctggggaggtgagaccagtgtcggggaaggttaccaagtgtcagcccatttccagggttcagaccaaaaacagccctttactgcaggggcttgcagtaaagacttgagcaggaaattaagggggtggtggatttgagaggttcctggaagttgacccacaggctggggtgggtctcaggcttgggctccagcatggctgaccgagcacgtgtggtcttacagtcttgctaaccatcatgtgggatgggacatcacatttgaggcccaagaagaaagtaagcttaagcttaagcttgctgaggttaggacagagcttgctgggtgaagctctccagggaggaggccagagggaaccctcggacagggaggagtcccaggctaggctccccccatcaatagaagacaaagactgacctaaggtatctgagatgtcaggaccagggcccatgggcctcaactctttctgtcacaatgttttaggtcctaaaagatttgggttaaactctagggtgctcatgtagcaccagcgaggttccggtgattgttgcagagttgaggcagtaactaactgctgcgtgttggcccattggtcactcaggacttgctgctgactacggaccctggcacgaagctatgctcttcctgaagctcaggggcagcctggcttgctggtcagtgaccagctcagagctttaggttgctctgccctaaagtgtcttaaaatagtaagtggagaaggtgggataggagaatggtgatgtatccgtgtgcttaagaaggtcagtgtctcagtggaaagaaaggtgaacaaataaaatccgcagcagacatgcttgccagacatcaggaggaataggaacaagaagagctcacatgtgtcgagtactggacgccagccttagctgacacttcctgtgattccacataacccctaaacatccccgtggcacaggccatgtagacctgtcctgaagctgagaaaattggggccaagtgaggccatgcaacttgcccagcatcctctagccagaaaagatgggactgaaatcagaccttgagtgcagaaatgcttttgaagcttcaagtaaaatattgtaaaaatattgggtccaaccagttttagaataccatacagaactgctgagggacgtagattgtcagtgcagtagacagaagcttcacacccagcagagtcgttctcttataggccatggaggacctggtgatcaccgggctggtgaagaacatcggggtgtcaaacttcaaccatgaacagcttgagaggcttttgaataagcctgggttgaggttcaagccactaaccaaccaggtaagccgatggaagcatcagagagtttaacctgtgtggctggtcccccagctgccacctccacagggctcttctggaaatggaagaatgggtgaagcacaaaacaggcctgttctcctctggcagcactcagaatggtgattaaaggcagcagctaggcaagtggctttcttgaaggtgcatctgggtagatggtactgttggcaggcagggcatgagctggtgcttggccctccatgtgcagtgcaggcaggtcaccaggtgtactcagaagcagtcagggtcctggcaggtgcctcacccttatccaggaacatgggcctcccctctacctcttcccagcctgcagactgcagcaagaaagagtggatgactagatggcttcacgcgaggctcacaggctgctgaaggtgatgcaggcacttcgtttttttaatgcagagaaaagacttgtggggaaataactattgtattttctagactagctttgtatgttcaaagatcatttatacagtacttaagctttttattgaagagtagaagtgcacatgtgaaaatggaactgtataaattctcataaactgagcatagctctgggactagcatccagctcagtaaacagcacgtccagtgcccctgtaacccctgccgagcacagcatcattcccattcccagcagctgggattcacgtctgaactttacacaggtaaaataaaataataatgcaacataaacccctctgtgctcgcctctttcacacagcactgtgtttctgtacatgtgattgtagatagtgctctcttatttcttgtggtattctgttttgtgaattaaccacaattgagttatccattctgctgttaatgggcacttagacagtttccagtttgggactattaagaatagagcatcatgttctatttttttgaataaatatgctttttaaaaaagttctgtatggagtagatgcagaaaagtgtgtgaatcataaaaggcatacatagcttgatgaatttttgcaagtgaacaaactcaagtattcagcacccagaacaagaaaaaagccctcagccattcagtagctcccctgggtcctgttgtagccaccaccatgaagagcaacctggcttctgacccagcttctcatgtagttcagctttgccttgtatacaaccctatatatataagttttgatatatgtttatatggatagtagcttccgttttgtgtcagtatttttagttgttcagcactttaaatacctgggaatgattatggcatagtctgagtagacaaagtggggtggagggtctgctttctgttaggttgatggacaccaggaacacaggatgcggaaggctccagaagggctggcctctcttttggaggctttccaaacaggctgatcttgatgagcttggcatgttcctgagagcaaacgcactattcatagttctctgtaatttacactaaataactatttattttaaatctccttataacctggaattatatgtgagagtttggagaatgtgcaagagacagagatcctgctctctagcttcttaaaattttcattcaagtcacctgtagaatgtatttgtcacatgtagttcctcaatttcattcattcattcagtggatatatttttagcacttcctacatgtctagattgttcttagtgttggtgagacatctatgaacaaaacaaattcaaacaaaaatctctatcttcatgaggcttagatcttggtgacacagaaagacagtgagcaaatatgtaaaatctatgagatgtcagatagtgatagatgctgtagaggaaaataaaggccgggggagatgagagctatggtgtgttaacaatctttatctgagtgctcagggaaggccctgcagagcaggtggtattggaacattcagatgatgtaggtgtccccaaggccgtggactcagagaccatgacacctgctggcctcttggagattgctctgtccagactcctcacaacagaaacacttaggcctggagctgggccccatggctactcggtgacagccaagactttgacgcaggtcttctcttgtagagcttttcttgaacactagtggtctgaattttatgtaagctatgattctgttatagattgagtgccacccatatcttactcagaagaatctgatcagtttttgccaatccagagatgtgtccgtgactgcttaccgtcctcttggtggctcgtggtaaggatacctcagtggtgtgttagtcagagtccgactgggaagtagatgccaccttctcatttccttgggatgactgagggagggcttaatggaggttttgacagggtgtggagggatggtactatagggggctgtccacacctctcaagcctgggattgaaggcatggtttattattggaagccagggagtggctgtgagtgggctgccctgggagggtcaggacctcttcagggacgtaaatcagcctggagtgacccctttgctgagttccccaccagggtgtcagcccccttctgacctcctgacaaggatgctccccaggcctctccatggttggatgaggcaaagcctgctgtcatctttacccaggccctcctgcagctgtactgtgctcccaagatcagctaagagacctccagccattcagccacctaagccagaagcttggaaatcatcccttcccacatcccgagtccaatccagcaccaaaatctattgattattctgccaggagaagttggactttgtttcatgatttcatttctgccatcactgtcactgccttagttaagtagcattcccgaggtcattagaggagcccctcagctccctccctggcccactccattccaatccattgctcccagtgggagctgaaaggagctgtctctttcctttcctatgatcctatcactttcctgggaaaaattcttcaggtcttggtgtggcctgtgagatgcagccagcctgacctctgcctgcctctggcctcattccttcccatccctgtgaacatcctgggcttcagccacatgaagctgctgtggggtccttggatagaacatgttttctcacctctgtgcctttgcaaatactgttctctttacccacaaatcttttttttttaaatctggcaaactccagtttctaatttaaggttcagtccagcatcatcttctccaggaagccctcctgaccccttatttatgtttcttacacagcccttgtcacactgtcttgtgattttcttctcagtcccttccactagtcaaagcaaccagagtgcaggtatcttatttattcttctcttcccagcttctagctcagcacctgggaaacattgggaaccccgaaaaggctgaaattacttgagttttatcacctgtgtgttttccttgtgaagtggggcatgtgtgtttgaacttggaaccagctggagagtctctagaaggctgggtccattccacagctgagctttggggtagcggatcctctgatggagtgagtcagggagctctcagactgactggggtgggcaactgggcactctgtttggttccttcaggagacctcgaggacgatactagcacaatgcctgaaacagggtgatggctcagtacacactcgttaaaaaactgaatcctcagagttctcagggcccacccgtgcctgagcagaggatgcacagggactctatgaccatcttcaaaaccacttttaaaggttccacgtgttcacaatattcactttttagtagtattttgggcgaacttttctgaaagtatcatcatcaacaaatatcgattcgctgtgctgtgccagggtgtacagtagaagctgagaagtcagagagccctgagagtcgggggagtcaaagcttgagagcccactggctgcatgcgctgacatggccacctggtttttgaggagaaacaccaaatacacatgaaaagtgatgtcgtgtagccttgttcaccaaagtgttagcagtggttatctccatactggaaatgtggggcgatgtgcttttctgcattttaaaatttcctgtagtcggcatgtgtcatgatcagaaaataaatctttcattttggacaaagatttcttctttctaaagaaaggggcatccatgttggatctcctggctcactcccctgtactgtgtctctctagtgagggggttgacctgatagacaaccctgtgatcaagaggattgcaaaggagcacggcaagtctcctgctcaggtagggagggagggctgttctgagccaggtggggttctctgaccgctctacatccttggggagtcctggggcttggcaggtcccaggaagggactggctcacccaggtgagtccatgactcattagaacctcccagcgtcaagcagaatttggtctgcagccgcatttctagtcactcaagccatgtactcttgcctccgagcctgtctagactcagaggaggagtttccaggccttctccctctgccccaccaactgcatgcatggttagtatgagatggtacagaaaagttatttattctagtcttctttgttctaatgtccagtggggggctgggcgcatgttaaggaattctcattaagcagattctctgatctcctccttgggctgatggctgtcattaccaacatattgacagagctgctcagtgaatgccagtaacaatagctgctgtcattgattcttggactcttactgcatgataaaactcacatgttagaaaataacttagactacatgggatttccctttgtgtgatagtagactttttgtttccttgcagattttgatccgatttcaaatccagaggaatgtgatagtgatccccggatctatcaccccaagtcacattaaagagaatatccaggtaggtgtattccttcttttatttggcgggtttcagatcatgtgttagatgggaagggatgactgctgtagcatacagcctcagggttgcggagcttgatgcaacaggggcttctccctctgcactgtgggtgttggtggttgaccttccctcagcgatcaaaggacccaggctccttccatcttagggccctttctcccctagggtgttggtgtcttctccatccagcccaagattaggaaggagggaagagcatcttgttgggatgatttgtgtgggccaggctggagcatgtgcaccagtcacatggctgcgctcgcccacaggggaggctggatgtctcctaagcgtgcactcaggagaaaggggaggcagttggtggacaggtcaccacctctgtcgcatggaggcatgcccacgtggcctgagggcactgctttgagttgtgtgggaagattctggtcctgactcctgtctagtgacttctgagaggcaggagtgaagactggaacaggtggagcgtgtgcagaacacagagaggcagcggtccttttcagggcaatcttttcacctaagccaagaaccacagaagtgtgtgaagtgtgtgaaatctatttttggagctatgtgaaggaactctgtgtggcttcaaccctgacgacatagtctgtaacccagtcagggccatggacttgggattcccacagtctcactcacgatttaactgctgcatgacctctctcagcctttgtttcttcagtagagcacccttctgataggatcactgagggtgaaatgtaatgatacagtgaagggatagcatagtgcctggcgtatggaagtacctgatgctcttagctgccagtcaccctcagtcacggatgtcacctgtgatgatctcacaggcaacgacaggcattggtggcagcccacacccattgatcatgtcagcataggtgtgtgtgatcctggggccagctgcacagctgcattttcatagacagcatgtgcccaggagtatgctccctcttggtgtctgagctgcccatgagctccacaaggcactgctgcatcctgagggctcggtttggttgtgccaagcaagcatcgccattggggtttattgacccatctgtaacagtgcctgtgccctcaggcttgctgtgcatgccaagctggctgcaggtgggcatagccctgccattggcaggagaggcaggccacccacgatgggaggaccaggggatgggcaggttcctcatggtgtctacagcactctccctgccgggcccttgtccagctcacctgctgcccgcatgcccttctcctctcctttctcaggcgtcctgctctttgaatggcccagagcagctctgggtgaccagccaaccttaagcctgaaaggtatggatttggctaaactgtaaactcagttctctccaatggctgctgacgggcctcttggaacgagactgcaggtctcttgtagtggttagaattgagcactgctgactgaccggcatctgctccacatggtgtgtccggaattggtgggttcttggtctcactgacttcaggaatgaagccgcggacccttgcggtgagtgttacagttcttaaaggtggtgtgtccggagtttgttccttctgatgttcggatgtgttcggagtttcttccttctggtgggttcatggtctcactggcttaggagtgaaggtgaggacctttgcggtgagtgttacagctcttaaggtggcgcgtctggagttgttcgttcctcccggtgggttcgtggtcttattggcttcaggagtgatgctgcagacctttgcggtgagtgttacagctcataaaggcagtgtggacccaaagagtgagcagcagcaagatctattgcaaagaccgaaacaacaaagcttccgcagtgtggaaggggacgggagtgggttgccagtgctggcttgggcagcctgcttttattctcttatctggccccacccacatcctgctgattggtccattttacagagagccgagtggtctgttttgacagggtgctgattggtgcatttacaatccctgagctagacacaaaggttctccacatccccactagattagctagatacagagtgtcaacacaaaggttctccaagtccccaccagagtagctagatacagagtgtcgattggtgcattcacaaaccgtgagctagacacagggtgctgattggtgtgtttacaaaccgtgagctagatacagagtgccgattggtgtatttacaatcccctagctagacataaaggttttccaagtccccaccagtcaggagcctagctggcttcacccagtggatcccgcacggggccgcaggtgaaggcgcctgccagtcccgggcggtgtgccggcactcctcagcccttgggtggtctatgggacctggtgccatggagcagggggcggtgctcgttggggaggctcctgctgcagaggagcccacggagggtcaggggaggctcaggcatggcgggctgcaggtcccgagccctgccctgcggggaggcagctaaggcctggcgagaaatggagcgcagcgccggtgggccagcactgctgggggacctagcacgccctcctcagccgctggcccgagtgctaagcccctcattgcccagggccagcagggcttgccagccgctccgagtgccgggcccaccaagcccacacccacccggaattcgtgctggcctgcaagcaccacgcgcagccccgattcccaccggcgtctctccctccacacctccccgcaagctgagggagccgactccggcctcggccagcccaggaaggggctcccacagtgcaacggtgggctgaagggctcctcaagtgccgccaaagtgggagcccaggcagaggaggcccggagagctagtgagggttgtgagggctgccagcatgctgtcacccctcaatgggggctgccagcatgctgtcacccctcaatgggggcctggcctaaggtgccctctgtgccctgcagggcagctaggattgcccctgggaggacataggctggggaagattatctgaccctcccatgggaggagccaccgagtgagcagctcagcaggtggcagggggccacatcgccccagttctgcccttctgccgtcgtggctctcaatgcccgggatccccatggcctagcaaaagtgaatgtgacacggggaccttgggcccagctgagatgcccccattcctctgttaggtctgctacacactgaggggaaatgccatcctcaggcagtgagacaggaccaggctgacgtgagacctgagggccaaagccgaagtgatctgatggctgaggacagacagcagcggcgggttaggaggggccggaggaagtgcttatgctgtcaggaggaggtgggagccaggtccacaagactcaccagggaggagaaaggcatccagtgcagggggctgccccggcccgccccctgtggccccagtgccgctcagaactgctgctgcaaggctgcctaccctttataaggagtcttctagaactgcttgctgttccccttaaacccaagaatccgcctaccccggccccagcactccccactacctccagatgacacgctgaggctactttctcctgccctcaggaggggaaggctcttg

SEQ ID NO: 10617 - DNA, 1041 bp, Homo sapiens
agtagctcgcgcggtgcctgtcggtagtcgcgtgcggggcggcggggcggcggggcggccggcggcggccatgggagatatcccagccgtgggcctcagctcctggaaggcttctccagggaaagtgaccgaggcagtgaaagaggccattgacgcagggtaccggcacttcgactgtgcttacttttaccacaatgagagggaggttggagcagggatccgttgcaagatcaaggaaggcgctgtaagacgggaggatctgttcattgccactaagcctcctcatccagaatggatcatgagctgcagtgaactttccttctgcctctcacatcctcgagtgcaggacttgcctctggacgagagcaacatggttattcccagtgacacggacttcctggacacgtgggaggccatggaggacctggtgatcaccgggctggtgaagaacatcggggtgtcaaacttcaaccatgaacagcttgagaggcttttgaataagcctgggttgaggttcaagccactaaccaaccagattttgatccgatttcaaatccagaggaatgtgatagtgatccccggatctatcaccccaagtcacattaaagagaatatccaggtctgctacacactgaggggaaatgccatcctcaggcagtgagacaggaccaggctgacgtgagacctgagggccaaagccgaagtgatctgatggctgaggacagacagcagcggcgggttaggaggggccggaggaagtgcttatgctgtcaggaggaggtgggagccaggtccacaagactcaccagggaggagaaaggcatccagtgcagggggctgccccggcccgccccctgtggccccagtgccgctcagaactgctgctgcaaggctgcctaccctttataaggagtcttctagaactgcttgctgttccccttaaacccaagaatccgcctaccccggccccagcactccccactacctccagatgacacgctgaggctactttctcctgccctcaggaggggaaggctcttg

SEQ ID NO: 10618 - DNA, 8458 bp, Homo sapiens
gagtctcaaggccttgaagctgaactatttggacctctacctcatacactggcccatgggtttcaaggtaccgttcagtaggtagttcgttctgcagtttgcaggaccttcctccccgtgctcacaccctgtcttgcggtggggagagcatggaccagcattcagggcaggggttcccaggctgcatctgccacatgctagctgcggcatttgggcagtcctcttgatatctctgggcctcagttaaggagaggcttggcttgacctctgaggcccccacaggtctgtctttcaagccagtcgctttttttccaagccaagagagcagtagatttttttcccttaggtttttaggtgaaagcagtgatcagatgaggaaatactgctgctcagagaaagttcccagtgaattcctaggccttgtctcttcttgcaggttctgttctctttggggagtaaatgctgttttgcaatatgggagatatttgcttgttcacctgcagcagggtccagtgggttgtgctggtagttgacttttccacttggttttattctcttaattgcttcacagtgtgtctggagcatgcatctgagccatggctctgtcactaagctaccccagtctggccgtgcaacttccctactctaggcaacctgcttctgcctcacacgggtcctggccaggatgtccctgcatatttgccctgggctgtgatgacagcctgcctgggcaagggcctgatcacacagttgacacctgtgaaatacagaagcccttgcagggatgttcttcctacaatggaatgggtgactgctgctcagcagtcttctacataccaacctgtgagaaggtccctttatgtgtgccacactgttggttactgttttagagtaaaataacaaaaaacacttcattcctagcacagctttacttaactaaggctttgtatctagtttccataaacgatgtgggcagctgtccgttagtgacactgactaagaggggaagatacccagagggcaaaaccagagtgatgtctgtgccttgaaattcattgcatgcagaaaatcataattaaaacaatggctacagctgtattacactcattgccagccagcattgttgtaattatgtacccagaactatgttaggtactttacacatattaactcatttaattctcatgacagttctacaaagttgacactattaacatccctcttggagagatgatgaaactaagatacagaaagtttaaggtttaagttagattattggagcccagaagcatatgctcaggtcagacatttgttacactttccttgccctcatcctttagcagattcctgtctttggatttctgggtcgtagaaaaggaaaaggtctcagatcatccaacaaattacagaagagaataatgcagcatcgtcagcatgtcttctggccagtaggaactgctaggccttgtgtgatgctggacaattagatcagggtccgagtatgagtcccgggctgcaattttgtggaggcttggataaatggcaacatgggatgtggctttaaagtgagactgttagttacttcagctcatcatggaaaatgcctctttcatgtgtatcaggctggaacatgtgacattcttccactgttgtttaggagtgtgattaggtgtcattaaataaacatgcctatgccattcacccttaacatgctacgtgggagtacatgagggaggtagctggattgcacgtcagtgcttctctgaaagatgactttaggttcttgccctttcaagatgtatctctctgccctctacctcctgtgtacctttgtattctcacttccttacctgtcatcatgatggggattctaagaaagaagacaagaccctaacagtggagttaggagagggttgattgggctctataagacatgaagaaaatgcactcctcacccattctttacccgaaattagtaaactattttctggaggcaatgggagaggacaaccttgcatcagtaaggatacagggtcttcctttcccatcttgtgagagatgaacagtgaacatcaggctggcagaggctttgccagccatccagtccaccagccattcatcttttcttagaaaggtgaagactgggcctggtcacatggccaggctggggttgcttagtgacagggctgtggcttggatgcaggtctcctgacacatggttttttttgttttgttttgttttgttttcacacatctcaactctccttcttcgcagcctcctcatccagaatggatcatgagctgcagtgaactttccttctgcctctcacatcctcgagtgcaggacttgcctctggacgagagcaacatggttattcccagtgacacggacttcctggacacgtgggaggtgagctgagccacaccaccaggcagcctcatcctgtgtgggtctccacccaggatgcagtgagccctgagctgcttgtgttcaaagacatcaaggttgtctacctgagatgtggggtttgtggagcaaaaaaggaatcaatacccgaagaactcagagacctcagtgactttcttgttacctttggtttggtatggtgcagttctcttgacacatttgaggggtagctcattatagacctcactttttttctcaaatatttatttatttttttattaaaaaccatatttatttcagaaaatacaggagagttcttctgcattaaactaacattaaaaattttattttcctggcacccagcagtaaccactgttaatgttttatagttcctttttctctcaagcatttcagaatgataaagttggcagcatggaagctcaggctggggaggtgagaccagtgtcggggaaggttaccaagtgtcagcccatttccagggttcagaccaaaaacagccctttactgcaggggcttgcagtaaagacttgagcaggaaattaagggggtggtggatttgagaggttcctggaagttgacccacaggctggggtgggtctcaggcttgggctccagcatggctgaccgagcacgtgtggtcttacagtcttgctaaccatcatgtgggatgggacatcacatttgaggcccaagaagaaagtaagcttaagcttaagcttgctgaggttaggacagagcttgctgggtgaagctctccagggaggaggccagagggaaccctcggacagggaggagtcccaggctaggctccccccatcaatagaagacaaagactgacctaaggtatctgagatgtcaggaccagggcccatgggcctcaactctttctgtcacaatgttttaggtcctaaaagatttgggttaaactctagggtgctcatgtagcaccagcgaggttccggtgattgttgcagagttgaggcagtaactaactgctgcgtgttggcccattggtcactcaggacttgctgctgactacggaccctggcacgaagctatgctcttcctgaagctcaggggcagcctggcttgctggtcagtgaccagctcagagctttaggttgctctgccctaaagtgtcttaaaatagtaagtggagaaggtgggataggagaatggtgatgtatccgtgtgcttaagaaggtcagtgtctcagtggaaagaaaggtgaacaaataaaatccgcagcagacatgcttgccagacatcaggaggaataggaacaagaagagctcacatgtgtcgagtactggacgccagccttagctgacacttcctgtgattccacataacccctaaacatccccgtggcacaggccatgtagacctgtcctgaagctgagaaaattggggccaagtgaggccatgcaacttgcccagcatcctctagccagaaaagatgggactgaaatcagaccttgagtgcagaaatgcttttgaagcttcaagtaaaatattgtaaaaatattgggtccaaccagttttagaataccatacagaactgctgagggacgtagattgtcagtgcagtagacagaagcttcacacccagcagagtcgttctcttataggccatggaggacctggtgatcaccgggctggtgaagaacatcggggtgtcaaacttcaaccatgaacagcttgagaggcttttgaataagcctgggttgaggttcaagccactaaccaaccaggtaagccgatggaagcatcagagagtttaacctgtgtggctggtcccccagctgccacctccacagggctcttctggaaatggaagaatgggtgaagcacaaaacaggcctgttctcctctggcagcactcagaatggtgattaaaggcagcagctaggcaagtggctttcttgaaggtgcatctgggtagatggtactgttggcaggcagggcatgagctggtgcttggccctccatgtgcagtgcaggcaggtcaccaggtgtactcagaagcagtcagggtcctggcaggtgcctcacccttatccaggaacatgggcctcccctctacctcttcccagcctgcagactgcagcaagaaagagtggatgactagatggcttcacgcgaggctcacaggctgctgaaggtgatgcaggcacttcgtttttttaatgcagagaaaagacttgtggggaaataactattgtattttctagactagctttgtatgttcaaagatcatttatacagtacttaagctttttattgaagagtagaagtgcacatgtgaaaatggaactgtataaattctcataaactgagcatagctctgggactagcatccagctcagtaaacagcacgtccagtgcccctgtaacccctgccgagcacagcatcattcccattcccagcagctgggattcacgtctgaactttacacaggtaaaataaaataataatgcaacataaacccctctgtgctcgcctctttcacacagcactgtgtttctgtacatgtgattgtagatagtgctctcttatttcttgtggtattctgttttgtgaattaaccacaattgagttatccattctgctgttaatgggcacttagacagtttccagtttgggactattaagaatagagcatcatgttctatttttttgaataaatatgctttttaaaaaagttctgtatggagtagatgcagaaaagtgtgtgaatcataaaaggcatacatagcttgatgaatttttgcaagtgaacaaactcaagtattcagcacccagaacaagaaaaaagccctcagccattcagtagctcccctgggtcctgttgtagccaccaccatgaagagcaacctggcttctgacccagcttctcatgtagttcagctttgccttgtatacaaccctatatatataagttttgatatatgtttatatggatagtagcttccgttttgtgtcagtatttttagttgttcagcactttaaatacctgggaatgattatggcatagtctgagtagacaaagtggggtggagggtctgctttctgttaggttgatggacaccaggaacacaggatgcggaaggctccagaagggctggcctctcttttggaggctttccaaacaggctgatcttgatgagcttggcatgttcctgagagcaaacgcactattcatagttctctgtaatttacactaaataactatttattttaaatctccttataacctggaattatatgtgagagtttggagaatgtgcaagagacagagatcctgctctctagcttcttaaaattttcattcaagtcacctgtagaatgtatttgtcacatgtagttcctcaatttcattcattcattcagtggatatatttttagcacttcctacatgtctagattgttcttagtgttggtgagacatctatgaacaaaacaaattcaaacaaaaatctctatcttcatgaggcttagatcttggtgacacagaaagacagtgagcaaatatgtaaaatctatgagatgtcagatagtgatagatgctgtagaggaaaataaaggccgggggagatgagagctatggtgtgttaacaatctttatctgagtgctcagggaaggccctgcagagcaggtggtattggaacattcagatgatgtaggtgtccccaaggccgtggactcagagaccatgacacctgctggcctcttggagattgctctgtccagactcctcacaacagaaacacttaggcctggagctgggccccatggctactcggtgacagccaagactttgacgcaggtcttctcttgtagagcttttcttgaacactagtggtctgaattttatgtaagctatgattctgttatagattgagtgccacccatatcttactcagaagaatctgatcagtttttgccaatccagagatgtgtccgtgactgcttaccgtcctcttggtggctcgtggtaaggatacctcagtggtgtgttagtcagagtccgactgggaagtagatgccaccttctcatttccttgggatgactgagggagggcttaatggaggttttgacagggtgtggagggatggtactatagggggctgtccacacctctcaagcctgggattgaaggcatggtttattattggaagccagggagtggctgtgagtgggctgccctgggagggtcaggacctcttcagggacgtaaatcagcctggagtgacccctttgctgagttccccaccagggtgtcagcccccttctgacctcctgacaaggatgctccccaggcctctccatggttggatgaggcaaagcctgctgtcatctttacccaggccctcctgcagctgtactgtgctcccaagatcagctaagagacctccagccattcagccacctaagccagaagcttggaaatcatcccttcccacatcccgagtccaatccagcaccaaaatctattgattattctgccaggagaagttggactttgtttcatgatttcatttctgccatcactgtcactgccttagttaagtagcattcccgaggtcattagaggagcccctcagctccctccctggcccactccattccaatccattgctcccagtgggagctgaaaggagctgtctctttcctttcctatgatcctatcactttcctgggaaaaattcttcaggtcttggtgtggcctgtgagatgcagccagcctgacctctgcctgcctctggcctcattccttcccatccctgtgaacatcctgggcttcagccacatgaagctgctgtggggtccttggatagaacatgttttctcacctctgtgcctttgcaaatactgttctctttacccacaaatcttttttttttaaatctggcaaactccagtttctaatttaaggttcagtccagcatcatcttctccaggaagccctcctgaccccttatttatgtttcttacacagcccttgtcacactgtcttgtgattttcttctcagtcccttccactagtcaaagcaaccagagtgcaggtatcttatttattcttctcttcccagcttctagctcagcacctgggaaacattgggaaccccgaaaaggctgaaattacttgagttttatcacctgtgtgttttccttgtgaagtggggcatgtgtgtttgaacttggaaccagctggagagtctctagaaggctgggtccattccacagctgagctttggggtagcggatcctctgatggagtgagtcagggagctctcagactgactggggtgggcaactgggcactctgtttggttccttcaggagacctcgaggacgatactagcacaatgcctgaaacagggtgatggctcagtacacactcgttaaaaaactgaatcctcagagttctcagggcccacccgtgcctgagcagaggatgcacagggactctatgaccatcttcaaaaccacttttaaaggttccacgtgttcacaatattcactttttagtagtattttgggcgaacttttctgaaagtatcatcatcaacaaatatcgattcgctgtgctgtgccagggtgtacagtagaagctgagaagtcagagagccctgagagtcgggggagtcaaagcttgagagcccactggctgcatgcgctgacatggccacctggtttttgaggagaaacaccaaatacacatgaaaagtgatgtcgtgtagccttgttcaccaaagtgttagcagtggttatctccatactggaaatgtggggcgatgtgcttttctgcattttaaaatttcctgtagtcggcatgtgtcatgatcagaaaataaatctttcattttggacaaagatttcttctttctaaagaaaggggcatccatgttggatctcctggctcactcccctgtactgtgtctctctagtgagggggttgacctgatagacaaccctgtgatcaagaggattgcaaaggagcacggcaagtctcctgctcag

SEQ ID NO: 10619 - DNA, 506 bp, Homo sapiens
gagtctcaaggccttgaagctgaactatttggacctctacctcatacactggcccatgggtttcaaggtaccgttcacctcctcatccagaatggatcatgagctgcagtgaactttccttctgcctctcacatcctcgagtgcaggacttgcctctggacgagagcaacatggttattcccagtgacacggacttcctggacacgtgggaggccatggaggacctggtgatcaccgggctggtgaagaacatcggggtgtcaaacttcaaccatgaacagcttgagaggcttttgaataagcctgggttgaggttcaagccactaaccaaccagattgagtgccacccatatcttactcagaagaatctgatcagtttttgccaatccagagatgtgtccgtgactgcttaccgtcctcttggtggctcgtgtgagggggttgacctgatagacaaccctgtgatcaagaggattgcaaaggagcacggcaagtctcctgctcag

SEQ ID NO: 10620 - DNA, 11281 bp, Homo sapiens
gtgcggggcggcggggcggcggggcggccggcggcggccatgggagatatcccagccgtgggcctcagctcctggaaggtgacgcggtcgcgggcagggaggcgcgcctgacctaggggagcgcgggacttgggggcgcccgatgggacccaggccggggctggggagaagtgcggcggcctcccctccgcctggccgacgcccgggaaaggcgctgctgaggtggccgcccaccgcccacaagcagcccggcccggcctttcctaaaacggagtcggtgctgcccgccgaggcgctctctgggagaagcgggaacctcggcagccaagcctcagactctggggctgcggccgcggcgttgggcggggctgctctgtggagaggcggagcccttgaagttactcagaactggagcggggatgccgaggggaggccttggcggcgctggactcggccggaacagggaacctcgaagcctcctctccagcaaagagagaaagaaaagttggggccgggcgtggggtgcgggcttgtaatcccagcactttgggaggccgaggcagtaggatcgcctgagctcaggagttcaagaccagccaggtcaacatggcgaaaccctgtttctacaaaaaatgaacaaatcagctgggcttgggggtgcgcgcctgtggtcccagctactcaggaggctgaggtgggaggatcactggagaccaggaagtcgatgctgcagtgagctttgatggcgccactgcactccagccttggggacagagccagaccttgctggaaaaaaaaaaaaaaaaaagaaaaaaggaaaattggaattgctgattaggctttaaaagaaactttgggatctcatgttgttccctgtttagaagcaacctgccctgatgcctgagacatataatcgctctgtgcatttatggggtgcagcgtaatgttttgagccgtgtatacaattgcaatgtggttaaatcaagctaattaacatatctatcacctctctcagttattattgtttgtggtaagatgtttgaaatgtcttgttattttgaaatacacatgtgtagtaaattattgttgactgttggcatcctagtgcgcagtaagtcttaaaagctgtgtctcctgtgtgtttgaaactttgtaccctttgatcagcaactccccattccctccttcctcacctcccccagcccccagcgtcttataaccaccattctattctacgacctttctctgctttgaacttcacaattcctgccagtgatttgagacagcactgactaaaaagcgtttaaaatttgatctttaaaaaaaaaaagctaaacttagttgttgataaaagctataagaagtcatataggaagttagttactgaaggagtcagaatgttcaaggcctgctcatgaaaatattatttaaattatttctcttacctgcttaccaactcttagaggctaggagtgtcgttttgttcatattggttctcagcatctagtgaaggacgtgcatctgtcagcccttcattcagtaagcactcgatggattaaactgttgagtctcttgcttccctttatttctgcaacaatttggtgcaggagtccagactttcgtgcacacaggataaggaaaaattagtgaaaactgtgcttaacaggtcaaaatattctatttatttttcttggactgcaggtgcatcaaattggattaatcataatcactcatcactggtctatgcaaaggcttatttttactcgtctatttttaatagtgaataaacatcacagacctatccgttatctgttgccccagaaatgctgcatcaatggccaaacaccagacctcagtggtgtacagcagcaagtgtattcctcccacacgggaggtcaggagagcagctctgtggaccttggctgggctcagttgggatggttggggctactccacttggctccgcacatctcctgtcctcgtgcggttagttagggagtgttctcaagatgatggctgaagcacaagagagcaaggggagcggtgagatgtctggagacctcagcctgggctcttcattattaggggccacttgatccatctgtgtgcctgatcggtgctgtcttaattactacagttccttgataagcgcccatacctagtagggcaggtcacctctccctgctgttgtagatttacagtgtacaatttgatgagttttgacagatgcatgtacctgggtcctggctttttattttggcaccttactctccactgtaagttttagaactagcttagaaggttccatgagaaactttattggggttttgattggaactacattaaatctgtagaccagcttggagataattgacacctttgtaatgttaaatcttaacttttctacaagcatggtattcttctctgttaataaattgtcctgaatatggttcatttctaacatcttttcatatggttgtatagtttttcctgaagagaatatatgtcttttgttggaattattattgggttcttgatagtgtgttatactactggaaattatatttctctgaagttacattttctacttgtttcacctgctatattcattacacttccagccactttactaaactgtactgttatttctgttaatttgtgttacatttgtttggattttctacacaaatgatcatatcatcagcaaataatggtagtttactttcctttttttccactctttaagcttaaaattgcttcttcttagttgttcaggtgcttctggaaagcacctccagcacagtggccattcttgttttgtacctgattttaaaggatgtaagatggatattttttaatattgatactctttatcagattaattcttttccccgacttactgggagtttagattttgaatctaaactggtattgaatcttaacaaatattgattgagttgacttttgtttttgtactttaatctgttaatattgatgaattacagattttctaatatcaaaccatccttagatatctgagatacactcaacatgggtgtggtatattatcttttcataaatattgttgcatccaatttgcttttattttacttatgaattttgcaacggtattcatgaataagatgaatgtgtgacttttaatatttttgtctgattttgattcagggttatgctagttttgtagaatgagttgagataagtccgtctttttctgttgtttgaaagtctgtgttaaactgagatgatttttttcttgaaaattttatgaaactggtggttttctcttttttttgaattccttgcattctttaataattatgtaactattcaagctttattcttgggttaaatttttctaggaattttcccattttatctcatttttccaagttattgacatatagttattggtaatattttcttttaagtccattttatctgcatgttttactgtccattcgtgtcagttttttaaaaagttggcctcttcatcaacctagccagaagtctgtttattttactgaagtttttcaaagaactgacttctggttttgttgatcttctctgttacatctttgttttctattttattgatgttattcttaatcatatttttatctttccatccaatttcttgggttctttttctaacttaagatggatacttggttcattagctttcaaccactctgaatctgttgcctataaaatgaagataattatgctgctctaactcctagggttaccgtgaagctccagtgagaaagtggtttgtgaactataaagcccttgtcagtcttcagtttaatgagactgcaaacccgcccacccccatagtcttccctagttctagtcccttcccttgcctgagcttcatttagagtgactgttctcttttctgaactaccttattgcttgtagcattatacattcatttaggttttgttatatacttctttttgtatggataccttcgtgtgagtctacacctcagcctttattattggacgctgtggtatctgagtatacaggataaatcttaagcctctttgcatctcagttattattcattctgtacttttttattgctttgatcattcaggaagcataccatctagctcagttttctgcagacactaaaaataacctatagtttttttttcccaaaatatgtaaaggagttggaacttagattattcataaattccttcataactgatattgcctgtttttagactgattatactagtaccaaattagtgacttaattttttatgtattatgttgtccacatgcttgggtgaaaggggagatttgtgttggattcctctgactgtgagaagacactttgttttgttggttttgcaggcttctccagggaaagtgaccgaggcagtgaaagaggccattgacgcagggtaccggcacttcgactgtgcttacttttaccacaatgagagggaggttggagcagggatccgttgcaagatcaaggaaggcgctgtaagacgggaggatctgttcattgccactaaggtagggcttctctatgcaaggctggcagagcttgggtaatgctacatctctggagggctttctactttctttatgggagttgatgactttgtttcatactcaaatcggaataaacaagaatattcacagcttcatgagcatgctgaattatattgtgtgcaggtttgtttcatattatttacttggtcattcaggtaggagtacacagatatcccccaattaacaatacattatcaaaattcagttagtgatgggcactttgactacagtggtgaataggacaaagtcctagccctcatgaagtctgtttacacagcgattcctaaattcagaatcactggggtgattgttaaatgcagattccaaattctaccccacatctgttgaaggagaaactctgggtgtggaggaagcagcttgagcacaggcataaggcaggaagcagcacggcaggtgcaggggtttgtaggaagcttggtgtattagtctgttctcatgctgctgtacgaacatacctgagactgggtagtttataaagaaaaagaggtttaattgactcacagtttcacatagctggggaggcctcacaatcatggcaaaaggcgaaggaggaacaaaggcacgtcttacatggtagcagacaagagaaagtgtacaggggaactgccgtttataaaaccatcagttgtcacgagacttattcactatcaccagaacagcataggaaaaacttgcccccatgattcagttacctcccactgggtccctcccatgacacgtagggattatgggagctacaattcaagatgagatttggctgtggacacaaccaaaccaaatcacttggtctctctggaccacacaatgtcaggttgcaggagtaatgagaagtgaggctgagtggtggataggctaagccatggaagttcagctgtgccctgtcaggagctgtgcttttacctagagacagaggagccctgtttcatttttaaatagggcagcttgtatcatatgtgagtgcaacttgtgttgtatataggatattttagtaggtgaaagaagcttgcatttgaggcagaggcaggaggccaggtaggagacattaacagcagtgcaggtggaagatgatgaaggcctgcactggcacagtgggtgagggagggagaagaggaaatggatgtggagggtattgggagtcaggacctgtggaagatgcagagtggactacgatagtggagaattcaagaattcctttgcttttgatttggaagcagaatgtaagaccatgagatcaggagtcatgggttcatggtctagctgccattcaggagctgtgagtattagggattagatggctcaggctcacagcttcattatttgtaaaatgagactttggatttgagaatttcctgagtaacttcccagctaaagtttcatacctcaagattcaatgttgtttctatagttgaattgccttctgttttactttatggaagttaatgttcttcaggcaccattgctatctgcactagagcagagggtggtaagagagcagccttggtgtgtgcttggccaagcggggagaatgtcttctgaatagtccaggtagggatgtgagcaactggagatttctaaggctcaccctgcaatttggagcaagttgcttctgtgtggatcgtagtcagcagtggaaatatgttcattattttggaaatttggaaaagtcatagaaatgtaattagaaataaataaatcacacatataagcaccacatggagacaactgtgattaacaatggaatacatttacttccagcattcatttttttatttttgtgaagatactgtgctcgtttgttttcatttatttgattcccctttcttttactttcttttactttactttcttttactttactttcatgtttttcccttgctgtgatggagccttcaggttagcttatgtcacagtcaataaaagtaaaatgaggggaaaaacacaagtttttctacataatgagagtgtggaaggagatagctaaaagaagtaaggcagtgtgagctaactcacctataggctaacccacatggttacagtgccttaggaacagagaactcttaatacggagtctgtgtaagtgagaaacacaagatagagattcttctgatttttcgtcatatcttttctgcctgcaggaatttcattttcgtttttgtttttggtcccaatgaatccaaataaccatcaaatatctcttggattcctgagcttcccttgaggaggagtcaggcagaaggatcccagctttggagcctctccctgcaggtgtcctggaactcttctgaggataatgtccctgtcctcccatcagaacttgccgtgttgtatttgtggtcatctcatcttggctattttgggttcaagacagtagctttgtggggctacagaatgggtgccatgctggctctgggtgggcacgtgtgacgctggtcccctctcctttgtagctgtggtgcacctgccataagaagtccttggtggaaacagcatgcagaaagagtctcaaggccttgaagctgaactatttggacctctacctcatacactggcccatgggtttcaaggtaccgttcagtaggtagttcgttctgcagtttgcaggaccttcctccccgtgctcacaccctgtcttgcggtggggagagcatggaccagcattcagggcaggggttcccaggctgcatctgccacatgctagctgcggcatttgggcagtcctcttgatatctctgggcctcagttaaggagaggcttggcttgacctctgaggcccccacaggtctgtctttcaagccagtcgctttttttccaagccaagagagcagtagatttttttcccttaggtttttaggtgaaagcagtgatcagatgaggaaatactgctgctcagagaaagttcccagtgaattcctaggccttgtctcttcttgcaggttctgttctctttggggagtaaatgctgttttgcaatatgggagatatttgcttgttcacctgcagcagggtccagtgggttgtgctggtagttgacttttccacttggttttattctcttaattgcttcacagtgtgtctggagcatgcatctgagccatggctctgtcactaagctaccccagtctggccgtgcaacttccctactctaggcaacctgcttctgcctcacacgggtcctggccaggatgtccctgcatatttgccctgggctgtgatgacagcctgcctgggcaagggcctgatcacacagttgacacctgtgaaatacagaagcccttgcagggatgttcttcctacaatggaatgggtgactgctgctcagcagtcttctacataccaacctgtgagaaggtccctttatgtgtgccacactgttggttactgttttagagtaaaataacaaaaaacacttcattcctagcacagctttacttaactaaggctttgtatctagtttccataaacgatgtgggcagctgtccgttagtgacactgactaagaggggaagatacccagagggcaaaaccagagtgatgtctgtgccttgaaattcattgcatgcagaaaatcataattaaaacaatggctacagctgtattacactcattgccagccagcattgttgtaattatgtacccagaactatgttaggtactttacacatattaactcatttaattctcatgacagttctacaaagttgacactattaacatccctcttggagagatgatgaaactaagatacagaaagtttaaggtttaagttagattattggagcccagaagcatatgctcaggtcagacatttgttacactttccttgccctcatcctttagcagattcctgtctttggatttctgggtcgtagaaaaggaaaaggtctcagatcatccaacaaattacagaagagaataatgcagcatcgtcagcatgtcttctggccagtaggaactgctaggccttgtgtgatgctggacaattagatcagggtccgagtatgagtcccgggctgcaattttgtggaggcttggataaatggcaacatgggatgtggctttaaagtgagactgttagttacttcagctcatcatggaaaatgcctctttcatgtgtatcaggctggaacatgtgacattcttccactgttgtttaggagtgtgattaggtgtcattaaataaacatgcctatgccattcacccttaacatgctacgtgggagtacatgagggaggtagctggattgcacgtcagtgcttctctgaaagatgactttaggttcttgccctttcaagatgtatctctctgccctctacctcctgtgtacctttgtattctcacttccttacctgtcatcatgatggggattctaagaaagaagacaagaccctaacagtggagttaggagagggttgattgggctctataagacatgaagaaaatgcactcctcacccattctttacccgaaattagtaaactattttctggaggcaatgggagaggacaaccttgcatcagtaaggatacagggtcttcctttcccatcttgtgagagatgaacagtgaacatcaggctggcagaggctttgccagccatccagtccaccagccattcatcttttcttagaaaggtgaagactgggcctggtcacatggccaggctggggttgcttagtgacagggctgtggcttggatgcaggtctcctgacacatggttttttttgttttgttttgttttgttttcacacatctcaactctccttcttcgcagcctcctcatccagaatggatcatgagctgcagtgaactttccttctgcctctcacatcctcgagtgcaggacttgcctctggacgagagcaacatggttattcccagtgacacggacttcctggacacgtgggaggtgagctgagccacaccaccaggcagcctcatcctgtgtgggtctccacccaggatgcagtgagccctgagctgcttgtgttcaaagacatcaaggttgtctacctgagatgtggggtttgtggagcaaaaaaggaatcaatacccgaagaactcagagacctcagtgactttcttgttacctttggtttggtatggtgcagttctcttgacacatttgaggggtagctcattatagacctcactttttttctcaaatatttatttatttttttattaaaaaccatatttatttcagaaaatacaggagagttcttctgcattaaactaacattaaaaattttattttcctggcacccagcagtaaccactgttaatgttttatagttcctttttctctcaagcatttcagaatgataaagttggcagcatggaagctcaggctggggaggtgagaccagtgtcggggaaggttaccaagtgtcagcccatttccagggttcagaccaaaaacagccctttactgcaggggcttgcagtaaagacttgagcaggaaattaagggggtggtggatttgagaggttcctggaagttgacccacaggctggggtgggtctcaggcttgggctccagcatggctgaccgagcacgtgtggtcttacagtcttgctaaccatcatgtgggatgggacatcacatttgaggcccaagaagaaagtaagcttaagcttaagcttgctgaggttaggacagagcttgctgggtgaagctctccagggaggaggccagagggaaccctcggacagggaggagtcccaggctaggctccccccatcaatagaagacaaagactgacctaaggtatctgagatgtcaggaccagggcccatgggcctcaactctttctgtcacaatgttttaggtcctaaaagatttgggttaaactctagggtgctcatgtagcaccagcgaggttccggtgattgttgcagagttgaggcagtaactaactgctgcgtgttggcccattggtcactcaggacttgctgctgactacggaccctggcacgaagctatgctcttcctgaagctcaggggcagcctggcttgctggtcagtgaccagctcagagctttaggttgctctgccctaaagtgtcttaaaatagtaagtggagaaggtgggataggagaatggtgatgtatccgtgtgcttaagaaggtcagtgtctcagtggaaagaaaggtgaacaaataaaatccgcagcagacatgcttgccagacatcaggaggaataggaacaagaagagctcacatgtgtcgagtactggacgccagccttagctgacacttcctgtgattccacataacccctaaacatccccgtggcacaggccatgtagacctgtcctgaagctgagaaaattggggccaagtgaggccatgcaacttgcccagcatcctctagccagaaaagatgggactgaaatcagaccttgagtgcagaaatgcttttgaagcttcaagtaaaatattgtaaaaatattgggtccaaccagttttagaataccatacagaactgctgagggacgtagattgtcagtgcagtagacagaagcttcacacccagcagagtcgttctcttataggccatggaggacctggtgatcaccgggctggtgaagaacatcggggtgtcaaacttcaaccatgaacagcttgagaggcttttgaataagcctgggttgaggttcaag

SEQ ID NO: 10621 - DNA, 319 bp, Homo sapiens
gtgcggggcggcggggcggcggggcggccggcggcggccatgggagatatcccagccgtgggcctcagctcctggaagctgtggtgcacctgccataagaagtccttggtggaaacagcatgcagaaagagtctcaaggccttgaagctgaactatttggacctctacctcatacactggcccatgggtttcaagagtcgttctcttataggccatggaggacctggtgatcaccgggctggtgaagaacatcggggtgtcaaacttcaaccatgaacagcttgagaggcttttgaataagcctgggttgaggttcaag

SEQ ID NO: 10622 - DNA, 21001 bp, Homo sapiens
gcggggcggcggggcggccggcggcggccatgggagatatcccagccgtgggcctcagctcctggaaggtgacgcggtcgcgggcagggaggcgcgcctgacctaggggagcgcgggacttgggggcgcccgatgggacccaggccggggctggggagaagtgcggcggcctcccctccgcctggccgacgcccgggaaaggcgctgctgaggtggccgcccaccgcccacaagcagcccggcccggcctttcctaaaacggagtcggtgctgcccgccgaggcgctctctgggagaagcgggaacctcggcagccaagcctcagactctggggctgcggccgcggcgttgggcggggctgctctgtggagaggcggagcccttgaagttactcagaactggagcggggatgccgaggggaggccttggcggcgctggactcggccggaacagggaacctcgaagcctcctctccagcaaagagagaaagaaaagttggggccgggcgtggggtgcgggcttgtaatcccagcactttgggaggccgaggcagtaggatcgcctgagctcaggagttcaagaccagccaggtcaacatggcgaaaccctgtttctacaaaaaatgaacaaatcagctgggcttgggggtgcgcgcctgtggtcccagctactcaggaggctgaggtgggaggatcactggagaccaggaagtcgatgctgcagtgagctttgatggcgccactgcactccagccttggggacagagccagaccttgctggaaaaaaaaaaaaaaaaaagaaaaaaggaaaattggaattgctgattaggctttaaaagaaactttgggatctcatgttgttccctgtttagaagcaacctgccctgatgcctgagacatataatcgctctgtgcatttatggggtgcagcgtaatgttttgagccgtgtatacaattgcaatgtggttaaatcaagctaattaacatatctatcacctctctcagttattattgtttgtggtaagatgtttgaaatgtcttgttattttgaaatacacatgtgtagtaaattattgttgactgttggcatcctagtgcgcagtaagtcttaaaagctgtgtctcctgtgtgtttgaaactttgtaccctttgatcagcaactccccattccctccttcctcacctcccccagcccccagcgtcttataaccaccattctattctacgacctttctctgctttgaacttcacaattcctgccagtgatttgagacagcactgactaaaaagcgtttaaaatttgatctttaaaaaaaaaaagctaaacttagttgttgataaaagctataagaagtcatataggaagttagttactgaaggagtcagaatgttcaaggcctgctcatgaaaatattatttaaattatttctcttacctgcttaccaactcttagaggctaggagtgtcgttttgttcatattggttctcagcatctagtgaaggacgtgcatctgtcagcccttcattcagtaagcactcgatggattaaactgttgagtctcttgcttccctttatttctgcaacaatttggtgcaggagtccagactttcgtgcacacaggataaggaaaaattagtgaaaactgtgcttaacaggtcaaaatattctatttatttttcttggactgcaggtgcatcaaattggattaatcataatcactcatcactggtctatgcaaaggcttatttttactcgtctatttttaatagtgaataaacatcacagacctatccgttatctgttgccccagaaatgctgcatcaatggccaaacaccagacctcagtggtgtacagcagcaagtgtattcctcccacacgggaggtcaggagagcagctctgtggaccttggctgggctcagttgggatggttggggctactccacttggctccgcacatctcctgtcctcgtgcggttagttagggagtgttctcaagatgatggctgaagcacaagagagcaaggggagcggtgagatgtctggagacctcagcctgggctcttcattattaggggccacttgatccatctgtgtgcctgatcggtgctgtcttaattactacagttccttgataagcgcccatacctagtagggcaggtcacctctccctgctgttgtagatttacagtgtacaatttgatgagttttgacagatgcatgtacctgggtcctggctttttattttggcaccttactctccactgtaagttttagaactagcttagaaggttccatgagaaactttattggggttttgattggaactacattaaatctgtagaccagcttggagataattgacacctttgtaatgttaaatcttaacttttctacaagcatggtattcttctctgttaataaattgtcctgaatatggttcatttctaacatcttttcatatggttgtatagtttttcctgaagagaatatatgtcttttgttggaattattattgggttcttgatagtgtgttatactactggaaattatatttctctgaagttacattttctacttgtttcacctgctatattcattacacttccagccactttactaaactgtactgttatttctgttaatttgtgttacatttgtttggattttctacacaaatgatcatatcatcagcaaataatggtagtttactttcctttttttccactctttaagcttaaaattgcttcttcttagttgttcaggtgcttctggaaagcacctccagcacagtggccattcttgttttgtacctgattttaaaggatgtaagatggatattttttaatattgatactctttatcagattaattcttttccccgacttactgggagtttagattttgaatctaaactggtattgaatcttaacaaatattgattgagttgacttttgtttttgtactttaatctgttaatattgatgaattacagattttctaatatcaaaccatccttagatatctgagatacactcaacatgggtgtggtatattatcttttcataaatattgttgcatccaatttgcttttattttacttatgaattttgcaacggtattcatgaataagatgaatgtgtgacttttaatatttttgtctgattttgattcagggttatgctagttttgtagaatgagttgagataagtccgtctttttctgttgtttgaaagtctgtgttaaactgagatgatttttttcttgaaaattttatgaaactggtggttttctcttttttttgaattccttgcattctttaataattatgtaactattcaagctttattcttgggttaaatttttctaggaattttcccattttatctcatttttccaagttattgacatatagttattggtaatattttcttttaagtccattttatctgcatgttttactgtccattcgtgtcagttttttaaaaagttggcctcttcatcaacctagccagaagtctgtttattttactgaagtttttcaaagaactgacttctggttttgttgatcttctctgttacatctttgttttctattttattgatgttattcttaatcatatttttatctttccatccaatttcttgggttctttttctaacttaagatggatacttggttcattagctttcaaccactctgaatctgttgcctataaaatgaagataattatgctgctctaactcctagggttaccgtgaagctccagtgagaaagtggtttgtgaactataaagcccttgtcagtcttcagtttaatgagactgcaaacccgcccacccccatagtcttccctagttctagtcccttcccttgcctgagcttcatttagagtgactgttctcttttctgaactaccttattgcttgtagcattatacattcatttaggttttgttatatacttctttttgtatggataccttcgtgtgagtctacacctcagcctttattattggacgctgtggtatctgagtatacaggataaatcttaagcctctttgcatctcagttattattcattctgtacttttttattgctttgatcattcaggaagcataccatctagctcagttttctgcagacactaaaaataacctatagtttttttttcccaaaatatgtaaaggagttggaacttagattattcataaattccttcataactgatattgcctgtttttagactgattatactagtaccaaattagtgacttaattttttatgtattatgttgtccacatgcttgggtgaaaggggagatttgtgttggattcctctgactgtgagaagacactttgttttgttggttttgcaggcttctccagggaaagtgaccgaggcagtgaaagaggccattgacgcagggtaccggcacttcgactgtgcttacttttaccacaatgagagggaggttggagcagggatccgttgcaagatcaaggaaggcgctgtaagacgggaggatctgttcattgccactaaggtagggcttctctatgcaaggctggcagagcttgggtaatgctacatctctggagggctttctactttctttatgggagttgatgactttgtttcatactcaaatcggaataaacaagaatattcacagcttcatgagcatgctgaattatattgtgtgcaggtttgtttcatattatttacttggtcattcaggtaggagtacacagatatcccccaattaacaatacattatcaaaattcagttagtgatgggcactttgactacagtggtgaataggacaaagtcctagccctcatgaagtctgtttacacagcgattcctaaattcagaatcactggggtgattgttaaatgcagattccaaattctaccccacatctgttgaaggagaaactctgggtgtggaggaagcagcttgagcacaggcataaggcaggaagcagcacggcaggtgcaggggtttgtaggaagcttggtgtattagtctgttctcatgctgctgtacgaacatacctgagactgggtagtttataaagaaaaagaggtttaattgactcacagtttcacatagctggggaggcctcacaatcatggcaaaaggcgaaggaggaacaaaggcacgtcttacatggtagcagacaagagaaagtgtacaggggaactgccgtttataaaaccatcagttgtcacgagacttattcactatcaccagaacagcataggaaaaacttgcccccatgattcagttacctcccactgggtccctcccatgacacgtagggattatgggagctacaattcaagatgagatttggctgtggacacaaccaaaccaaatcacttggtctctctggaccacacaatgtcaggttgcaggagtaatgagaagtgaggctgagtggtggataggctaagccatggaagttcagctgtgccctgtcaggagctgtgcttttacctagagacagaggagccctgtttcatttttaaatagggcagcttgtatcatatgtgagtgcaacttgtgttgtatataggatattttagtaggtgaaagaagcttgcatttgaggcagaggcaggaggccaggtaggagacattaacagcagtgcaggtggaagatgatgaaggcctgcactggcacagtgggtgagggagggagaagaggaaatggatgtggagggtattgggagtcaggacctgtggaagatgcagagtggactacgatagtggagaattcaagaattcctttgcttttgatttggaagcagaatgtaagaccatgagatcaggagtcatgggttcatggtctagctgccattcaggagctgtgagtattagggattagatggctcaggctcacagcttcattatttgtaaaatgagactttggatttgagaatttcctgagtaacttcccagctaaagtttcatacctcaagattcaatgttgtttctatagttgaattgccttctgttttactttatggaagttaatgttcttcaggcaccattgctatctgcactagagcagagggtggtaagagagcagccttggtgtgtgcttggccaagcggggagaatgtcttctgaatagtccaggtagggatgtgagcaactggagatttctaaggctcaccctgcaatttggagcaagttgcttctgtgtggatcgtagtcagcagtggaaatatgttcattattttggaaatttggaaaagtcatagaaatgtaattagaaataaataaatcacacatataagcaccacatggagacaactgtgattaacaatggaatacatttacttccagcattcatttttttatttttgtgaagatactgtgctcgtttgttttcatttatttgattcccctttcttttactttcttttactttactttcttttactttactttcatgtttttcccttgctgtgatggagccttcaggttagcttatgtcacagtcaataaaagtaaaatgaggggaaaaacacaagtttttctacataatgagagtgtggaaggagatagctaaaagaagtaaggcagtgtgagctaactcacctataggctaacccacatggttacagtgccttaggaacagagaactcttaatacggagtctgtgtaagtgagaaacacaagatagagattcttctgatttttcgtcatatcttttctgcctgcaggaatttcattttcgtttttgtttttggtcccaatgaatccaaataaccatcaaatatctcttggattcctgagcttcccttgaggaggagtcaggcagaaggatcccagctttggagcctctccctgcaggtgtcctggaactcttctgaggataatgtccctgtcctcccatcagaacttgccgtgttgtatttgtggtcatctcatcttggctattttgggttcaagacagtagctttgtggggctacagaatgggtgccatgctggctctgggtgggcacgtgtgacgctggtcccctctcctttgtagctgtggtgcacctgccataagaagtccttggtggaaacagcatgcagaaagagtctcaaggccttgaagctgaactatttggacctctacctcatacactggcccatgggtttcaaggtaccgttcagtaggtagttcgttctgcagtttgcaggaccttcctccccgtgctcacaccctgtcttgcggtggggagagcatggaccagcattcagggcaggggttcccaggctgcatctgccacatgctagctgcggcatttgggcagtcctcttgatatctctgggcctcagttaaggagaggcttggcttgacctctgaggcccccacaggtctgtctttcaagccagtcgctttttttccaagccaagagagcagtagatttttttcccttaggtttttaggtgaaagcagtgatcagatgaggaaatactgctgctcagagaaagttcccagtgaattcctaggccttgtctcttcttgcaggttctgttctctttggggagtaaatgctgttttgcaatatgggagatatttgcttgttcacctgcagcagggtccagtgggttgtgctggtagttgacttttccacttggttttattctcttaattgcttcacagtgtgtctggagcatgcatctgagccatggctctgtcactaagctaccccagtctggccgtgcaacttccctactctaggcaacctgcttctgcctcacacgggtcctggccaggatgtccctgcatatttgccctgggctgtgatgacagcctgcctgggcaagggcctgatcacacagttgacacctgtgaaatacagaagcccttgcagggatgttcttcctacaatggaatgggtgactgctgctcagcagtcttctacataccaacctgtgagaaggtccctttatgtgtgccacactgttggttactgttttagagtaaaataacaaaaaacacttcattcctagcacagctttacttaactaaggctttgtatctagtttccataaacgatgtgggcagctgtccgttagtgacactgactaagaggggaagatacccagagggcaaaaccagagtgatgtctgtgccttgaaattcattgcatgcagaaaatcataattaaaacaatggctacagctgtattacactcattgccagccagcattgttgtaattatgtacccagaactatgttaggtactttacacatattaactcatttaattctcatgacagttctacaaagttgacactattaacatccctcttggagagatgatgaaactaagatacagaaagtttaaggtttaagttagattattggagcccagaagcatatgctcaggtcagacatttgttacactttccttgccctcatcctttagcagattcctgtctttggatttctgggtcgtagaaaaggaaaaggtctcagatcatccaacaaattacagaagagaataatgcagcatcgtcagcatgtcttctggccagtaggaactgctaggccttgtgtgatgctggacaattagatcagggtccgagtatgagtcccgggctgcaattttgtggaggcttggataaatggcaacatgggatgtggctttaaagtgagactgttagttacttcagctcatcatggaaaatgcctctttcatgtgtatcaggctggaacatgtgacattcttccactgttgtttaggagtgtgattaggtgtcattaaataaacatgcctatgccattcacccttaacatgctacgtgggagtacatgagggaggtagctggattgcacgtcagtgcttctctgaaagatgactttaggttcttgccctttcaagatgtatctctctgccctctacctcctgtgtacctttgtattctcacttccttacctgtcatcatgatggggattctaagaaagaagacaagaccctaacagtggagttaggagagggttgattgggctctataagacatgaagaaaatgcactcctcacccattctttacccgaaattagtaaactattttctggaggcaatgggagaggacaaccttgcatcagtaaggatacagggtcttcctttcccatcttgtgagagatgaacagtgaacatcaggctggcagaggctttgccagccatccagtccaccagccattcatcttttcttagaaaggtgaagactgggcctggtcacatggccaggctggggttgcttagtgacagggctgtggcttggatgcaggtctcctgacacatggttttttttgttttgttttgttttgttttcacacatctcaactctccttcttcgcagcctcctcatccagaatggatcatgagctgcagtgaactttccttctgcctctcacatcctcgagtgcaggacttgcctctggacgagagcaacatggttattcccagtgacacggacttcctggacacgtgggaggtgagctgagccacaccaccaggcagcctcatcctgtgtgggtctccacccaggatgcagtgagccctgagctgcttgtgttcaaagacatcaaggttgtctacctgagatgtggggtttgtggagcaaaaaaggaatcaatacccgaagaactcagagacctcagtgactttcttgttacctttggtttggtatggtgcagttctcttgacacatttgaggggtagctcattatagacctcactttttttctcaaatatttatttatttttttattaaaaaccatatttatttcagaaaatacaggagagttcttctgcattaaactaacattaaaaattttattttcctggcacccagcagtaaccactgttaatgttttatagttcctttttctctcaagcatttcagaatgataaagttggcagcatggaagctcaggctggggaggtgagaccagtgtcggggaaggttaccaagtgtcagcccatttccagggttcagaccaaaaacagccctttactgcaggggcttgcagtaaagacttgagcaggaaattaagggggtggtggatttgagaggttcctggaagttgacccacaggctggggtgggtctcaggcttgggctccagcatggctgaccgagcacgtgtggtcttacagtcttgctaaccatcatgtgggatgggacatcacatttgaggcccaagaagaaagtaagcttaagcttaagcttgctgaggttaggacagagcttgctgggtgaagctctccagggaggaggccagagggaaccctcggacagggaggagtcccaggctaggctccccccatcaatagaagacaaagactgacctaaggtatctgagatgtcaggaccagggcccatgggcctcaactctttctgtcacaatgttttaggtcctaaaagatttgggttaaactctagggtgctcatgtagcaccagcgaggttccggtgattgttgcagagttgaggcagtaactaactgctgcgtgttggcccattggtcactcaggacttgctgctgactacggaccctggcacgaagctatgctcttcctgaagctcaggggcagcctggcttgctggtcagtgaccagctcagagctttaggttgctctgccctaaagtgtcttaaaatagtaagtggagaaggtgggataggagaatggtgatgtatccgtgtgcttaagaaggtcagtgtctcagtggaaagaaaggtgaacaaataaaatccgcagcagacatgcttgccagacatcaggaggaataggaacaagaagagctcacatgtgtcgagtactggacgccagccttagctgacacttcctgtgattccacataacccctaaacatccccgtggcacaggccatgtagacctgtcctgaagctgagaaaattggggccaagtgaggccatgcaacttgcccagcatcctctagccagaaaagatgggactgaaatcagaccttgagtgcagaaatgcttttgaagcttcaagtaaaatattgtaaaaatattgggtccaaccagttttagaataccatacagaactgctgagggacgtagattgtcagtgcagtagacagaagcttcacacccagcagagtcgttctcttataggccatggaggacctggtgatcaccgggctggtgaagaacatcggggtgtcaaacttcaaccatgaacagcttgagaggcttttgaataagcctgggttgaggttcaagccactaaccaaccaggtaagccgatggaagcatcagagagtttaacctgtgtggctggtcccccagctgccacctccacagggctcttctggaaatggaagaatgggtgaagcacaaaacaggcctgttctcctctggcagcactcagaatggtgattaaaggcagcagctaggcaagtggctttcttgaaggtgcatctgggtagatggtactgttggcaggcagggcatgagctggtgcttggccctccatgtgcagtgcaggcaggtcaccaggtgtactcagaagcagtcagggtcctggcaggtgcctcacccttatccaggaacatgggcctcccctctacctcttcccagcctgcagactgcagcaagaaagagtggatgactagatggcttcacgcgaggctcacaggctgctgaaggtgatgcaggcacttcgtttttttaatgcagagaaaagacttgtggggaaataactattgtattttctagactagctttgtatgttcaaagatcatttatacagtacttaagctttttattgaagagtagaagtgcacatgtgaaaatggaactgtataaattctcataaactgagcatagctctgggactagcatccagctcagtaaacagcacgtccagtgcccctgtaacccctgccgagcacagcatcattcccattcccagcagctgggattcacgtctgaactttacacaggtaaaataaaataataatgcaacataaacccctctgtgctcgcctctttcacacagcactgtgtttctgtacatgtgattgtagatagtgctctcttatttcttgtggtattctgttttgtgaattaaccacaattgagttatccattctgctgttaatgggcacttagacagtttccagtttgggactattaagaatagagcatcatgttctatttttttgaataaatatgctttttaaaaaagttctgtatggagtagatgcagaaaagtgtgtgaatcataaaaggcatacatagcttgatgaatttttgcaagtgaacaaactcaagtattcagcacccagaacaagaaaaaagccctcagccattcagtagctcccctgggtcctgttgtagccaccaccatgaagagcaacctggcttctgacccagcttctcatgtagttcagctttgccttgtatacaaccctatatatataagttttgatatatgtttatatggatagtagcttccgttttgtgtcagtatttttagttgttcagcactttaaatacctgggaatgattatggcatagtctgagtagacaaagtggggtggagggtctgctttctgttaggttgatggacaccaggaacacaggatgcggaaggctccagaagggctggcctctcttttggaggctttccaaacaggctgatcttgatgagcttggcatgttcctgagagcaaacgcactattcatagttctctgtaatttacactaaataactatttattttaaatctccttataacctggaattatatgtgagagtttggagaatgtgcaagagacagagatcctgctctctagcttcttaaaattttcattcaagtcacctgtagaatgtatttgtcacatgtagttcctcaatttcattcattcattcagtggatatatttttagcacttcctacatgtctagattgttcttagtgttggtgagacatctatgaacaaaacaaattcaaacaaaaatctctatcttcatgaggcttagatcttggtgacacagaaagacagtgagcaaatatgtaaaatctatgagatgtcagatagtgatagatgctgtagaggaaaataaaggccgggggagatgagagctatggtgtgttaacaatctttatctgagtgctcagggaaggccctgcagagcaggtggtattggaacattcagatgatgtaggtgtccccaaggccgtggactcagagaccatgacacctgctggcctcttggagattgctctgtccagactcctcacaacagaaacacttaggcctggagctgggccccatggctactcggtgacagccaagactttgacgcaggtcttctcttgtagagcttttcttgaacactagtggtctgaattttatgtaagctatgattctgttatagattgagtgccacccatatcttactcagaagaatctgatcagtttttgccaatccagagatgtgtccgtgactgcttaccgtcctcttggtggctcgtggtaaggatacctcagtggtgtgttagtcagagtccgactgggaagtagatgccaccttctcatttccttgggatgactgagggagggcttaatggaggttttgacagggtgtggagggatggtactatagggggctgtccacacctctcaagcctgggattgaaggcatggtttattattggaagccagggagtggctgtgagtgggctgccctgggagggtcaggacctcttcagggacgtaaatcagcctggagtgacccctttgctgagttccccaccagggtgtcagcccccttctgacctcctgacaaggatgctccccaggcctctccatggttggatgaggcaaagcctgctgtcatctttacccaggccctcctgcagctgtactgtgctcccaagatcagctaagagacctccagccattcagccacctaagccagaagcttggaaatcatcccttcccacatcccgagtccaatccagcaccaaaatctattgattattctgccaggagaagttggactttgtttcatgatttcatttctgccatcactgtcactgccttagttaagtagcattcccgaggtcattagaggagcccctcagctccctccctggcccactccattccaatccattgctcccagtgggagctgaaaggagctgtctctttcctttcctatgatcctatcactttcctgggaaaaattcttcaggtcttggtgtggcctgtgagatgcagccagcctgacctctgcctgcctctggcctcattccttcccatccctgtgaacatcctgggcttcagccacatgaagctgctgtggggtccttggatagaacatgttttctcacctctgtgcctttgcaaatactgttctctttacccacaaatcttttttttttaaatctggcaaactccagtttctaatttaaggttcagtccagcatcatcttctccaggaagccctcctgaccccttatttatgtttcttacacagcccttgtcacactgtcttgtgattttcttctcagtcccttccactagtcaaagcaaccagagtgcaggtatcttatttattcttctcttcccagcttctagctcagcacctgggaaacattgggaaccccgaaaaggctgaaattacttgagttttatcacctgtgtgttttccttgtgaagtggggcatgtgtgtttgaacttggaaccagctggagagtctctagaaggctgggtccattccacagctgagctttggggtagcggatcctctgatggagtgagtcagggagctctcagactgactggggtgggcaactgggcactctgtttggttccttcaggagacctcgaggacgatactagcacaatgcctgaaacagggtgatggctcagtacacactcgttaaaaaactgaatcctcagagttctcagggcccacccgtgcctgagcagaggatgcacagggactctatgaccatcttcaaaaccacttttaaaggttccacgtgttcacaatattcactttttagtagtattttgggcgaacttttctgaaagtatcatcatcaacaaatatcgattcgctgtgctgtgccagggtgtacagtagaagctgagaagtcagagagccctgagagtcgggggagtcaaagcttgagagcccactggctgcatgcgctgacatggccacctggtttttgaggagaaacaccaaatacacatgaaaagtgatgtcgtgtagccttgttcaccaaagtgttagcagtggttatctccatactggaaatgtggggcgatgtgcttttctgcattttaaaatttcctgtagtcggcatgtgtcatgatcagaaaataaatctttcattttggacaaagatttcttctttctaaagaaaggggcatccatgttggatctcctggctcactcccctgtactgtgtctctctagtgagggggttgacctgatagacaaccctgtgatcaagaggattgcaaaggagcacggcaagtctcctgctcaggtagggagggagggctgttctgagccaggtggggttctctgaccgctctacatccttggggagtcctggggcttggcaggtcccaggaagggactggctcacccaggtgagtccatgactcattagaacctcccagcgtcaagcagaatttggtctgcagccgcatttctagtcactcaagccatgtactcttgcctccgagcctgtctagactcagaggaggagtttccaggccttctccctctgccccaccaactgcatgcatggttagtatgagatggtacagaaaagttatttattctagtcttctttgttctaatgtccagtggggggctgggcgcatgttaaggaattctcattaagcagattctctgatctcctccttgggctgatggctgtcattaccaacatattgacagagctgctcagtgaatgccagtaacaatagctgctgtcattgattcttggactcttactgcatgataaaactcacatgttagaaaataacttagactacatgggatttccctttgtgtgatagtagactttttgtttccttgcagattttgatccgatttcaaatccagaggaatgtgatagtgatccccggatctatcaccccaagtcacattaaagagaatatccaggtaggtgtattccttcttttatttggcgggtttcagatcatgtgttagatgggaagggatgactgctgtagcatacagcctcagggttgcggagcttgatgcaacaggggcttctccctctgcactgtgggtgttggtggttgaccttccctcagcgatcaaaggacccaggctccttccatcttagggccctttctcccctagggtgttggtgtcttctccatccagcccaagattaggaaggagggaagagcatcttgttgggatgatttgtgtgggccaggctggagcatgtgcaccagtcacatggctgcgctcgcccacaggggaggctggatgtctcctaagcgtgcactcaggagaaaggggaggcagttggtggacaggtcaccacctctgtcgcatggaggcatgcccacgtggcctgagggcactgctttgagttgtgtgggaagattctggtcctgactcctgtctagtgacttctgagaggcaggagtgaagactggaacaggtggagcgtgtgcagaacacagagaggcagcggtccttttcagggcaatcttttcacctaagccaagaaccacagaagtgtgtgaagtgtgtgaaatctatttttggagctatgtgaaggaactctgtgtggcttcaaccctgacgacatagtctgtaacccagtcagggccatggacttgggattcccacagtctcactcacgatttaactgctgcatgacctctctcagcctttgtttcttcagtagagcacccttctgataggatcactgagggtgaaatgtaatgatacagtgaagggatagcatagtgcctggcgtatggaagtacctgatgctcttagctgccagtcaccctcagtcacggatgtcacctgtgatgatctcacaggcaacgacaggcattggtggcagcccacacccattgatcatgtcagcataggtgtgtgtgatcctggggccagctgcacagctgcattttcatagacagcatgtgcccaggagtatgctccctcttggtgtctgagctgcccatgagctccacaaggcactgctgcatcctgagggctcggtttggttgtgccaagcaagcatcgccattggggtttattgacccatctgtaacagtgcctgtgccctcaggcttgctgtgcatgccaagctggctgcaggtgggcatagccctgccattggcaggagaggcaggccacccacgatgggaggaccaggggatgggcaggttcctcatggtgtctacagcactctccctgccgggcccttgtccagctcacctgctgcccgcatgcccttctcctctcctttctcaggcgtcctgctctttgaatggcccagagcagctctgggtgaccagccaaccttaagcctgaaaggtatggatttggctaaactgtaaactcagttctctccaatggctgctgacgggcctcttggaacgagactgcaggtctcttgtagtggttagaattgagcactgctgactgaccggcatctgctccacatggtgtgtccggaattggtgggttcttggtctcactgacttcaggaatgaagccgcggacccttgcggtgagtgttacagttcttaaaggtggtgtgtccggagtttgttccttctgatgttcggatgtgttcggagtttcttccttctggtgggttcatggtctcactggcttaggagtgaaggtgaggacctttgcggtgagtgttacagctcttaaggtggcgcgtctggagttgttcgttcctcccggtgggttcgtggtcttattggcttcaggagtgatgctgcagacctttgcggtgagtgttacagctcataaaggcagtgtggacccaaagagtgagcagcagcaagatctattgcaaagaccgaaacaacaaagcttccgcagtgtggaaggggacgggagtgggttgccagtgctggcttgggcagcctgcttttattctcttatctggccccacccacatcctgctgattggtccattttacagagagccgagtggtctgttttgacagggtgctgattggtgcatttacaatccctgagctagacacaaaggttctccacatccccactagattagctagatacagagtgtcaacacaaaggttctccaagtccccaccagagtagctagatacagagtgtcgattggtgcattcacaaaccgtgagctagacacagggtgctgattggtgtgtttacaaaccgtgagctagatacagagtgccgattggtgtatttacaatcccctagctagacataaaggttttccaagtccccaccagtcaggagcctagctggcttcacccagtggatcccgcacggggccgcaggtgaaggcgcctgccagtcccgggcggtgtgccggcactcctcagcccttgggtggtctatgggacctggtgccatggagcagggggcggtgctcgttggggaggctcctgctgcagaggagcccacggagggtcaggggaggctcaggcatggcgggctgcaggtcccgagccctgccctgcggggaggcagctaaggcctggcgagaaatggagcgcagcgccggtgggccagcactgctgggggacctagcacgccctcctcagccgctggcccgagtgctaagcccctcattgcccagggccagcagggcttgccagccgctccgagtgccgggcccaccaagcccacacccacccggaattcgtgctggcctgcaagcaccacgcgcagccccgattcccaccggcgtctctccctccacacctccccgcaagctgagggagccgactccggcctcggccagcccaggaaggggctcccacagtgcaacggtgggctgaagggctcctcaagtgccgccaaagtgggagcccaggcagaggaggcccggagagctagtgagggttgtgagggctgccagcatgctgtcacccctcaatgggggctgccagcatgctgtcacccctcaatgggggcctggcctaaggtgccctctgtgccctgcagggcagctaggattgcccctgggaggacataggctggggaagattatctgaccctcccatgggaggagccaccgagtgagcagctcagcaggtggcagggggccacatcgccccagttctgcccttctgccgtcgtggctctcaatgcccgggatccccatggcctagcaaaagtgaatgtgacacggggaccttgggcccagctgagatgcccccattcctctgttaggtctgctacacactgaggggaaatgccatcctcaggcagtgagacaggaccaggctgacgtgagacctgagggccaaagccgaagtgatctgatggctgaggacagacagcagcggcgggttaggaggggccggaggaagtgcttatgctgtcaggaggaggtgggagccaggtccacaagactcaccagggaggagaaaggcatccagtgcagggggctgccccggcccgccccctgtggccccagtgccgctcagaactgctgctgcaaggctgcctaccctttataaggagtcttctagaactgcttgctgttccccttaaacccaagaatccgcctaccccggccccagcactccccactacctccagatgacacgctgaggctactttctcctgccctcaggaggggaaggctcttgtggggaagagcctggggtgctccaggtccttgcattggaatcactcagtgcacccctcctcccgccgcaagacagccactctgccaggccggggtggatgctgatgctgtggccatgggtcctgttcctcagtgtgtggggacaacaaaaggggagggaagggctgagaagaatactattttcaaggaagaaaaatggatcactcagaaaatgtactctgtgatatgggtactgttagagttcatagtcccagggccaagtgggtccctagttggcaggtgtatggaacaaattgttttgttggggttttgaggggtagcagagtcagtgggaaaaattctgtgccatccttttttttttttttgagatggagtctcactctgtcatccaagctggagtgcagtggtgcgatctcggctcactgcaacctccacctcctgggttcaagcggttctcctgcctcagcctcctgaatagctgggactagaggcatatgccaccatgtccggctaatttttaaatttttagtagagatggggtttcaccatattggccaggctggtctcaaactcctgacctcgtggtctgcccatcttggcctcccaaagtgctgggattacaggcgtgaaccaccgcgcccagccgctataacttttaacaattcccatatgtcctttattccactaagatgagtgcagtatatatttccatctgtccaaggcttcctaaatgtagccaaggccaagccaacaccagtcacatgatcaaaatcaaagggcatttggggaatccaggctgtgattcagggaagttccaagtgtctgatgaagtgtttgttttacatctttgtgtcccttgcaggtctagcactgtgctatgtaggtaacatgtgctccattaaatgtgaattaaactaagttttctacaaacattgtgttttggttccaggtgtttgattttgaattaacacagcacgatatggataacatcctcagcctaaacaggaatctccgactggccatgttccccatgtaaatatggctccttctttttaaaacagagggaagaatatacagattgaatgattggtgtctgaa

SEQ ID NO: 10623 - DNA, 844 bp, Homo sapiens
gcggggcggcggggcggccggcggcggccatgggagatatcccagccgtgggcctcagctcctggaaggcttctccagggaaagtgaccgaggcagtgaaagaggccattgacgcagggtaccggcacttcgactgtgcttacttttaccacaatgagagggaggttggagcagggatccgttgcaagatcaaggaaggcgctgtaagacgggaggatctgttcattgccactaagctgtggtgcacctgccataagaagtccttggtggaaacagcatgcagaaagagtctcaaggccttgaagctgaactatttggacctctacctcatacactggcccatgggtttcaagcctcctcatccagaatggatcatgagctgcagtgaactttccttctgcctctcacatcctcgagtgcaggacttgcctctggacgagagcaacatggttattcccagtgacacggacttcctggacacgtgggaggccatggaggacctggtgatcaccgggctggtgaagaacatcggggtgtcaaacttcaaccatgaacagcttgagaggcttttgaataagcctgggttgaggttcaagccactaaccaaccagattttgatccgatttcaaatccagaggaatgtgatagtgatccccggatctatcaccccaagtcacattaaagagaatatccaggtgtttgattttgaattaacacagcacgatatggataacatcctcagcctaaacaggaatctccgactggccatgttccccatgtaaatatggctccttctttttaaaacagagggaagaatatacagattgaatgattggtgtctgaa

SEQ ID NO: 10624 - DNA, 50955 bp, Homo sapiens
cccacagtgaactgtgctctatttactgtacttcccacagttcagtgtccaaactgagcactgttgccgtgaagatgtcagggtgaacgaggagccctgtgatctcctgaggttcaagagagacttcagaaggtatggagcagccatttcagaaatggtggattatattttattttcttgtattttacttatattttggttaatactttaaccaaaccttttttgtactaccgtacacccagtgtttttgcagtagaggatgttgtagccaaaacttggacccttaaaaacagacccaagatagcctacacctctggtgttaacagcagctcttgggtagggcagggtggctcacgcctgtaatcccagcactttgggaggccaaggggggcagaccacttgaggtcaggggttcaagaccagcctggccaacatggtgaaaccctgtctctacaaaaaatacaaaaattagctggatgtagtggcaggtgcctttaatcctggctacttgggaggctgaggcacgagaattacttgaacctgggaggtggaggttgcagtgagtcaagattgatcacgccactgcactccagcttggcgacacagcaagaatctgtcaaaaaaaaaaaaaaaaaaaaaaaaagaacagcagctctcatacatataatagaattctttaacagtaaaatatcttctatatttcaatagatgtattttgctctagaaattatgaaatgatatcataagataaccctgtttagtttgatcaacaagattttgtctatagaaactagtaatatttctaggaaacctctaaatatttggaactgtaacaacacatttctaaatattctatgaaaaaaggaaaaatatattggaaatttgcagaagtcttactagaaaagatatcctccagtaattgggattggcatgttttttcaatttaaatcaaacacaataagaactccagaggaattccacttagaaataaaatagcacatttcaaaatcacccatgcttcaaatagaaaatcacaagagaaattaggatatattttgaactgaataaaagtgaaaacagagtatggtagtatttgtgatattcacctgaagtatttctcacaaggaaattgattatcttaaatagcagcatgtagaaaaagaaaggttttctgaaacttaatgaaacaaaacaaaacacaatgaaaaattaacaaagcagaaattgtttctttgagattaagttgtcagaactctagtaagattattcagagaaagagagaaaatagctgcataagaatagctatatttataaacatacctaaattcagctattctctctgtatttatactgtgtaatataaatatagtataaaaacagctattcccatgcaggtattcttactataaaatagaattcacaacaaaatctttgtcaagggaaacaccaggataagataggttcactattaaattcataagatattttatgtagaaataataacaattccagaagctttttaaaaaaaacataggacaaaatgttccctaactcatttcataggagcaaataaccttgataccaaaacctggcacaagatatcaaaagaatatacttgaagatttaaataatataaaaacataatcaaaatattaagaaattaagtaaaacaatatttaaaagtaaaatacaccacaagcaagtaggatttatcctgggaatgcaaagttcgttcagtagcaaaaatcaatcaatgtaattcactacagaacagaataagaagaaaatatataatcaccttatagatgcaaaaagtgcatttgactaaattatgcatctatccatgaaaaactgtcaaaaacacaatgaaactgtcttaatctgattaaggccatgttaaaaaaaaaactatagctaacaaaataattcatgtgaatgaccaaatgtctttcttctaagatcaaaaaaaaaaaaaaagaaagaaaaaaaaggaaagtaagtctgctctacatacttgtagccaatacttcactggagctcctagccagtggaaaaaagcaagaaaaataagaaagatttaaaatgaagaactaaaatagcctctttttatagattatattattgttcctatataaaatcctaagtaatcaaaaattgatctgccaaaattaattaataaatttagcaagggtttaggtggcaagccctttggaaaaaataaattagaattctaaatatattcaaacaactagaaaatataattttaagtggtttatgccataaaataccaagaaatataattaacaaaattatggataacatctatgatgaaaaacataatgttgagagaaataaaagactatccaaatataaatatacagtatggcaatggtatcaataggacatcaattcttacccaaatttatttatacagtaaatgcatttttaatccatatcctgacagatatttctgccacagaaactgataagctcattctaaaatgtaagtagatatcaaagaatctagaaaagcaaaaataattttgaaaaatgaagttgaaagagttacactatattatttccagacttactataaagcaacaataaccaagatatttcagagttagtataaatttaaacatatagatcagtggaacagaaaaaaagtcagaaatagacccatacatatatggtcaatgaattttttacaatgacaaaaatacgtttcaatggaaaaagataaattattcaacaaatggtgtcttaacacttgtatgaaaaagaaaagcaacctctatctcacactatgaaatttatttgaagtggattagagagaccttattgtaacagctaaaattataatacttcttaagacatagatggaacacaaaaagcataaaacatacatttttttagaaaggataaattaaacatcataaaaagtaaaaccatctgcctttctaaagacagcattaaggaaataaaattagaaaccacagacatggaggaaaaatatacatttatctagcacatacaaatgatttttacaataagaattaataacacaaacaagccaaaaggacttaagtaggtactacttcacaacagaatggtcaataaatacattagaagaggttcaacatcattggtgatcagaaaactgcaaattaaaaccataatgaatgagataccagtttataacaaatataatatctaaaattaaaagactaacaatacttttagtgaaaatgcatagccactgcagacctcctatgctgctgttggtgaatttaaaattatggccacacaatcccacacatggatacctactcaaaataaataaaacttatttctagaaaaagacttgtacgtggcaagacttgtacataaccccaaatcaaaaacaacccaatggttcaggtacaagcaaatgaatttaaaaattgcagcatattcatataactgagagctacttagcaatgagaaaggactaacacacaacctggatgaatctcaaaaacatgctgagtaagagaagccagaaataaaaaaaacgcaacagcgtgcatccatctatttgacgttgtggagcagctgaactgagcaattgtgatagaaagatgagtgagtggggttggaggaaacctgggatgactcttatggacaatgatgatgctcctgtcagcacacacttaaaatgtttcctttttgttgtatgtaaattatacctcaatatagatgacaaaaaaaaataaaatagagcattccattttaaatgacagcaccatgaacatggtgaacactcagtttttgagctgttttacgaccaatgagctcattttactctacaggaagtttcagttgtgtgactataaggaataattaaaggcatcacagaattttaacaccctgtgtgtttttaaaaattgaatacaatttatagatgtggttaaatgtaagcttcctgtcgccttgctactttgaggatttgggaactcttgaaaccggctaaaagaagaacaaataaaaggccatggaaattataatgttctgaccaaatgccccccaaaaaattaaaaaaaaataaatttaagagagcacggcaggttttggaatagatttgttactggatttgtcagatccaagagaagattcttggatctcatgaaggaaggaattcagggtgattcacaaagtgcagtgaaaaaactgggtttattaaaagttattttattatagagtagggcaccctcggaaagcaagaggagaaaccaccaggctttgttttaagttttccttatataggggtcttgtctatgtaaagactaagctaagctgtatctacgtgcaggtaagcaggcatcctgacacatttattgctgtattgatttaaagaaaactagccttgaccgtctagtgtgtgagtacatcaaagcataactattattatcttcaaaacatatattgttatgggtattgggacatctggactctctgttgttgtaggagtgtgtccttgcaggtacctttaagctgtttcctttaatacaaacatcccatgaatatgggtcatgaccggcaaggcatgcgttttgctagtctcagaatggaactaaactaaaaaggcattacattgtccctccttggctcctgcttccctgacaaattgaccatcattagaatgtctggagtgtggcaagtgatgggttaaccaccagtactatagacattattctaaggagtccagagtctatatatgaggcacacatagtttaacatagataagatgcatccaacaaatatttctttttcttctttttttttttttttttttttttgagatggagtcttgctctgtcgcccaggctggagtgcagtggcgcgatctcggctcactgccagctccgcctcccgggttcacgccattctcctgtctcagcctcccgagaagctgggactacaggcacccgccaccgcgcctggctaatttttttttttttgtatttttagtagagacggggtttcatcgtgttagccaggatggtctcgatctcctgaccttgtgatccacccgcctcggcctcccaaagtgctgggattacaggagtgagccaccgcacccggcctcaaatatttcttaattacaaaaaaattacagttgagtgggggattacatatgttaaaagaatttacataaagctggaaaacactgacatctgctctttttgctcaaagtacttcaagagtacccaggatgtaattagacaaacatatgtatacagtaagaaaaaaatacgttattaaaacaattgagactaggctgtgtcagaaataaaatgtttaaacactcaagtgatctaggtatctctctgcagaaagataaattatgttgcagtaatattttaaagagaggaatttttagtttctgcaaagacacagaaaaataaatgtttatttacaggaattttgttcaattatgcattccagttttctaaacctgaaaatgccttagaatgtgtgaaaggaaagccacctgtcatacttctataagcaaaaatccaaaacatatgatttctaatgatgtaggcatatggcctttaaaagttataaaattcacttgcgttgaaaatgattttttaaattgcaaagtctctatccagattatagccggatactcaatccttttctgcaactaaggactcattatcattatttcatggagaggtgtttatgttttgtggagattcctgtgagcttctacctctgctggtgtcttggggttctctcttgggggctcagaattccctgcactccatccctcagccacgtgaatgacacagattttccctgtttctgccagtcagaaacctttgcttatgctcttctcttggtctgaaatgctgtccccctactcccacctgctaaatcctccttgctctgaagtctgagaagccttctctgaccccagttcctccctaggaattccccctccagctgtgttacaactatctctttgctgtactctctttcctactggattccataagggcagagcctgagttctgttcatcattcatcaccaagaactagcaaagggcctggaataaagtaacaggtagcacttgtcagataaatcaatcaatgaaggtgggacagcagcagctactttgcttcttttttttttgtttgttttacttttcttttttttaattaattaatttattttttattattattatactttaagttttagggtacatgtgcacaatgtgcaggttagttacatatgtatatatgtgccatgctggtgcgctgcacccactaacttctttttcttcctgagctttcattttgtggtggtagctgttgctctgtgaggcgggtggaagtccttccaaggcctgaaatggattctgtaatctttcatggtatgttctcgatttctactccaggtgtgagagaggacttcttctcacattcacaaacctctcttagctgatttagcttggttacttggaataagaatttcacagttcatggaacataatgaaacatgtcctgtgctggcagaagtgattttgtgtcaaaaggaactaatttttaacctacctacatcattacctacatctattaagctgaacaatttcaattatttttgatgggctcagtttctcacttatgaaatgagggattgaaagatatgatcttagtggttctgaataatacatagctctcagataaaattaccaaggctctcacagcatatatactcagaaatatgtgatgcaaatgtgtggtttaaaatatattgtgcattctgtaaattaaatcttatgaatcaattgtattagcaaatgtgacagtgtaacaaaaatataacctgcaagtcgcaactggaattagctcaagctaaaaaggaaagttattgacacattaactgaaaagtcagagtatttcaagtttcttttttctttttaaattatactttaagttctcggatatatgtgcagaacgtgcaggtttgctacataggtgtacacatgccatggtggtttgctgcactcattaacctgtcatctacattagatatttctcctaatgctatacctcccgtagccccccaacccccgacaggcacccgtgtgtgatgttctccctgtgtccatgtggtctcattgttcaactcccacttatgagtgagaacatgtagtgtttggttttctgttcctgtgttagtttgctgagaatgatggtttccaggttcatccatatccctgcaaaggacgtgaactcatactttttttatggctgcatactattccatggtgtatatgtgccacattttctttatccagtctatcatggatgggcatttgggttggttccaagtctttgctattgtggatagtgctgcaataaacataaaagtgcatgtgtctttacagcagaatgatttataatcctctgggtatatgcccagtaatgtgattgctgggtcaaatggtatttctggttcaagatccttgaggaatcgccacactgtcttccacaatggttgaagtaatttacactcccaccaacagtgtaaaagacttcctctttctccatatcctctctagcatctgttgtttcctgactttttaatgatcaccattctaactggtgtgagatggaatctcattgggttttgatttgcatttctctaatgatcagtaatgatgagcttttttcatatgtttgttggctgcataaatgtcttcttttgagaagtgtctgttcatattcttcactcactttttgatggggttgttcttttcttataaatttgtttaagttccttgtagattctggatattagccctttgtcagatggatagattgcaaaaatttctcccattctgtaggttgcctgttcactctgatgatactttcttttgctgtgcagaagctctttagtttaattagatctcatttgtcaattttggcttttattgtcattgcttttggtgttttaggcatgaagtctttgcccatgcctatgtcctgaatggtattgcctaggttttcttctagggtttttatggttttaggtcttatgcttaagtctttaatccatcttgagttaatttttgcataaggtgcaaggaaggggtccagtttcagttttctgcatatggctagccagttttcccaacaccatttattaaatagggaatcctttccccattgcttgtttatgccaggtttatcaaagatcagatgcttgtaggtgttatttctgaggcctctgttctcttccattggtctatatatctgttttggtactagtaccgtgctgctttggttactgtagtcttgtaatatagtttgaagtcaggtagcatgatgcctccagctttgtcctttttgcttaggattgtcttggccatatgggctttttttggtcccatatgaactttaaagtaatattttctaattctgtgaagaaagtcaatggtagtttgatggggacggcattgaatttataaattacttggggcagtatggccattttcacattattgattcttcctatccatgagcatagaatgtttttccatttgtttatgtcctctcttatttccttgagcagtggtttgtagttctccttgaagaggtccttcacatcccttgtaagttttattcctaggtattttattctctttgaagcaattgtgaatgggagttcactcatgatttggctctctgtttgtctattattggtgtataggaatgcttgtgatttttgcacatagattttgtatcctgagattttgctgaagttgcttataagcttaaggagattttgggatgagacgatggagttttctaaatatacaatcatgtcgtctgcaaacagagacaatttggcttcttctttttctatttgaatacgctttctttctcttgcctgattgccctggccagaacttccaatactatgttgaataggagtggtgagagagggcatccttgtcttgtgctggttttcaaatggaatgcttccagcttttcccattcagtatgatattggctgtgggtttgtcataaatagctcttattattttgagatatattctatcaatacctagtttattgagagtttttagcatgaaggggtgttgaattttatcaaaggccttttttgcatctattgagataatcatgtggtggttcttgtcattggttctgtttatgtgatggattacgtttattgatctgcatattttgaaccagccttgcatcctggggatgaagccaacttgatcatggcagataagctttttaatgtgctgctggatttggtttgccagtattttattgaagattttcgcatcaatgttcatcaaggatattggcatgaaattttccttttttgttgtgtctctgccaggttttggttatcagggtgatgttagcctcataaaatgagttagggaggagtctctctttttctattctttggaataatttcagaaggaatggtacaacttcctctttgtacctctggtagaatttggctgtcaatctgcctggtcctgggcttttttggttggtaggcttttaattactgcctcaatttcagaacttgttattggtctattcagggattcgacttcttgtatttcaagtttcaaaagaaatttcatgcatgctgcagttctgctcctctgattttcctggttctaccagtcttttgtgtctgggctgcacactcaggctgccttcctttctggtagcaaatggctggctgaagttccaagcctgtggtccagtctcttccccaatcatgaaatgaagtcctggacatcactctgattggaacaaatagaagaaattttctatccccaaaacaaccaatttgagcagggctggagtcaggacaggggttgcatttgggagctgtgtatatgtgtcttaaacctgaatctcctttctcttataataacaccagttattggatttagggccaatcccaacccaaaatgatgtcatcttgaaattcttcctttaattgcatcttctaaaatctttactccaaaaaaaggtcacattctgaagttcccagtggacatatcttttggagaggcaccattacagccctctaccatctgcctactgtctactccaaatccatgtctgctccatgagaaggtgacatctacctcatcccaacatccctgacaattttaacgcgttggactatctattcttagcctcaaatctcacaaaaaatattatcaagtcaaagataccaaatctaatcatctaaatcagatatgggtgaaactttgggaaggatccatcctagggtgatgatattcctctccttctgtggacttctgaatctagcaaacaagttatccgctcccaagatacattggtgtgtttacatcttctccatttaaaactaggaagacatttgttattgctttttcttttattccaaaaaggagaaaaacgggagggataaaggggacactggaattaagcaaaacctagcacagcacattctattaggttttacggcctgagaacaatcttttgcggcatgatcctgcacaccctgggcccacagcagctccgtggatggcccctgcccctgggcctgcagcagtgctgtgactggcttctgggtgcaggtggcggtagctcagtcgctctctacatccacacctctgtccttggagtcattcttcctttttctgaaagggtagagcatgttggctgtcaagtagccctactggcgtttcctgcttgtaaagtttataagtcccatgactttctctcattttgtcttgtctctgtccctttgggtcaaagttggccgtgtttctactgatttaacattctcaaaatcctcataggttcctgtgtatatcgagggaatctatgtcactagacagaagagttctccagaattcttcctgggtaaccctgtctctattcctggattctgctgagattggatccgcgatacatgcctaatcttttcagtgaaaagttttctgggcactcccttggtgttcattatagaacatcctttctctgtccacagtgaatttcctcatcacggtatcctttgctttccaaaaaggctcagaacttcctaagtcatcaggtcctggttccttttttgctccaacattctttcctcaaattatctctctcctctcatattttaccaaaatgattaagaagaaaccaggccttactttcttcacgttccttgaaataccctcagctaaatagacagcttcactgcttacaaattatcctttgcactcaacctcagaatacaactcaggcaaatttctgccactttataacaaggatttcctttcctagcatttccagtaacacttttctcatttccatctgcgatttctgctgaggtctccatgtcagcagaatcactgtaagcattcatatttcacctcagcagaatcaccttaagcactcatatttcccccaacaggcttgtccaggcaagctagatttttctgtcatttgcctcaaagttcttctagcctttaacccccaattccaaaaccacttccacatttttagatatttgttacagaaggaccttgtttcttagtagcaaaatctgtatgggtttgctagagctgcaattactaatgaccataaacttgtggcttaaaacaccagaaacttgttcttccatagttccgaagattagaaatccaaaaggaaagcgtcagccgggttggttctttttggagacactgagggagaatcaattccatgcctgctaaacagagaagcacatggaggctgtgctaaaggatatggaatttcattcatctttcatgtagcaattccacagtgagtggtccaggctgtggagcagtttgctgtatggaatcatttacttaggctcctctcatagtattattaaaccacactctaggcaacagatctcacccttatcatatgtagtgctctcttttggcagcatgttaaagcctatagactcctcaaaaagaaataataatataaatggccaggcatggtggctctcacctatatgcctataatcccagcacttgggaagacgacttgagcccaggagttcaagactagcctgggcaacatagggagatcccatctctacaagaaatttaaaaagtagccaggcgtggtggcatacacttgtggtcccagctacttggaggctgaagtgggaggattgcttgagcccagaagttggaggttgctgtgagctatgatcgcaccactgcactccaacctaggtaacagagcaagagcaaaaacaaacaaacaaacaaaaaacagatggctacaaaggaaacaaaatgaatatagttttcaaaatataaaaatataaaaacaaaatatttgaaaactgtgttatggtaacatatgtttctttaataagacattaaataacccagtctgaaggaggaacttggtgcccagcatcactttgaagtggtgatgagcataaacgatacacttattttgaagtctcttccattactgtgatacgatatgaaatcatctaacgtttcagttggtggatcagaggcactgctaaagctattgtttcttttttcctcattgctagttaaaggcaatgataaattttttagaagttcatacaaataaggtaataattatgattttcataactagttcatggaaacctaggctaagattctgtgccctggaggctttttctactttgtagatttgaagccaggccactggtatgtccatgttctatagcagacgggaaagaaaagtccagagcagagagctctgtgactgaggtgcacatgcacacacacacatgcacacgcacacagacacgcacacacgcacacacacacgcacacatacacgcatgcacacacgcacgcacacatatgcacacacgcacacattcccttcactccattcaactggcctgaactccgttgtgaagatggaagggaatggaggaatatggttggtgtgggtggccacattcctagctaaaacttagaaggaaggttcagttactttgaaaatgagcggagactggatactgggatcttcagcattttctatcacaacatcccaccaacctcatatccaggtctgtagggtccttggatcattgtctgccagtgattcttggtcagagccacaagctcagcgcctccacgttcctctttacctaccttggaaaggagggatgagtcttagtcacctccttgcaagttcccttggcttcttattcaccttgcctagactcttcgtgaaccgaatgccctagggaaacacagcttttcccaagacagtcacacgcactcacctggaaccagaagattgtagcattgtctttgctcagggcctaggcatctgctagtctaacatttcaataaccaagagagtcattggagtgacttagaggatcaaggataactgtgctctcatgtgaaaatatagctctgcccacccagaagggcagccaacaccttcttgattatgggtgtcttattccacttattactccattaaactaagatatggtccctggggcaggggaaaggtgggtgggtggggagatgttaaggttggttttataggtgttgcatttcaggtccctgtgggactgttgaagggagatttttaggaggcagctgaacattctccgtggatctctaatgagaggtctgcactgaagatataaatgctagaaacatcagcctagagctaatcacagaaggtctgagagagaaaaggatgcccctaggagcatgtgggataaaaagtggagacggtagggctgagatctgaagagcatcaacactaaagagacggtatcagaagagatgtctacatgggaaactgcatgaatgtagccagagaaatataggtcaagtaagataagggctgaacattaccaatgtgtttaaggtgtacattggcaactttgaagagacaaacttcagtgggagaaagtgcaggctttgggaactgaaaggcagggaagcaatgggatttaatgcttgtgaagttctctttcaggaagtgtatttctaaaaaccatggcccttcatgggcacggtaacctggaatgtgtggggatatctgcaagtgtcacgatgggtgtgggtgtcactgttatttagtagagcatgtcaggggatccgactgtcctacagtgagtgggacagcagccaccgccatgcagagccatcctcctcctgcacagcctgccagggccctgctgcttactcacagactctcagacactaatctatttctctgagcctccacaagcttaaataaagcacacatttttgcatagttttaatatacactaaattttatagaaattcaattaatgtttaaattgagagaagatggtagtttaagttcagaaatgtaccctaaactctccatatttcaggaaaatcatcacaaagagcattgctcttatggcatttaagcatccgatacaactcacctatatcaaattgctccgtatttgaatgtaactgtcaccttcacagtgattttacacataatggatgtgcagttgggtgtgtcttagtatttaaatactaaaatcatatcattttatcttaaattatcttccttttgtttctcctttacattacagtcagggcagtatgttgactttcaaacattgtttgtgtggttatataacattatcagattttctatcagatcatgaagcgggggtgttgggcacccttgcattgaaagctctgttctgatttcacaactcctggatccactctccaagcccaaaccccttcctgagaaacattctaggtataactgatgaacctgagatgtcatgagagcagggcaaggccaacaggatgctctcttcctggaatgtggatttggatttcaaactctaacgagtgtctgtaagccgcttaactggtgtcctgcaggcagggctgaggagagtttgggttgttttgactcatgcacacccaaaatcagaacatgtttgtttgcaaggagagaaaagaacaaagcagaagagagacacagagatgagaggtttgtcaccttgggtcacagcgagcctgtggcatggttccctgggaggccctgctgcccctctgccttcccttaggtgcctcagatctgtaccacagcccttggtgctgcattctgccagctcagaggggttttgttaattgcaaccaaaaagacttgcttaagtattttaatttccacttcctagtggttttaattaatagttgttagatgaattaatgtaaaaacaaatgaataaagtaaccgctttagatgaattttaaaaattttattaaaaacatgaatattatttcttcaactaattatctacatcagtgttttttatgatttctctccaattccactctttcccccaccaaaaaagagacagttgtctttcagacactcttaggattacctcatccaaaatatttgttttaaatgaaaagacttgatttgtgagggggatgtgtatatatgtgtgtgtgtgtgtgtgtgtgtgtgtgtgtatgtagcagaaaaagaggggaggataaggtccttttctatgcaactctctgagcaaaaacaatgcagtcctttaaaaaattgttatcttctaatgttaaaatagctaattcttatttaaagatttagttgtaagtcttaaagaaaatgttagtcttttaaagatacaagaagtgttaagggcttctccacttttattgggctgttggattgggtattaaaattgagaaatatgccttataaagttgtttttaattgtaaataagttcatgcattgttaaattcaattcttgaaatattctgtttctaagcaaatacacaacagtacatagccagtttgctatagtttcatgttttaaattttgtgtacatttcatgtcacatgtttcttaatttttagatgtttacatatctgagcctatgttatccttgtacaagtttgatgggaaagcaaccaacacactgatcttttattcttattcaatttttctttcataggtaatttctgcactagttttattttacctgaatttgatcagatgttttaaatgatccaaattcctagcactagaaaaaatccaggcttttgtagtttatgttgttgttgaacgagaagaagaccagacaagtagacacacgttcactaatcataggggtgacttcctttccagtgttcagcaagggatggggtataaggcaatgccaaacttcaacctgcccatcaggtgaaagagtgaagaatgtttaatgtagagttgttcttgaaactaggccagatgatgtcacatactggcttaattttttctattggatgcttaattatttgaggattctgcaggaaaagtccgggttgagttggcttgttcaatactaaaatatttttctcctgctaaagcacacacattcgctcacagcagtgtatatggaacttatagatgtttatttttacctctttttttcttttcccttcctttcttactctcactacctaagttcaaggtctgtggactgtgtacttgtggaggaggagcaccaggaaggggaagggagggattcctgctggcaggaaccatggagagcacatccctacctaaccctgcagaaaagtagccacagctcaaggaggtctctcatgtagatctatagagtagcccgtgcaaaatagcatctttcatcacagagtgactgacttttaacaaagcaataaagctaagcctctttggcccatctaccagaatgaggacactgcgttgttaagaaatcactcaattaaaataatatttgtcgaaattgtacttgacctgtaatcaagagcgacatttgacaccttagtgcagcttctcaaatgttacttattatgacttggaagggtaacaataaacaaaaacaacacaacaaataaatacaacaagaggcaaatcacacttccctttggtttcagaatctacaatgactgcttgaacatttgcctagtttaggaatatgtctttgtctcaggattttaggggtgcagaaaggaatgagagtatatggagcccaccttttctgaactagctttcccagtagcctggaaacagaaggattttcttgcttggtagagagtattgaaccctgtccttctgtgtgtccaggccaatgtctgtcgagagcttgactctctgtgctggaactaaccttgtccatcttcccatagttcagtattgtcttcctcaaaataaaggaaattatctccaacttcttgaaacatgcagaattttgaaatggttttctttataaaaacgataatatcagcatattttctaaactgcttgttagaggtatagagttgtgcagcttagatttggctgttgtgtcagacctctgtgttccagtcctcctgtggagtggacctgtgacatcagaacacacagaggtggggactggaatatctcagagtttccccaggggctccaaagggctggaagtgtgggtcccacctccttccatgaggggcagaagaaatgtgttgaaaaccagcgatggacaggtgatgcatcaggctctcaagtctcatttctagattccatcatccacatcaatttttcatctattacttttactcattgtaggcttttaatgagatgtagagaaaaatacaagctgaaaagaatcaacaacattttacttcaaaagattaaagacataattaccagtggttggtagtacgtctatgaggagcagcgaaggcatcgctcatctcgggcttttgagacgcgtgccattatcaagcctaaccgtgcaaaccagagatgcagagctgacttaaaaagctgctgttttgtcccaagaaaatcccttaatacagtatctgtttttcatagtagtttggctaagcttctgacattaccatgacttgcttgcccatgtttctaaaccatactgactcaaggaaaaggagtctttggatagagataacatgcaattgaaaatctgatgatattttgcatagtcagaaagacttttcctgcttagaaaatgttttctgtataacacagatgtgtttttcaatgccttggaatttcctctttagaaaatatgttgagtcaaccgaatttttaaagaaaataattatatcctgaatttagctctgctgaaagagcatgcaaaagttgcaatcatgtcctttgtaaatgtgttttaaagttttcccagagtttatcacgtgaggatgaaatgaaggagctggggtctcagggttaatgtatactttgatttgcagaagaataagaaagtgtatacaggtaaaaataaaatacatatgtgccaacatgtacattatcactaatcctcagaatttaaaaacctctactttttaatattcaaaatccttattggtccttatttggaatatgtttatcattaaaagattcctagtaaaataaagattggaagtgggtaaatgtgtgaatatggtagaaaggtctcttcatgtttccagtttccagggaggattacaaacaaagccactttaaatgtttttttccaaagtgactataccattggcatttctaccagcaatagaggagagttctgtttggtcagcatctttgctgacacttatgtagccagtgcttttttattttgattattctaatagaggtgtagtagtatcttattgtggtttaatttgaattcctgtaataattaagaatattcagcatcttttcacgtttattttctattcatatatcttggtgaaatgtcttatcaaatattttgcccaatttttattgctctctttcttcactattgaattttcaaagtttattatatattttgaatgttacttattgattaaatatatgttttgctagtattttctcatagtgtttggcttgtctttacattttcttaacagggtctttcaaaaggcaggatttcttaattttgattaattatatttgaccttttctttcaaggacagtgtttttattcttatatctaagaactctttgctgaacttacggtcatcaagtttacttctagaaattttatatgtcaaaaccacaatgatataccatctcacgccagtcagaatggcgattattaaaaagtcaagaaacaatagatgccggcaaggctgtggaggaataggaaggcttttaaactgttggtgggaatgtaaattagtttaacaattttggaaaacagtgtggtgattcctcaaggatctagaaccagaattatcatttgacccaccaatcccattcctgggtatatacccaaaggaatataaatcattctactataaagacacacgcacatgtatatttactgcagcactattcacaatagcaaagacttggaaccaacccgaatgcccatcagtgatagactggataaagaaaatgtggcacatatacaccatggaatactattcagccacaaaaaggaatgagatcatgtcctttgtagggacatggataaacctggaagccatcattctcagcaaactaacacaggaacagaaaaccaaacactgcatgttctcactcataagtacgagtcgaacaatgagaacacatggacacagggaggggaacaacacacaccagggcctgttgggggacggggagcaaggggaggaaacatacaggacaagtcaataggtacagcaaaccaccatggcacacgtgtacctatgtaacaaacctgcatgttctgcacatgtatcctggaacttaaagcaattttaaaaacaaactttatatgttttaatatttaagtctataatctattttgagttaatttttctatacagtgcaagatatgggtcaaagtgcaatttttatgcatacgaatatcccagcatcgattactacaaagactttcctttctcaattgaattgcctttgcaaagctttgtagaaaatcaattgacaatatttagcaagtctatttctggactcttttcagtttcattcattcaggtgtctatccttctgctaatgccacactgacttgactactgcagctttacagtgagccttgagccaggtagcgtgagccctccaattatgttctccctttttcagtgtggtttgggttattcttttgaatttttactaaattttagaagcactgtgtcaactcttattttaaaaatcacgtgtcatgttgattcaaattgcattaattctataaattaatttggggagaaatgacaatatcacttgagtcttccagatcatgactagagaacatcttcatgtctttttaggtggtctttaatcaatgtttctttcatacttttttttaaattttttgacatacaggtcattcacagagtttgttacatttatacatcataattattttaggtttttggtgctattaaaatggcagtcttgaaatttcaatttcaaattgttcattgctagcacattaacatgcaactgatatttatttatttatttatttatttatttattagagatgggggggtctcactccatcacctaggctggagtgcagtggcacaatcatagctcactgcagcctcaaacatggaggctcaagcaatcctcccacctcatagctgggatcacaggcacaaactaacatgcccagctaattttcttttttcgtagacacagggtcttgctatgttgggcaggttcatctgaaactcctggcttcaagggatcctcctccctccacctcccaaagtgctgggattacacatattagccaccgcacccggcctgattttttttttcttttttttttttttgagacggagtctcactccatcaccaggccggagtgcagtggcgcgatctcggctcactgcaacctccgcttcccaggttcaagcaattctcctgcctcagcctcctgagtagctgagattacaggcgcgtgccaccatgcccagctaatttttctatttttagtagagacggggtttcaccatcttggtcaggctggtctcaatctagtgacctcgtgatccacccacctcggcctcccaaagtgctgggattacaggcatgagccaccatgcccgggccccggcctggtttttaaacattgttttgctaatatcatgtttcagttctagtagcctcctatggattcatttgtattttcttacacaattacactatctgtaaatagaaacagtttttttttgttttgttttgttttttttttttttacaatctatgtgctttcatttcttttttcttgttccttattgagctacctacaacgaccaataaaaatagtaacaggggacatccttttcttgttcctgattttagaaagaaagcattcaatcttttactaataaatgacttcatttgtaggtattttgtgggtttttttttttagttgaggactttttattgtattgaatgaataaacattgaattatttcagggttttatttgcatctcaaaagatgatcatatgcttttccttctttagtctgttaatatggtttattagcattgattaatttttgaatattaaaccaccctttcattttcagaataaaccacacatggtgatgacgtgatgccatttttacatgctgctggtttcgctttgcaaacatttttagaataattcacatcctttctcatccagtgccattgtcttctgcctgaaatatttgcaatgccacattagtcatttcctccaatcttatccccacttgaatccacttgagtcccggcaccatccatccaaagtagaatatcaatcatccctctttcttagctttctaaagacccctttcatctctaagtgtataaattcctcagcatattaaaaatggatctctagcaaaagcctgcagcttcatctcttctttttcctgaaatattgtggtctacaaaagctacatttcttgtctttctgtgactctactgtattgctcacactatttcttttcctggattttttttataccatatttattatgaagacatattttcatcattttttatgtctccactcaggcaccctctcattctccaagaaaaggctattttcctcttttgtgtataccataatgggcagttcagatacctattatatatgggtatatattcacatgcaaatatgtgaaagtgaagttacctatctaaaggttgccttccttataagtctaagctcctggagagcaattcaggtggtattacatttatttctttatttatttttattattattattttttgagatgaagtctcatgctgttgcccaggttggagtgcagtggcatgatcttggctcactgcaacctccacctcccaggttcaagcgattttactgcctcagcctcccgagtagataggattacaggcatgcaccaccatgcctggctaatttttgtatttttagtagagacggggtttcgctatgttggccaggctagtcttgaactcctaacctcaggtgatccacctgcttctgcctcccaacatggtattatatttatatcccttgcttctagcccagtgcctggctccataataagtacccgataatgtttgttgaactattctgggttaaatagcactgacatgggtggattcttgaggaaagatgtcaccatgatttgtgtctcattagccagcgtccctacaactttgtggagcactggctggagcgaagagtgactagaagtgagataatcctcttctgcagttctgcgttcactgtctgtaatgccctttggactcacagactacatcaaacttacaatgaatgcagagagttctttactacaaatatatctatctaagcacagacacagcaagttttcaattccaaaaggctcatagaactgttggttccatccctttcccaatgtgtaaacaggttttccattgtgagttacacagaggaattatagcagtgtccggtaagaccgggtgatccaggaatggaagacgggatgaacagacagatgaaggaacctgagaaacggaggcttgggatagacccagggtatcttctttccacctttgttggagatccttggttaggagaccgtaggacaaaaactgtcgggctgttctctgtcgtcagcgctggggcttgagagcaacatcatgggatatttactgttccttcgcagataccattcacaaatggccagagtcttaatggtgttgtttggagtagagaattaataggggcaaagctctaatagcctcgaggaagctacggttttctgctgagaagtgtgtaagggttgctgcaggacaactctgcagcggaagcagacaacccagttgttagttcctgaggagagaggcctgtcctcccacctctccttaaggagccatttctctctgcttctctactcgctgatgacatccaagctcttctttgtgccaagttttccctctttcaatgaagcctcgccctcagcaaataaacacagtccaatgcccgttaacaaaaaggcaacaaagcaaaactaaaacaacaagggcaaaagaaatctaaacccaaaacacaagaaagtatcgtcactctgacctcatctggctttcatccaatctctccattcacagccaaattctgtagagaagagtgcagggcctacacatcctgcctcctcacttttcatttactctcgaatcttacgcgatgaatcttgcgttcatgtgggtcacactgaagccgcttgtgtgaatgtcaccaatgaacttgtcactgcttcaccttcccctcctttaagcaacttttcaggcgagtgtctgagatgccaccatataaaaatcggaatgtctttagctttgtttttttaaaaaatgggtaaaaatgaaagactctataaggaaattttattatctcaggcaaactagccacacttggcaacaagagctcccaatatctggagtccccaagattaattcatcatcagggcccacatcatcaaggcgctactgctgcctttttcaatgtggccatgttcagatgttatgctgatttgggggctcgatccactcgagctttcgtggtgtgtgtgtgtgtgtgtgtgtgtgtgtgtgtgtgtttgagagaaggcataggaagttggaaggaagagaaagagggaaggagggaggaagagtaatagagagaaatagaaacagagagtgctgtgtgcatgtgtgtgacatgtgacagtgtgagagtacctgtgtttggaaagagcaaaaccagacacatcactgtccaccaaatgcaaggaaattgtttcttccccagctttgagaacctgaaaaaattttctaggaatccttcggcagcctcttgtcccagcataaatgattcacagcctaaaaagaaaagactccccttagcttatgagttcctaagtagaaaaagtcctatttgggcttaggagccattcccccctctaaatgattcaatccaatagggaaggggaccacaggacaggcttacgctcatcaggactgtcctgattcacgaagaaaggggtggccaggttctgccagtgtggatggaggagcaatgcttgttgagtggacgaccagtaatgcctgccaaactccttccactgggttctcctttcctagttctgcagtacaagcttcatggtctcagcttctgcccatccatcagtgtccttgttaatggaggtgttcaggaccctctcccatcacttcttcctccccactctccactcacaactttgggcctgtccaccgcctgaatgcgcttgacctggacatccatttatctaggagagctatctcacttgtgttcaaattggtattctctccaatagataagacagaaaatctgaactaatcacacacacttatacacacacaaatgcactcacactcagacacacacattcatacacagacatgcacagaaatacagacacacacatacacacacacaccaacacatgcacagacacacagacaccctcagacacacagagacacacacaaacacacacaaactcatggacacacacacaatgacacagatgcacagactcattccaaatctttcctcttgccttgcacttttatgattagtgaattaaatcataacccacaccattacccaagccaggaaccagtgaatattcctggctgttactcctctcttgagccccacagttgctgcaaggagttgtgtcctgctgatggctccccttccacatgtctcaccaccttctcctctcctgcacactctgagattgtttagtgcaggcctgtacaattgcacacaggtgctgcctgtcaccccaacagcaggcttgttctctccatctgcacccagagagaggctttgcagctgggggtgcgaatgtggcagaatttccatcctttccaacacacattcattttatggcccagaatgtgttctcttctctcttggtgaatgtcccaaatgcctgtgagcagaatgtgtatttgcttcaattgggtgtggtcactaatgtcccgggcagggtagagttgtccagctcttctgtctttccacagattgtctaggcactgattctatccattactgtgttgaaatctctagctagaattgcagacttatttccccttttcagttctatcagcttttgattcctgtattttgaaactccaatatgaagcccacactcatttaggattaatatggaagccagcctttaaataagaattttatcttaaaattaatatcactctgtcatcttaagaagatgtgaggcctgtgagagcaggtactgtgtattttgtgtctgtattctttctgtttcacactgcaaccataatcgatgatgaataaataatgttccctcttgaagatctggtccctgtctccagggcagtgctatgtaaaaaaaaaagagcaaattcctgccttctaaacactcctccacaccaacaaacacactgtgctaggaaagcagcagtgatgaaggtgctgggcctccggtggaaaggtaacacacatttcccatcctcgggagcttgcagcaccggcaggcgggccgttacacagataacacagtatgcttctatgccagggtggacccaggagtccgtcctccctgtcacttacgagactggagtcctggaaaagttactgaacttctctgtgccttggtttatccatcatgaaagtcgggttaaaaagaataccccacccctagggtggaagtgggacttgcttgaattgaaacagttggtttttaagtattttgcatagctgttattattaaattaacatcaaaaaagttgcctggttattttaatatggtcttcacataggcagtacagccggccagatttagcatttgcatttataactgagtctctcttctgcctccgtgagacttcccaggagttgctttgatgctgcagggagtcacacatctccagatgcatcactggtgactcagcaagcacctgacctggtccgttacacatggggcttatgtgcttaactcctatgcgatgatgattcttctctagttcttgggggtcgttccctttctcctactgtactggctgtttaaagtcagcactgtatgagttgcatacataagccaaatgtcattgacttcttctttttttttttttttttgacagtcttactctgttgcccaggctggagtgcagtggtgtcatctcggttcattgtaacctctgcctcctgggttcaagcaattctcgtgcttcagtctccagagtagctgggattacaggcatgagccaacgtgcccagctaatttttttttttttgtatttttagtagagacaggattttgccacgttggccaggctggtctcaaactcctggtctcaagtgatcaacccaccttggcctctcaaagtgctggcattacaggcatgagcccttgagcccagcatagatgtcattgaaattcaagggggaaatcatttggaatgatcacagcgactggtccagagatgactaacagcttaaaatgaccccacctgaaacagcggcgatcagtggaatgtccaagtatatatatatatatttttttaatgaagctcttttggaccagaaaccctaagaatgtttagtctggagttccataattataaaaaaaatcttctgaagttaatcaccgtttttatctgaaaccatactctaactcagtaactctttctcagggtttactttctcttgagccacaagcatccatttgtcccctaccaaagggactagactttcatgatggataaaaggacactagtgccaggtagcttctgcttctaaattttggtttaaaaaatgaaacatctccttttagatattctaaaaagtcatctcccctaaaatcatgaagcctggtttataaactttatagaagaaactaggtctttgaggctaacacatattagtgtattaaaaaatacggtaaaccagccgggcacagtggctcacgcctgaaatcccagcactttgggaggccaaggcaggtggatcacttgaggtcaggagtttgagacaaggctgaccaacatggtgaaaccccgtctctactaaaaatacaaaaattagccaggcttggtggcatgctcctgtaatcccagctactcgggaggctgaggcacgagaaaggcttaaaccgggaggcagaggttgcagtgagcagagctcccatcactacactccaggttggtcaacagagcaggactctgtctcaggaaaaaaaaaaaaaaaaaaggtaaacaaacattgccttaaacaaaaattgtatcttataagattttacaagttgcacattatcaacacattctagttaaatgcttaaaaattacttcacaattaaccctatggatttttaaaagaaggaaagcttagacacaaactcaggagccagattgttttccaacccttgggcctgccacttactaagtgtaccagcctccctcggagtcactctattcctcgtggaatctgaatagtaagtgtacacttgacagaacatacggagtggtaatgtgaaacaaaaatatagaatatttaaaggacttacctaacagtaagaaaaaaaataagttcacttaaaagtgtttttattttcttatttgcaaaacaccccttattgtggtaaggtctaacaatatactatacatgtaaaagttttacagaaaattactgtagctttcgataatttaatatataactgaaatacttgagatggcataattcgattttatgtcagtaatatcgagtgagactaatcaagatagcaagattatgttgcaaaattaaaatgaggaaattgagaggatttctcaggcttctgtgagtcactgcctgggctgtattaatagtttcattgtgctaggtgcagtggctcatgcctgtaatcccagcactttgggaggccaaggcgggcgaatcacctgaggtcaggagttcaagaccagcctggccaacgtggtgaaaccccgtttctactaaaaatacaaaaattagctgggcatggtggcaggcgcctgtaatcccagctactcgggaggctgaggcagaagaatcgcttgaacccgggaggcggaggttgcagtgagccgagattgcaccattgcactccagcctgggtgactataacgaaacttcgtctcaaaaacaaaacaaaacaaagcgaaaaaacaaaaaaagtttcattgtttcacctccacacagctctgtctgcattttgagcaatggccaccagagggcaggaagaaccaatctataaagcacacaagggtttcaccaactttgaagtcctccgttagaaggcaagttgtccactaatatgtaggaacgattaatggccaccagagggcaggaagaaccaatctataaagcgcacaagggtttcaccaactttgaagtcctccgttagaaggcaagttgtccactaatatgtaggaacgattaatggccaccagagggcaggaagaaccaatctataaagcgcacaagggtttcaccaactttgaagtcctccgttagaaggcaagttgtccactaatatgtaggaacgattaatggccaccagagggcaggaagaaccaatctataaagcgcacaagggtttcaccaactttgaagtcctccgttagaaggcaagttgtccactaatatgtaggaacgattaatggccaccagagggcaggaagaaccaatctataaagcgcacaagggtttcaccaactttgaagtcctccgttagaaggcaagttgtccactaatatgtaggaacgattaatggccaccagagggcaggaagaaccaatctataaagcgcacaagggtttcaccaactttgaagtcctaacttagaaggcaagttgtccactaacatgtaggaactatttttaattataccattattttccctcaattttatttataaattaatgaattcacaaaatatttccaaagctcaagtgaagtacatcctaatcaacttgatttacaatttgtgatttttctctgaatcaatctataaataatcaataagaagataattatttagaaaatgaggctccgaaaaatatgttggctttacattttttgcctgtgcaagtaaatataaaaatgtcttttctcacatttcttccatttataaaccgtttttaaaaatcataaattaagacatgtgtgttttaaaagtctcacaacatgcagcattttaaaaattgtcttatgctttactgctccctcccgtaggtaatcactgttacatttctcatttactgcaaaattctctgtgcatatggagcacatagatggatagatagatggggtgtgtgtgtgtatatgaatgtgtatgtgtctttggggtgagtgtgtctatgtgggtgtatgtatgtgtgtctatttgtgtttatttgtgtctctgtgtatgtgtatgcatattacatatgtgtatgcacgtgtgtgtatacagtatatgtgtgtgtgtctgtgtacttgtgtctgtgtatttgtgtgtctgtgagtacatctttgtgtgtatgtctatgtgcccatgtctgtgtatttgtatgtatgtatgtgtgtatttacatatgtgtatgtttgtatatgtatgcatatgtgtatatgtgtgtgtatgtatatacagtatattaagtgtttgaatgtatgtatcatatttatcaaattccacgttgtattaattgttctcacactgctataaatgactacctgacactgggtcatttatgaagaaaagaggtttaattgactcacagttctgcatgggtggggaggcctcaggaaacttacaaccttggcagaaggcaaaggggaagccagcacatcttaacatggccgatcaggagagagagagagggaagcgggtactgtcacacacttttaaaccatcagatctcatgagaactcactatcacgagaacagcaagggggaatctgcccccatgatgcaatcaccttccacctggtccctcccccaacactgggaattacaagtcaacatgagatttgggtggggacataaagccaaaccatatcacacgtcttgctttttcactgaatgtgggaccttggacactttccctatcagcatgtgtggctgcaccacatggatttcagtagtggcagaatattcccttctatagattccacaattcatccaatcagtctttattcttccaatttaaggcaaaacaaattccaatgtaaaagcttaaggccaggcgcagtggcttacacctgtaatcccaacacttcgggaggccaaggtgggcggatcacgaggtcaggagatcgagaccatcctggctaacatggtgaaactccatctctactaaaaatacaaaaaattagctgggcgtggtggcaggcgcctgtagtcccggctactggggaggctgaggcaggagaaaggcgtgaacccggcaagcagagcttgcagtgagccaagattgtgccactgcactccagcctgggcgacagagcaagagtccgtctcaaacaaaacaaaacaaaacaaaaaaacaacttaaattaatattaaaaatagttgttgtttccttccagtggacttaattccaaccaggctggtgaagaagccagttggatagccagtccctgctgaaggtggatggcccctgctcttgtctcccggttatcaggctctcgctgcttttgggccagaggaacagggcgtcctccttgaggctgcgagtcgtccctctgagtgcctctcaccaagggatgaagcagcagccatttggccagagagcagtcactcacccatccttgggtccaggagaggcattgcaggctttaccctcagatctttctttccaaagctccttctcttcaccctgtatccagggcacttggcctgaagagcctttgtcttctggaagcttctgctgccttccctgcccagatccctcagacaaggagctgtaaggcccaactccaggaggaaataaaggaagagggaagaaggagaagcagagagaggagagatgcataaattaatacctccagaagcagccttgctacagacacatcatttgttcctatttttttctctgtgtcacacagtgctataatgcagaggaactgctgcttcgaagggtacgtgcctgcacagtctgagattggcaagttgctatcccctgtgtgtccccatcgagggggacaagaccctttccttccacattctcatgtgtacacgacggggctttaacatttactcatatatataccatcttcttgtcatctagagtttcaattctttcattataaagaatgtggtaattgttcatttgtttacatctttatcatttatattattctcctaaattcttgcccaagacatttgaagcaccctaaaacaagaaggcatatctgggtagttcaaactaagattttatgaaaagatgcaaatcatttacagaaaggacaaatatattctagacatctgagattgaattgttgtaaatttgactatgagctataaaagctgacatataatatcaacaatattattatctaatattatctaatattagatatcatcccataaatgaatgctttcatattattctaaacaaaaaatttagaataaaaacctacaggaaattatcttatagttctaaaatatgggctacctttccaacttaaaaaaaaaaagcacagtggtagtaaagagaagtagagaggaaatggggagttttccatactgaagaatatctgcaatgaagacctgggtacatttttttaaattacaaaactaaaaaaataaaggcatctaatatataattcagtgtgggaaaataaaaacaaattgctagtttaacttaccaatactgtgagcaatttaaaattgttagattccaccaaataattgttaaatgagataagccaggtaaatgtcctagcacaatacctgaagtacggtattctcaataaatttcagttattgtcatttcagtagttacaattattttcaaaagttgtttaatctttttttctttcaatccatgttaattctaactgactcagcttaaaaggaaactacttcaagattgaatttgaactagaaatgggatccccttgtagtgatgtttgagagagcagggattactctccttaaggcttctatttaactaaaattttattggaactggataacatgtggaggtcggtcataatcaatcactgatagacataaatctgcaaagaattcacttgagggggagatgagtgtcttccaccccattcaaggttgccattttccacaaagttcaggcagtggagtgaaatgccacaataatactctattaaatcaacacattggtaatgtgatggcaacacctgtagccatttcagatacaggcagaagctcgcagttattaaagccacatggagagggtacagcaggaaatgaagaaagagggaagaaggagaagcagagagaggagagatgcataatttaatacctccagaagcaaccttgctacagaccatcgtctgtttctattttttttctctgtgtcacacagtgctataatgcagaggaaccactgctttgaagggtatatgcctgcacagtctgagattgacaagtcgctgtcccccgtgtgtccccatcgatgagaaccacatttatggttcttgtggttgcttggacagtctttattttcatcatgagacaaagataaggcagacatttctggtgaaagtctaacagttaagttgtggtaaaagataggatagttggcgttgggcaacttcagtgaaaaagagctccttataatatcataatcttgtcctcagaaactcgtggactattatttgtggctgccttttcatcctttactttagcaacttaccggttgctttctgtgtatgtggggccagtttatgtgagatttgaagaagggattttcctttattgggaatgtctaatgagcacttacaagcagaatttcctcccgatttttttcctctgcactctgaatactggaaagtgttttgagggccttctgacagtacaccacagtgatttttttttctgtcgtaatccatttatgactaaaaaacatgatgctttttgtttttgagatagagtctcgctctgtcacccagggcagagtgcagtggcacagtcttggctcactgcaacctctgcctcccaggttcaagcgattctcctgcctcagcctcctgagtagctgagattacaggcatgcgccaccacgcctggctaatttttgtatttttagtagagacaaggtttcaccatgttggttaggctggtctcgaactcctgaccttgtgatccacccgcctcagccttccaaagtgctgggattacaggcatgagccaacgcatctggccacatgatgctttttttttggttgctcacatgacaagctattatttttgtgtcactttaaacagaacttaaggtatagacttcatgcattccttcttgagccctcttccattacagcagttaaattttgtccagattctgtaaactagtattgctgcctgagtggccgtggtatttcctttgagctgaacttggccattttagcttcttattagacaaaacagtatacttggagtcctggtgaataaccagacaaatggaatttcttgtccacaaagctctagcacagtggttcggcgcagaggcccatgcttccctacttgatcttgtcgtcactggctcagccaaatgctatttctcaaagttcataaatctcacatcctctttgtggagtctttcccctttttgtacatgtataatccccggcctctaagtagtctattcacttctaaagctgttgacttggcaagataacaactgcatcattcacacaagcaaatctgctcttggaggacaaaaagaggtttattttggcttagatgactccgattggccatctccattgaaaccttggcagaagataggtcccttggctactggggagaaaagtcaagtaaacctttagtgccaggaatggtgtttgtaaagattcggcatgaagtggtacatttcgtccttgggcttcttactggcttcaacccaaacagaatcacttagtgctgttccccgggttaatgatgttattagaacaattgactcaaagcaagaactgaaaggctgagtgctttgttgtgaggtgtgcaaaaattcaagtctatcaaaacaggcttagcagagctgccaccagcaggacagcgtttagcttttgtttgctgcttctttgattcttcatgggcagctggcatttctgttgctggtttctactctctcatccctagtggaccctacgttttctcccctgagtgtgcttatctgtccagctgcaaaaaaaaaaaacaaaaggtgtgctgttgtttctgcacttctccctgtcctcatctctcaacatcatatgtgtgcagagaaatcacacttgttgctctgttgtctcaaaaggtctagccctgagtttgctgaggtgatgatgaaggttgtgtgaagctgtgtcaaacactgagaaacatacacacaggctgtagcagatgtgtgttattccctcaatgcatgcaccagtgatggggatttagaatgagccactgtgcaaagatgccccagagagactattccctatacattattattcagtgtaagatacccaataaagcaactagataaagaaatgcctatatctaaacctaaaatattcactcactcccagcgttaacttccctcatccttaagaacaggctatccatggagctaccaaaatgcacttttaaaaagtgtgttcatgctgcacttcatattcatgctcccttttcccttgacaatgtgttatatgttgagaatctttaaataaaactgctcaaccaccaaaaaattatttctccccatttctattcatcagtacttcttatcttgaaggctgatttcaataatcatttatccctcacaacttcatacaatttcttccttttagagtcccactgaatatcatttatatttatcccacgctatttttttattctagtttatattattacttgtgaactttcctaatctcgtctcccaaacacacaaaccctttagctacttccatgggaggctatcttatctattactctccacacccccagccacgggatatgcaggagacactaatggatctagtatatcacacaggaagcagatcaccaggacgacaattacaatcagcaaatcccagtatccactaaagacagtgacaagggtaaaaagacaatagctgagagcgaggtaataagtgttcatgaagaatttcttaagcctcagcatcttagcagctatagcagaatgccataacaaagacaaaagtattttgagtgtgaagttataccatgacatacaaatgcatctgtcaatgaggccgttagaaatcttccagaccaaaggtcccaaacacccaccataaccttctgattcaatagggcacatatggggaaactgtactgttaaaaagcacttctaccaagaaaaggcaaaaaatgtcccctcaccactccttctcaacactgtactggacatcctaactaatataataagacaaaaaaggaactaaaaggtatacaggctgggtgcagtggctcacgcctgtaatcccagcactttgggaggccaaggagggtggatcatgaggtcaggagtttgagaccaccctgaccaacaagatgaaaccccatctctactaaaaacataaaaattagccaggcatagtgatgcatgcctgtaatcccagctactcatgaggctgaggcaggagaatcgctagaacccaggaggcagaggttgctgtgagccgagatcccgccactgcactccagcctgggtgacagagtgagactctgtctaaaaaaaaaaaaaaaaaaaaaaaaaaagatatacagtttgggaagaaaaaaattaaactgtctttgttcacaggtgacattatttgctatcttaatttaatttccaaagaattgatgaaaagcttctgaaactactaagcaattatagcaaggttgcagaagacaagattaatatacaaaaatcaactattttcctatataccagaattcaacaagtggtatttgaaattaaaagcacagtaccatttacattagcacccccgaaaatgaaatacttatgtataaatctaacaaaatacatatgagtcctatataggaaaactacaaaactctgatgaaagatgtaaaaataaataaataaatcgagtgatattccatgttcatgaatacaaggactcaatattgtcaagacatcagctctccccaaactgatctaaacattcagtgtaatctcatcaaaatcttactaaattattttgtggataaactgaatccatagttcatatgaagaagcaaaagacacagaatagataactcaatattgaaggaaaagaacaaagttagaggactcacactacctgacctcaagacttacaataaatctactgcagtaatcaagacagtgtggtatttatgaaacaggcaaatggatcaatggaacaaaatagcacagaaatagatcaccacaaatataataagctgatgtttgacaaaggagcaaaggcaatacactggagaactttcagtcttttcaacaaatgatgttggacatccacatgcaaaaaaataaatccagacacagatctcacactcttcattaaaattaactcaaagtggatcgaaggcctaaatgtaaaacacaacactatgaaacttctagaaaataagagaaaatctagatgatcttgggtttagtgattttttttatttttattttttatattgattactgtgttccaggatattctaatttactaatttttattttaatttttttctgtctagtctctgattttttaattttaatttttatttcaattgttttggggcgacaagtagtgtttggttgcatggaaaagttatttagtggtgatttctgatattctggtgcacccatcaccagagtagtgtacattgtgcccaatgtgtagtcttttatctctcactcccctcccagccttccccctgagtccccgaagtccattatataattcttatgtctttgcaatgacttttaaaatacaacatcaaagggatgagccatgaaagaaataattgataagctcacttcgttaaaataaaaatttttttattttgctaaagacaatgtcaaggaaatgaaaagacaagttacagacagactgggagaaaatatttacaaagacacatctaataaaggactcttatccaaaatacacaaagaactcttaaaatccaacaataagaaaatgaatgacccaaataaaaaatgggcaaaagacctgaaaacacaccttatcaaagatatacagatagcaaagaagcagagtaaaagatgctcaacgtcatagacttatggaatttctgttaaaacaatgaaatagcatgatacacgattgcagtgcagtagagcttcccccaggaatactgttcccagacttgtgcagggctggttccctcactctttgcctttctgtttgcagcataaatgccacttcattgaggtgttgaggattccctcactctgtcccttccgcctctcaccacaagcacctgctttattttactatagcacctgctctttttttttctcatgcatttgcttttatgctctgtccattcattcctacagatggtgagctcctgagggcaaggcccatgcaggtcattttcagcactgcaccctggcctaacttgccccgtgcacaggtgagtgctccaggcacagtttctgaatgaataaatgagagtatcgaagatcccccttcccacctgtgaggagctcacattgaggagatggatgctcacaggagatgcaagttgggtgggaggcagggggacacccagagtgaccctgggagtttctctggctgcagccgccccattgagcagaatgggcagcgcctcccctgatggccagcactgaagacccaggcaaggaacctagaaacaaagccctcatctgggtgtgggtgtcctcaaggcagtaggactcccagggctgaggggggcaatgaagggggagctgtaagctccaggagagataagaggggcgtcggaaggctcccttgacccctctttccctccactggccctgggggagcccagtccactcataaggggggtgtccagtccaccccatccacttccaaacgggggcccgaggctgcaagcaaggacgctcccctctacatgcagggctcggcctcccctgcaccacccaggacccccgctgtcctgcaagccccagccgctctgggccaggacccagggagtggaaggcattttccaagggcacagtggctccctgacggggaaccaaggccaggcacgcttctcccagactgggggcctcggggcacctgagaatggccatccttggtacaagagagcggggacccactcccgcgcaccctgtgccccaggggacgcaggactctgcaccctgaccctagagcttgccctaggatggcccggccatggcgaggccctggaacggtgaagactctctgcccatcaacctagcacctctgccctaccctcagtcgcatatgcacccggtgcgagggagaaggcaaccaggaggtcacacctaaggtgggggcgtgagcggcaatgccagccgattgtaaaaccttccctgctcctgcgtggctctgcaagccaatcgaaaattccgtcgtctatgccgccagccaatcaggatgtccagagcgcggtgcttccagccatttgggactccagctggctctgcgcctccagccaatcggggtgcccgtccttaatacaaccagccagtcagtgcccggcgcgcgacaccagcagccagtcaggaagccctgcgttcatgcttccagccattgtcggagtgtcagccgtcacaaggcacttccagccagtcgcaacggcgggtcgccagcgccgcagtagctcgcgcggtgcctgtcggtagtcgcgtgcggggcggcggggcggcggggcggccggcggcggccatgggagatatcccagccgtgggcctcagctcctggaaggtgacgcggtcgcgggcagggaggcgcgcctgacctaggggagcgcgggacttgggggcgcccgatgggacccaggccggggctggggagaagtgcggcggcctcccctccgcctggccgacgcccgggaaaggcgctgctgaggtggccgcccaccgcccacaagcagcccggcccggcctttcctaaaacggagtcggtgctgcccgccgaggcgctctctgggagaagcgggaacctcggcagccaagcctcagactctggggctgcggccgcggcgttgggcggggctgctctgtggagaggcggagcccttgaagttactcagaactggagcggggatgccgaggggaggccttggcggcgctggactcggccggaacagggaacctcgaagcctcctctccagcaaagagagaaagaaaagttggggccgggcgtggggtgcgggcttgtaatcccagcactttgggaggccgaggcagtaggatcgcctgagctcaggagttcaagaccagccaggtcaacatggcgaaaccctgtttctacaaaaaatgaacaaatcagctgggcttgggggtgcgcgcctgtggtcccagctactcaggaggctgaggtgggaggatcactggagaccaggaagtcgatgctgcagtgagctttgatggcgccactgcactccagccttggggacagagccagaccttgctggaaaaaaaaaaaaaaaaaagaaaaaaggaaaattggaattgctgattaggctttaaaagaaactttgggatctcatgttgttccctgtttagaagcaacctgccctgatgcctgagacatataatcgctctgtgcatttatggggtgcagcgtaatgttttgagccgtgtatacaattgcaatgtggttaaatcaagctaattaacatatctatcacctctctcagttattattgtttgtggtaagatgtttgaaatgtcttgttattttgaaatacacatgtgtagtaaattattgttgactgttggcatcctagtgcgcagtaagtcttaaaagctgtgtctcctgtgtgtttgaaactttgtaccctttgatcagcaactccccattccctccttcctcacctcccccagcccccagcgtcttataaccaccattctattctacgacctttctctgctttgaacttcacaattcctgccagtgatttgagacagcactgactaaaaagcgtttaaaatttgatctttaaaaaaaaaaagctaaacttagttgttgataaaagctataagaagtcatataggaagttagttactgaaggagtcagaatgttcaaggcctgctcatgaaaatattatttaaattatttctcttacctgcttaccaactcttagaggctaggagtgtcgttttgttcatattggttctcagcatctagtgaaggacgtgcatctgtcagcccttcattcagtaagcactcgatggattaaactgttgagtctcttgcttccctttatttctgcaacaatttggtgcaggagtccagactttcgtgcacacaggataaggaaaaattagtgaaaactgtgcttaacaggtcaaaatattctatttatttttcttggactgcaggtgcatcaaattggattaatcataatcactcatcactggtctatgcaaaggcttatttttactcgtctatttttaatagtgaataaacatcacagacctatccgttatctgttgccccagaaatgctgcatcaatggccaaacaccagacctcagtggtgtacagcagcaagtgtattcctcccacacgggaggtcaggagagcagctctgtggaccttggctgggctcagttgggatggttggggctactccacttggctccgcacatctcctgtcctcgtgcggttagttagggagtgttctcaagatgatggctgaagcacaagagagcaaggggagcggtgagatgtctggagacctcagcctgggctcttcattattaggggccacttgatccatctgtgtgcctgatcggtgctgtcttaattactacagttccttgataagcgcccatacctagtagggcaggtcacctctccctgctgttgtagatttacagtgtacaatttgatgagttttgacagatgcatgtacctgggtcctggctttttattttggcaccttactctccactgtaagttttagaactagcttagaaggttccatgagaaactttattggggttttgattggaactacattaaatctgtagaccagcttggagataattgacacctttgtaatgttaaatcttaacttttctacaagcatggtattcttctctgttaataaattgtcctgaatatggttcatttctaacatcttttcatatggttgtatagtttttcctgaagagaatatatgtcttttgttggaattattattgggttcttgatagtgtgttatactactggaaattatatttctctgaagttacattttctacttgtttcacctgctatattcattacacttccagccactttactaaactgtactgttatttctgttaatttgtgttacatttgtttggattttctacacaaatgatcatatcatcagcaaataatggtagtttactttcctttttttccactctttaagcttaaaattgcttcttcttagttgttcaggtgcttctggaaagcacctccagcacagtggccattcttgttttgtacctgattttaaaggatgtaagatggatattttttaatattgatactctttatcagattaattcttttccccgacttactgggagtttagattttgaatctaaactggtattgaatcttaacaaatattgattgagttgacttttgtttttgtactttaatctgttaatattgatgaattacagattttctaatatcaaaccatccttagatatctgagatacactcaacatgggtgtggtatattatcttttcataaatattgttgcatccaatttgcttttattttacttatgaattttgcaacggtattcatgaataagatgaatgtgtgacttttaatatttttgtctgattttgattcagggttatgctagttttgtagaatgagttgagataagtccgtctttttctgttgtttgaaagtctgtgttaaactgagatgatttttttcttgaaaattttatgaaactggtggttttctcttttttttgaattccttgcattctttaataattatgtaactattcaagctttattcttgggttaaatttttctaggaattttcccattttatctcatttttccaagttattgacatatagttattggtaatattttcttttaagtccattttatctgcatgttttactgtccattcgtgtcagttttttaaaaagttggcctcttcatcaacctagccagaagtctgtttattttactgaagtttttcaaagaactgacttctggttttgttgatcttctctgttacatctttgttttctattttattgatgttattcttaatcatatttttatctttccatccaatttcttgggttctttttctaacttaagatggatacttggttcattagctttcaaccactctgaatctgttgcctataaaatgaagataattatgctgctctaactcctagggttaccgtgaagctccagtgagaaagtggtttgtgaactataaagcccttgtcagtcttcagtttaatgagactgcaaacccgcccacccccatagtcttccctagttctagtcccttcccttgcctgagcttcatttagagtgactgttctcttttctgaactaccttattgcttgtagcattatacattcatttaggttttgttatatacttctttttgtatggataccttcgtgtgagtctacacctcagcctttattattggacgctgtggtatctgagtatacaggataaatcttaagcctctttgcatctcagttattattcattctgtacttttttattgctttgatcattcaggaagcataccatctagctcagttttctgcagacactaaaaataacctatagtttttttttcccaaaatatgtaaaggagttggaacttagattattcataaattccttcataactgatattgcctgtttttagactgattatactagtaccaaattagtgacttaattttttatgtattatgttgtccacatgcttgggtgaaaggggagatttgtgttggattcctctgactgtgagaagacactttgttttgttggttttgcaggcttctccagggaaagtgaccgaggcagtgaaagaggccattgacgcagggtaccggcacttcgactgtgcttacttttaccacaatgagagggaggttggagcagggatccgttgcaagatcaaggaaggcgctgtaagacgggaggatctgttcattgccactaaggtagggcttctctatgcaaggctggcagagcttgggtaatgctacatctctggagggctttctactttctttatgggagttgatgactttgtttcatactcaaatcggaataaacaagaatattcacagcttcatgagcatgctgaattatattgtgtgcaggtttgtttcatattatttacttggtcattcaggtaggagtacacagatatcccccaattaacaatacattatcaaaattcagttagtgatgggcactttgactacagtggtgaataggacaaagtcctagccctcatgaagtctgtttacacagcgattcctaaattcagaatcactggggtgattgttaaatgcagattccaaattctaccccacatctgttgaaggagaaactctgggtgtggaggaagcagcttgagcacaggcataaggcaggaagcagcacggcaggtgcaggggtttgtaggaagcttggtgtattagtctgttctcatgctgctgtacgaacatacctgagactgggtagtttataaagaaaaagaggtttaattgactcacagtttcacatagctggggaggcctcacaatcatggcaaaaggcgaaggaggaacaaaggcacgtcttacatggtagcagacaagagaaagtgtacaggggaactgccgtttataaaaccatcagttgtcacgagacttattcactatcaccagaacagcataggaaaaacttgcccccatgattcagttacctcccactgggtccctcccatgacacgtagggattatgggagctacaattcaagatgagatttggctgtggacacaaccaaaccaaatcacttggtctctctggaccacacaatgtcaggttgcaggagtaatgagaagtgaggctgagtggtggataggctaagccatggaagttcagctgtgccctgtcaggagctgtgcttttacctagagacagaggagccctgtttcatttttaaatagggcagcttgtatcatatgtgagtgcaacttgtgttgtatataggatattttagtaggtgaaagaagcttgcatttgaggcagaggcaggaggccaggtaggagacattaacagcagtgcaggtggaagatgatgaaggcctgcactggcacagtgggtgagggagggagaagaggaaatggatgtggagggtattgggagtcaggacctgtggaagatgcagagtggactacgatagtggagaattcaagaattcctttgcttttgatttggaagcagaatgtaagaccatgagatcaggagtcatgggttcatggtctagctgccattcaggagctgtgagtattagggattagatggctcaggctcacagcttcattatttgtaaaatgagactttggatttgagaatttcctgagtaacttcccagctaaagtttcatacctcaagattcaatgttgtttctatagttgaattgccttctgttttactttatggaagttaatgttcttcaggcaccattgctatctgcactagagcagagggtggtaagagagcagccttggtgtgtgcttggccaagcggggagaatgtcttctgaatagtccaggtagggatgtgagcaactggagatttctaaggctcaccctgcaatttggagcaagttgcttctgtgtggatcgtagtcagcagtggaaatatgttcattattttggaaatttggaaaagtcatagaaatgtaattagaaataaataaatcacacatataagcaccacatggagacaactgtgattaacaatggaatacatttacttccagcattcatttttttatttttgtgaagatactgtgctcgtttgttttcatttatttgattcccctttcttttactttcttttactttactttcttttactttactttcatgtttttcccttgctgtgatggagccttcaggttagcttatgtcacagtcaataaaagtaaaatgaggggaaaaacacaagtttttctacataatgagagtgtggaaggagatagctaaaagaagtaaggcagtgtgagctaactcacctataggctaacccacatggttacagtgccttaggaacagagaactcttaatacggagtctgtgtaagtgagaaacacaagatagagattcttctgatttttcgtcatatcttttctgcctgcaggaatttcattttcgtttttgtttttggtcccaatgaatccaaataaccatcaaatatctcttggattcctgagcttcccttgaggaggagtcaggcagaaggatcccagctttggagcctctccctgcaggtgtcctggaactcttctgaggataatgtccctgtcctcccatcagaacttgccgtgttgtatttgtggtcatctcatcttggctattttgggttcaagacagtagctttgtggggctacagaatgggtgccatgctggctctgggtgggcacgtgtgacgctggtcccctctcctttgtagctgtggtgcacctgccataagaagtccttggtggaaacagcatgcagaaagagtctcaaggccttgaagctgaactatttggacctctacctcatacactggcccatgggtttcaaggtaccgttcagtaggtagttcgttctgcagtttgcaggaccttcctccccgtgctcacaccctgtcttgcggtggggagagcatggaccagcattcagggcaggggttcccaggctgcatctgccacatgctagctgcggcatttgggcagtcctcttgatatctctgggcctcagttaaggagaggcttggcttgacctctgaggcccccacaggtctgtctttcaagccagtcgctttttttccaagccaagagagcagtagatttttttcccttaggtttttaggtgaaagcagtgatcagatgaggaaatactgctgctcagagaaagttcccagtgaattcctaggccttgtctcttcttgcaggttctgttctctttggggagtaaatgctgttttgcaatatgggagatatttgcttgttcacctgcagcagggtccagtgggttgtgctggtagttgacttttccacttggttttattctcttaattgcttcacagtgtgtctggagcatgcatctgagccatggctctgtcactaagctaccccagtctggccgtgcaacttccctactctaggcaacctgcttctgcctcacacgggtcctggccaggatgtccctgcatatttgccctgggctgtgatgacagcctgcctgggcaagggcctgatcacacagttgacacctgtgaaatacagaagcccttgcagggatgttcttcctacaatggaatgggtgactgctgctcagcagtcttctacataccaacctgtgagaaggtccctttatgtgtgccacactgttggttactgttttagagtaaaataacaaaaaacacttcattcctagcacagctttacttaactaaggctttgtatctagtttccataaacgatgtgggcagctgtccgttagtgacactgactaagaggggaagatacccagagggcaaaaccagagtgatgtctgtgccttgaaattcattgcatgcagaaaatcataattaaaacaatggctacagctgtattacactcattgccagccagcattgttgtaattatgtacccagaactatgttaggtactttacacatattaactcatttaattctcatgacagttctacaaagttgacactattaacatccctcttggagagatgatgaaactaagatacagaaagtttaaggtttaagttagattattggagcccagaagcatatgctcaggtcagacatttgttacactttccttgccctcatcctttagcagattcctgtctttggatttctgggtcgtagaaaaggaaaaggtctcagatcatccaacaaattacagaagagaataatgcagcatcgtcagcatgtcttctggccagtaggaactgctaggccttgtgtgatgctggacaattagatcagggtccgagtatgagtcccgggctgcaattttgtggaggcttggataaatggcaacatgggatgtggctttaaagtgagactgttagttacttcagctcatcatggaaaatgcctctttcatgtgtatcaggctggaacatgtgacattcttccactgttgtttaggagtgtgattaggtgtcattaaataaacatgcctatgccattcacccttaacatgctacgtgggagtacatgagggaggtagctggattgcacgtcagtgcttctctgaaagatgactttaggttcttgccctttcaagatgtatctctctgccctctacctcctgtgtacctttgtattctcacttccttacctgtcatcatgatggggattctaagaaagaagacaagaccctaacagtggagttaggagagggttgattgggctctataagacatgaagaaaatgcactcctcacccattctttacccgaaattagtaaactattttctggaggcaatgggagaggacaaccttgcatcagtaaggatacagggtcttcctttcccatcttgtgagagatgaacagtgaacatcaggctggcagaggctttgccagccatccagtccaccagccattcatcttttcttagaaaggtgaagactgggcctggtcacatggccaggctggggttgcttagtgacagggctgtggcttggatgcaggtctcctgacacatggttttttttgttttgttttgttttgttttcacacatctcaactctccttcttcgcagcctcctcatccagaatggatcatgagctgcagtgaactttccttctgcctctcacatcctcgagtgcaggacttgcctctggacgagagcaacatggttattcccagtgacacggacttcctggacacgtgggaggtgagctgagccacaccaccaggcagcctcatcctgtgtgggtctccacccaggatgcagtgagccctgagctgcttgtgttcaaagacatcaaggttgtctacctgagatgtggggtttgtggagcaaaaaaggaatcaatacccgaagaactcagagacctcagtgactttcttgttacctttggtttggtatggtgcagttctcttgacacatttgaggggtagctcattatagacctcactttttttctcaaatatttatttatttttttattaaaaaccatatttatttcagaaaatacaggagagttcttctgcattaaactaacattaaaaattttattttcctggcacccagcagtaaccactgttaatgttttatagttcctttttctctcaagcatttcagaatgataaagttggcagcatggaagctcaggctggggaggtgagaccagtgtcggggaaggttaccaagtgtcagcccatttccagggttcagaccaaaaacagccctttactgcaggggcttgcagtaaagacttgagcaggaaattaagggggtggtggatttgagaggttcctggaagttgacccacaggctggggtgggtctcaggcttgggctccagcatggctgaccgagcacgtgtggtcttacagtcttgctaaccatcatgtgggatgggacatcacatttgaggcccaagaagaaagtaagcttaagcttaagcttgctgaggttaggacagagcttgctgggtgaagctctccagggaggaggccagagggaaccctcggacagggaggagtcccaggctaggctccccccatcaatagaagacaaagactgacctaaggtatctgagatgtcaggaccagggcccatgggcctcaactctttctgtcacaatgttttaggtcctaaaagatttgggttaaactctagggtgctcatgtagcaccagcgaggttccggtgattgttgcagagttgaggcagtaactaactgctgcgtgttggcccattggtcactcaggacttgctgctgactacggaccctggcacgaagctatgctcttcctgaagctcaggggcagcctggcttgctggtcagtgaccagctcagagctttaggttgctctgccctaaagtgtcttaaaatagtaagtggagaaggtgggataggagaatggtgatgtatccgtgtgcttaagaaggtcagtgtctcagtggaaagaaaggtgaacaaataaaatccgcagcagacatgcttgccagacatcaggaggaataggaacaagaagagctcacatgtgtcgagtactggacgccagccttagctgacacttcctgtgattccacataacccctaaacatccccgtggcacaggccatgtagacctgtcctgaagctgagaaaattggggccaagtgaggccatgcaacttgcccagcatcctctagccagaaaagatgggactgaaatcagaccttgagtgcagaaatgcttttgaagcttcaagtaaaatattgtaaaaatattgggtccaaccagttttagaataccatacagaactgctgagggacgtagattgtcagtgcagtagacagaagcttcacacccagcagagtcgttctcttataggccatggaggacctggtgatcaccgggctggtgaagaacatcggggtgtcaaacttcaaccatgaacagcttgagaggcttttgaataagcctgggttgaggttcaagccactaaccaaccaggt

SEQ ID NO: 10625 - DNA, 754 bp, Homo sapiens
cccacagtgaactgtgctctatttactgtacttcccacagttcagtgtccaaactgagcactgttgccgtgaagatgtcagggtgaacgaggagccctgtgatctcctgaggttcaagagagacttcagaagatggtgagctcctgagggcaaggcccatgcaggtcattttcagcactgcaccctggcctaacttgccccgtgcacaggcttctccagggaaagtgaccgaggcagtgaaagaggccattgacgcagggtaccggcacttcgactgtgcttacttttaccacaatgagagggaggttggagcagggatccgttgcaagatcaaggaaggcgctgtaagacgggaggatctgttcattgccactaagctgtggtgcacctgccataagaagtccttggtggaaacagcatgcagaaagagtctcaaggccttgaagctgaactatttggacctctacctcatacactggcccatgggtttcaagcctcctcatccagaatggatcatgagctgcagtgaactttccttctgcctctcacatcctcgagtgcaggacttgcctctggacgagagcaacatggttattcccagtgacacggacttcctggacacgtgggaggccatggaggacctggtgatcaccgggctggtgaagaacatcggggtgtcaaacttcaaccatgaacagcttgagaggcttttgaataagcctgggttgaggttcaagccactaaccaaccaggt

SEQ ID NO: 10626 - DNA, 14973 bp, Homo sapiens
acgcggtctgtgggagaccggagcgggagacagcggtgacaggagcagcggccgggagcccttagggaggcaggtgagcgggggctggatgcggggagatagcgggcctggagggcggctccagggcgaggcggggactgtggcaccaagagtcctgcgtccccagattgtgctgtgcgcctgaagccctggcggtgcagccgtgcacggagtcccgtggagcgtttgtttgggctggattatcccgctgcagccgaggttgggggcccgggttcggggctccgcacctcttctctggggttcaccctctcggataccgcctgggcagactccatcgatgcagaacccgaggtgcgggtggtggttggtgggggggtagggaggtgaaaacaataacagccgttttgtactaagcgttgcgtgcattgaccattcatttattttatttatttatttatttttgagacggagtttcgctcttgttgcccaggctggagtgcaatggcgcgatctcagctcactgcaacctccgcctcccgggttcaagcgattctcctgcctcagcctgccaactagctgggattacaggcgtgtgccaccacgcctgctaatttttgtatttttagtagagatggggtttctccctgttggtcaggctagtctcgaactcccgagctcaggtgattcgcccacctcggcctcccaaagtgctgggattacaggcgtgagccaccacgcccggcctgacccattcatttcttacaacaacccattgaggtcggttctagtccccatttactaaacgaagaaactgaggtcacacaactagaaagctacagaactaggatttgtacccacatctatcagactccagagcccacatacttaaccatcctgctaccaacagcagccaggcccagagtctggctcacccaaagctctccacaagcccaacctgctgggaaacagatttgatatctatccttaaagtatggaggtgtcatggtgggcactgaggactgggctgctggagaccttcccccagatctgccgctgacccactgcgtgatcctgggcctgtgtctacccctctctgagcccagtttcacccttgtttcagtgatacaatcagcaaactttaagaagactcttagccaagatattctaggattctgggaatggcagcttctcctacgtctaaatggctaaccccagaggcgatcaggctcttcaaagccccagggcaaggctggggtctcattcttctctttaatccctgtgtctagcacttcagcaggcccatagtagatattcaagaaatgtgggttggctgaataaacacttcatctcttttcagaactgcatgacagctgctctcctgggcctttgtggggctttggatttctcagttctggccaccttctatctagctggctctcctgactgcctcctccctggccagtggcagagcctgccagggctggcagcaggtcctaagcctctgtgcgaagacccacagcctctggaatcctcagcatagtacaacttgcaggggtggggggtggcacatgaagctcatagcccctcctggtagcagtgctcagggcccaacttcagttactcccagtttggggatgttgccttccatgggaggagatactttcatattaaatctgaaacacttcttatccttcactgtcccctcttccatgaaaccacccttgactcagagacacagtccctctgacagcacctggtccacccctctactctggcagcccggtggtgattattttgtttttcctccaccacataacctgctggaaggcagggactccacttcagaaatcttggaaaaccctgtggcccacaagggtttgagctcatattcccatctggtgaggtgcagaaggcacagagctgtgccaggacatctcgttccaacccagccccactcctaatagtaataaaagtagctacatgtttactgtgcagctacttggtgccagacacctaccttatccctatcaataatctccacagccttgcaagttagagatatcatgcctattttgtagattatgaaatgaacactgaaaggtcaattactttgcccaaaattacacagcagagcatagaccaaacctgggactgtctgaccctgaaacatggatctttctgcaccgccctatactctgcgtcccagcaaagctaacctgtctgatgtggttgggcagaggtgctggacctcctggcggctcgctcctgtcttcagtgtggtaatgtcacaggcatttaaattgtggtttgcaagctcgcttgatttgggagaagtgccctcccagtctgtgaaattctcccaaactctaagggcctttttgcaaagcaaaacccaccctgcatttggctctgccaatatgtgattcagggggtgttttcccactcacagaatggagtgggaaactccacttattaagtacctcttacaatggaatgactctatggtgtaggtatcagggcactgaaatagaagccaggagctgcagggtcagtttatagctctgtatgtcactcactgtgatctccaaaagtcccgttgcctctttataccccattttccacattaaagtgtaagggattaaacaggattggcaattttcaagcttttaatattttcagcactgacagccgtttctcaaatcaaatctgtctctgaatcttaaaattcaaaaacagatcaaagtggactgctgtagtgagactgttccctttactctaaccctgccccggtctcaggctcctaggcagtcctgccccagggtttctgctaagcaggagccagttgttccctcagcctcctaaaagcgatggggagttgaggccagtggaatgcagctttggattcagaagccagaaaacaacagagattgtttgtgggaagtgagtcagagagattagacctctcttcaacatctgactagactctagaatggcattaagcaagtcactgaaccgctcagagcctctgtttccttatcactaaaagttaggacaattcttgcaatgaaatgagatactactaccaagtacttcagtgctgtgcccagcacagaacgaatacactcagtatgtttttcttttgtttcttctgtctctccagcacccaaagcagaaacagtatgggcagagagacgcctactgaatcaggtgtttatcagtattatgaaatacagtatataaaacccagcatttggagtccagaacaaattcaaattctggctcagtcactaagtagctatgtggtcttgggcaactggcttacattttggtaattctctcaatatgcaaaaatattctctcggccaggtgcggtggctcacgcctgtaatcccagcactttgggaggcagaggcgggcggatcacttgaagtcaggagtttgagaccagcctggccaacatggcgaaaccctgtctctactaaaaatacaaaaattagccaagcatggtcatgcatgcctgtagtcccatctatttgggaggctgaggcaggagaatcacttgaacccaggaggtggaggttgcagtgagccgagatcgaaccactgcactccagcttgggtgacagagccagactctgtctcaaaaaaaaaaaaaaaaaaaaaagaaaaggaaaaaaaactcctggcagacatgagagcaaaatcgagtacgaaatgggcagctgggacctcatatctactgaataattgtctgtttggaggttgagacatgactggggaggcctggcctgcccctgtgttaggtgatggggctggcccacccaggggtgtggcagcagggctggcccctgtgtgacttgtgataaccccaccctaccaaggaggaagactggataaaatgggcccctgagatggctgaaggcagctaaaggggcctaagagactatggggagaagggcagccagttcctaggcagccctgccccactgtttctgataagcaggaggcagttgttccctcagcctcctgaaagcaatgaggagttgaggccacgggaatgcagctttggattccagaagccaaggacctgttacaaaggtggttttctgggaagcaaattagagggattagacctggcttcgacatctgacttgactccaacctaccaaaggatctcccagttcacctgggagttaacacaccagggttctagtccttttgctcgctgtgtggctttgggtaagtccttgcccctctctggaccttgaggtcccattcatacaaaaagcagttggactcaggcctgccagcccccatttttgtggctcttccccgcccctccccatcctttggctatgggatagtctcccaggcacctccaaaaggaagtgtctaaaacagagctctccacctcctctccaagcccagctccccactgccctcttcctgccctgtccctgtctccgctgccctttagatcaggcaggcaggcaggcctagagcatccgccctgagacactgcctgttggctgccttaagacgccccttccttctctgcccgcagcctccccagcctctgcattcctctgcttcctgtctgctctgctcagcctgcaggattgatcttcccaaagccaggtgtcaaccaggccactaaccctacccactgctcagaaatcttcccacagcctcagcctggccccctcttatccatcccctccatacacacttgcctcagctcctcaaaacagtccacagccatcctccttccccacctttgcccctttcttcccttcctaaggaaatattggcccccttctctccaccaggctgaacccactcatcctgcaaaaccaagttcaacgccctgtcattttcttttttttttttttttttgagatggagtctcacactgtcgcccaggctagagtgcaatgggtgcactctcggctcactgcaacctctgcctcctaggttcaatcgattcttctgcctcagcctccagaggaactctgactacaggtgcacaccaccacacccagctaatttttgtatttttatttttatttctatttatttatttattgtgagatggagtttctctcttgttgcccatgctggagtgcaatggcacgatctcggctcattgcaacctccgcctcccaagttcaaaggattctcctatctcagcttctgaagtagctgggattacaggcatgtgccaccacacccggctaatttttttttatttttagtagagatggggtttcaccatgttggtcaggctggtctcaaactcctgacctcaagtgatccacccacctcggcctcccaaagtgctgggattacaggcgtgagccaccgtgcctggcctaatttttgtatttttagtagagacggagtttcaccacattggccagcctggtctcaaactccagacctcaagtgatccacccgcctcagcctcccaaagtgctggggttacaggtgtgagccactacgcctggcgcctgtcttcttctaatatgcctcttctgacctcctcactcccattggagccatggctcacttctggtcaggctccatgcactcaatcagccctgcctgccaggactgtagtgcccacttgatgagaaatcacctgtgaaaatgccaggcatggtctggcacacagtaggtgctcaagaaacaaatgttaatgccccagcttccttctgtcttgtgtccactaatttggcatttggagcatatttttgtacttcacgtaattaaatatttactgtgtgccaaggtcagtgtgtgacagagcactgtaggggaggcaaaaatgaaccaactctggaccttgccctgcagaagctctgtctactggcatgaggtaagacaggtccacagataacttacataagagagactgcaatctggacaagacagcctcagtgggagagggaaggagaaccctgtagatttgggtgcggggaggctgtggggagagcacagcctttcaggtaaagggacaaggttaggaaagcaagaaggtgtagcttgtgctcgtggagcccaggaaactccttgggctagaaaagatttggtggcactctatacagtgtatgtgtctgtctgtctatctaacatgaatggtactattttctcctattggtgtgcattgtacctaacaaaaaatccatgtcccaagtacttttctcttttctttctttctttttttttttggaatgaagtcttgctctgtcgcccaggctggagtgaagtggcgctatctcggcttactgcaacctcctcctcctggattcaagcagttctcctgcctcagcctccccagtagctgggattacaggcacgcaccaccacgcccagctaattttttttgtatttttagtagaggtggggtttaactgtgttggccaggctggtctcgaactcctgacctcaagtgatctgcccatctcagcctcccaaagtgctgagattataggtgtgagccgccatgcccggccaacagtacttttctctagaggtagaattgcaggggatttttctctttttgcttatctgcacttttctaaaagttctgccatgaacacgggcattttttgtggaataaacaaagtttaaatgttggctagatcagtgcttctttatgcataaggaaggattagttcttttttttctatttccaatttattgattctttgataaaatgcaatgcaataaaattattatttttttttagagacgtctccctctctcacccaggctggagtgcagtggtgcaatcatagcttactgcaaccttgaactcctgggctcaagcgatcctcttgctttagcctcctgagtagctgggactacaggtgtggaccaccacacctggctgatttttaaactttttgtagatacagggtctcgccatgttgcccaggctggtctcgaactcttgggctcaagccatcctgccacctcagcctcccaaagtgccgggattacaggcgtgagccaccatgcccagctagaaaattacttttttggctaggcaccgtggctcacgcctgtaatcccggcactttgggaggctgaggcaggcagattgcttgagcccaggagttcgagaccatcctgggaagcatggcaagacctccatctctacaaaaaattcgaaaattagctggatgttgtggtgcacacctgcagtcccagctacttgggaggctgagttgggagaaacagttgagcccgggaggtcaaggctgcagtgagtcgagattgcaccactgcactccagcctgggcgacagagaccctgtgtgaaaaaaaaaaaaagaagagaattttttttaaacagtcattgcttgctcagatgtttactttaaaagataataatgaacaagaagcagtcacataaaatacaagcccaaattttatatcattagattctgattgtcatgaaagtttctaaagacttactttcatttctcaacttaccttgttgaccagcagggattggtgaaccatgctgtgagtagcattgggctagagagaggggaggcaggaatctagaagagctgttttccagatgtgaccatctcctgaggacagggaccatgtctcatgtgccacccatcaccccccacagacagagcctgcagccaatgccccaggagccctcggttccaaccaactgatgcccctgtgcccactggcccacgccatgcagccccagtccgttctgcacagcggctacttccacccactacttcgggcctggcagacagccaccaccaccctcaatgcctccaacctcatctaccccatctttgtcacgtgagtctccaagaatgggccaggcctctgctctgctggttggggttggggttggggagggagtgttgactggagcgggcatcagtatggctgggggtggcaaagtgagctgtcagcttgaaattcaaggcactggaagcaggctacttggattaaggacaggaatcttaggaacaaaacaaactttgaaagaactcattcatcccatttggaaaattagaagaataacccttgcctgccatcctgagctcttgcagtaagacagaagctgagaaggtgctctgtacattgtaaagtgctatgtacctgtaagagatggcagtcattgaggctgggcacggtggctcacgcctgtaatcccagcactttgggaggctgaggcaggcggatcacgaggtcaggagatcgagaccatcctggctaatatggtgaaaccctgtctctactaaaaacacaaagaaattagccaggcgtggtggcgggtgcctgtagtcccagctacttgggaggctgaggcaggagaatggcgtgaacccgggaggcggagcttgcagtgagccgagattgcaccacttcactccagcctgggcgacggagccagactccatctcaaaaaaaaaaaaaaaaaaaagagatggcaatcgtgattgttaataataatgcagacatttactgagtacttactatctaccaggtactatgctaagcacctacacacattatctcattcaattctgagagcatttgtatgaagaaggagtagctatcctctagaacatcagctccatgagggcagggatgtttgtctattttgttcactgttgtatcatcagggcctagaacagtacttggcacataataagtactcaataaatatttgttgaatgaatgaattaaccacgcatgatatagatgaaggcctaaggctcaaagagatgatagaacttggccacggtcacccaggcagtaagtggctgggatagaaagcaaggacctgccaaattcagagtccaagttcttaaccacttaattccttcctgtaattaccgttcttttagtacagttgctagtgttgtcactgttattcttgttgttcctattattatttcaggccctgggcttggccaggcagggaagccagacactggatcccatcctcctcccaccatctccacttccatatttctttcctgcttcccaaccatccctctcagtcgcccccgcaccactggcccttcccacagctaccaatccatatcccacccccgctcttgcagggatgttcctgatgacatacagcctatcaccagcctcccaggagtggccaggtaggagacgtggagttggggggccagcgggtggtggagggagagattccacaggtggaagtgctgggaggcagaagcagacctaggaagtagaagatgcggacagacagacattagctcagtagaggaaagggtttccccggggccagagctgttccacagtggaaggggcagccccataaagtaaagagctacccatcacccgagacgtcgtggcagaggctgttgcagaagggagctgaactgcagatgggagttcaaaaagagggcctcgaaggagccttccacagccgaattccggagctctgctactcagggcctcagtcttccctcctatttagtggatgcatccctgccccttctgtcctgggggcttgagccctcctggtgccatatgcagcttggtttctaacagaggcacacagtgtggtggggtccggaggaccgttgcctgggacctgccttccttcaacccctctacccacacccacacaggtatggtgtgaagcggctggaagagatgctgaggcccttggtggaagagggcctacgctgtgtcttgatctttggcgtccccagcagagttcccaaggtgaagaatcaaaggaagggctaagaagggaggttgcgctcacgcccgtaatcccagcactttgggaggccaaagtgggtggatcacttgagcccaggattttgagaccagcctggacaacatggcaaaacccatctctacaaaaaatacaaaagttagctgggtgtgggggtatgtgcctgtagtcccagctactcgggaggtggagaggtgggaggattgcttgagcccagaaagtcgaggctgcagtgagccaaaatcgcgccagtgcactctagcctgggtgacagagcaagaccctgtctccaatacaaacagaaaaaggaagggaggttgggcaaaggtggactgagggtccacactgactgcaccctcactcccacattgtgctggccctggggccacaggtgaatggacgtggtctttgcccttaagtcagcacccatgtagggtcagtcctctgtgcttccttatccaggggctgtgatgatgaaggaaggagaaggccagggctatgctctgtgatggctgtcatcctgccttccaaagctacatgtaatagacacactgctttgtccctcccctgcccctaggacgagcggggttccgcagctgactccgaggagtccccagctattgaggcaatccatctgttgaggaagaccttccccaacctcctggtggcctgtgatgtctgcctgtgtccctacacctcccatggtcactgcggtgagttccctccctcccaccagccctgctgccacccacactcctactgcccacttctcaacagggtggggacaggccagggcccaaggtgctccccaaaacccagtcatctgtcctgaagggctcctgagtgaaaacggagcattccgggctgaggagagccgccagcggctggctgaggtggcattggcgtatgccaaggcaggtgagtgaaccaccagcagggatgggcacctctgggtcaggaggtggcagagtggctaggagggccccagagttctgaaggccaccctctgccccccaggatgtcaggtggtagccccgtcggacatgatggatggacgcgtggaagccatcaaagaggccctgatggcacatggacttggcaacagggtaagggcagggaatgcagcacagggctggcaggagatagtctgcaccagccctgcccccgtgtctgctaagaatcacagaactgccgggcgtgttggctcacacctgtagtcccagcactttgggaggctgaggcaggtagatcacttgaggtcaggggttcaagaccagcctggccaacatggtgaaaccccatctctactaaaaacacaaaaattagctgggcgtggtggcaggcgcctgtaatcccagctactggggaggctgaggcaggagaatcgcttgaacccacgaggcagtgagctgagatcatgccactgcacttcagcctggatgacagagctagactccatctcaaaaaaaaaaagaatcacagaactgaagacagtgctggatgaggctttggggaaccatttaaacctctgggcctctgcagggaaatcaagcccagcactccaacaggaccagaacacaggcagtctccttcccagcctaggttctttctctccctgccacatcaccctgggatacctggcaagggccgaataagccaagacctccattgtctccccataggtatcggtgatgagctacagtgccaaatttgcttcctgtttctatggccctttccggtgagcaggggtgggcaggggtctgctgtgaatccctggccctttggcccaaagctggagcccaccctgatgactctgctttgcagggatgcagctaagtcaagcccagcttttggggaccgccgctgctaccagctgccccctggagcacgaggcctggctctccgagctgtggtgagtgactaggacttgagccccaccctcagccccctcctaggcaccacccacattataccctcatcccttaggaccgggatgtacgggaaggagctgacatgctcatggtgaagccgggaatgccctacctggacatcgtgcgggaggtaaaggacaaggtgagcacaggtacgaggcaaagggggctcagggggctgggacagagttttccacagactctggaatctcagagttggaagcagtttgcccttaagcatgcatcctctcctccccttccctgcccaggaaccatcgtggccttctatgtcggggcttgcacgagcctcaaacagccctgctttaacagttcaagagtgggccaggctgccagccgcagtaacccaggacacggggctcaagatggtcacagattgagcaggggggaagggacgcttccagagccacatccaccctccatttcagcctgtctccctgtctgcttccctgcagcaccctgacctccctctcgccgtgtaccacgtctctggagagtttgccatgctgtggcatggagcccaggccggggcatttgatctcaaggctgccgtactggaggccatgactgccttccgcagagcaggtaggcaggcaagggtggggtgttttgacctgcgccacagggactgataagcactctgcctagattggggaacgacgtcctgagagcttgggatcttattccgggaattactagtgatctaaacagacacacactgaggaagagatatggaactgcagcatagaacacggcccggtgaagcaagcagagcccttcatttttggttgtgagaacgtgggcaagccacttctctgaacctcagtgtcctcacccataactggataactggggataagatacctggtgcgtggttgtcctgaggattaaatgaagtaatatcactccataaaggggactcattttgttagaattgcacaccagcatgggaaggaacttgcctcttacctatttccttcactgtgcattttattctttggtaaactgaggccccaaaagaggaaatgacttgcccaagaaatagagtttcccaaagctgggctccgtctcatgtggtgtgcccacaggctgtgcttcttcatggtagccttcttccccgcctggccttcccatcgcagaaggtgtgctcagagctgatcagcgtccccccagcaactttctgcatctctcccaacacaggtgctgacatcatcatcacctactacacaccgcagctgctgcagtggctgaaggaggaatgatggagacagtgccaggcccaagaactagaactttaaaacgttcccggggcctcagacaagtgaaaaccaaagtaaatgctgcttttagaactgtgccctcatgccctcttcctgctcacatgctagcggggcccagcagccctgggtggttttgccagcatgctaactcttgtaactcgcagctgcatcctatgagctctcccaagcttccccgcccctcccctgggtcagccgtgaggcccacctttgccaccctcagctctttcctctggtgtggcttcagcttgaaagcaacctggagtcgggggcacagcctttggggcctggctgggagagggtcttggagcattaggggaagaagagagcagtgggatcttggggcctgagaagccttggaacgcttctggcagcagagctgggtgtgggaatgaggcctagatcgatatccctgggttagagttgaaatttgccgcaattccactggaaggcatttcccacgaggccagaggttgccaggctgcctgaggtctcctattctactctgaaccataaacccagagaagaattactcattaaccagcataaatactgcctgaggatcaaaactcagaggcaaagagggagttcctgactgctagaggtgccaccaccacaaacactttttattcaggagatactttttgagaatctctgctctgttcctaggttcagtgctgggtcctgggaatacagcaggacagacctcagcttatctcttcatagaaattatacaaagagaattggggagacagctaagaagaaaacaaagaaataaagcagttacaaattgtgataagtgctttgaaggaaagaaggggtctgagacaacaacagggaaggggcctctcttgaaacagtagttgggaaggaggcagacatgcaccagtgatgtggtgacaggtgctctgaaggaggtcaccaggacctgacctctttgaaggatcagaaaatacttccctgaaggactgacatttgagcctagacctgaagggtgagccatcaagctaagacaattggggaagagcattccagggagagggaggagttgtgcaaaggccctggggctccttctagctggaggaatgcaaggctagcttgtctggagcactgagaggatggcctgaactgagtggagagagacagaccaggaccaaaccatgcagaggtcaagggccacattcaccttttcagagtgactcaatcaaatttgtagtttgtaaaagtattttaacagctctgcggcaaagtgcaaatgaaaagtcttgatggcatggactggagcggggacagtggggatggagaaaggggaatggattgtggatgtgtttagaaggtagattcgatgtgaaggatgaatctggcttgaccttctgggtggctgatgggccatttactgagatggggcagcctggaagaggaacagaagcagggtcggggtggagggagaatactaaacttagcttgagacattttgcaataaggaagctatatctagagtgcttatgtgactcacctaaggccactcaacaagtttgtggcagaactggattagaactgcacagaaaacagccaagctgggatttgaacccatgtagtccaactccaaggcctctgcccctaaccactgtgccataccacctcccaataatcaacagcaaaattataggtctaacaatgttttatagacacccctccatttatgtgatgggtttgcatcctgataaacccatcataagttgaaaatatgatcataagttgaaaatatgatcataagtcaaaaatgtatttaatatacctaacctaccaaacatcatagcttagcctagcctgccttaaacatgctcagaacacttacattagcctacagtgggcaaaactatccaacacaaaatctatattgtaataaagttgtaaagaattttgaataaaaattcaatatttgaagtaca

SEQ ID NO: 10627 - DNA, 3129 bp, Homo sapiens
acgcggtctgtgggagaccggagcgggagacagcggtgacaggagcagcggccgggagcccttagggaggcagacagagcctgcagccaatgccccaggagccctcggttccaaccaactgatgcccctgtgcccactggcccacgccatgcagccccagtccgttctgcacagcggctacttccacccactacttcgggcctggcagacagccaccaccaccctcaatgcctccaacctcatctaccccatctttgtcacggatgttcctgatgacatacagcctatcaccagcctcccaggagtggccaggtatggtgtgaagcggctggaagagatgctgaggcccttggtggaagagggcctacgctgtgtcttgatctttggcgtccccagcagagttcccaaggacgagcggggttccgcagctgactccgaggagtccccagctattgaggcaatccatctgttgaggaagaccttccccaacctcctggtggcctgtgatgtctgcctgtgtccctacacctcccatggtcactgcgggctcctgagtgaaaacggagcattccgggctgaggagagccgccagcggctggctgaggtggcattggcgtatgccaaggcaggatgtcaggtggtagccccgtcggacatgatggatggacgcgtggaagccatcaaagaggccctgatggcacatggacttggcaacagggtatcggtgatgagctacagtgccaaatttgcttcctgtttctatggccctttccgggatgcagctaagtcaagcccagcttttggggaccgccgctgctaccagctgccccctggagcacgaggcctggctctccgagctgtggaccgggatgtacgggaaggagctgacatgctcatggtgaagccgggaatgccctacctggacatcgtgcgggaggtaaaggacaagcaccctgacctccctctcgccgtgtaccacgtctctggagagtttgccatgctgtggcatggagcccaggccggggcatttgatctcaaggctgccgtactggaggccatgactgccttccgcagagcaggtgctgacatcatcatcacctactacacaccgcagctgctgcagtggctgaaggaggaatgatggagacagtgccaggcccaagaactagaactttaaaacgttcccggggcctcagacaagtgaaaaccaaagtaaatgctgcttttagaactgtgccctcatgccctcttcctgctcacatgctagcggggcccagcagccctgggtggttttgccagcatgctaactcttgtaactcgcagctgcatcctatgagctctcccaagcttccccgcccctcccctgggtcagccgtgaggcccacctttgccaccctcagctctttcctctggtgtggcttcagcttgaaagcaacctggagtcgggggcacagcctttggggcctggctgggagagggtcttggagcattaggggaagaagagagcagtgggatcttggggcctgagaagccttggaacgcttctggcagcagagctgggtgtgggaatgaggcctagatcgatatccctgggttagagttgaaatttgccgcaattccactggaaggcatttcccacgaggccagaggttgccaggctgcctgaggtctcctattctactctgaaccataaacccagagaagaattactcattaaccagcataaatactgcctgaggatcaaaactcagaggcaaagagggagttcctgactgctagaggtgccaccaccacaaacactttttattcaggagatactttttgagaatctctgctctgttcctaggttcagtgctgggtcctgggaatacagcaggacagacctcagcttatctcttcatagaaattatacaaagagaattggggagacagctaagaagaaaacaaagaaataaagcagttacaaattgtgataagtgctttgaaggaaagaaggggtctgagacaacaacagggaaggggcctctcttgaaacagtagttgggaaggaggcagacatgcaccagtgatgtggtgacaggtgctctgaaggaggtcaccaggacctgacctctttgaaggatcagaaaatacttccctgaaggactgacatttgagcctagacctgaagggtgagccatcaagctaagacaattggggaagagcattccagggagagggaggagttgtgcaaaggccctggggctccttctagctggaggaatgcaaggctagcttgtctggagcactgagaggatggcctgaactgagtggagagagacagaccaggaccaaaccatgcagaggtcaagggccacattcaccttttcagagtgactcaatcaaatttgtagtttgtaaaagtattttaacagctctgcggcaaagtgcaaatgaaaagtcttgatggcatggactggagcggggacagtggggatggagaaaggggaatggattgtggatgtgtttagaaggtagattcgatgtgaaggatgaatctggcttgaccttctgggtggctgatgggccatttactgagatggggcagcctggaagaggaacagaagcagggtcggggtggagggagaatactaaacttagcttgagacattttgcaataaggaagctatatctagagtgcttatgtgactcacctaaggccactcaacaagtttgtggcagaactggattagaactgcacagaaaacagccaagctgggatttgaacccatgtagtccaactccaaggcctctgcccctaaccactgtgccataccacctcccaataatcaacagcaaaattataggtctaacaatgttttatagacacccctccatttatgtgatgggtttgcatcctgataaacccatcataagttgaaaatatgatcataagttgaaaatatgatcataagtcaaaaatgtatttaatatacctaacctaccaaacatcatagcttagcctagcctgccttaaacatgctcagaacacttacattagcctacagtgggcaaaactatccaacacaaaatctatattgtaataaagttgtaaagaattttgaataaaaattcaatatttgaagtaca

SEQ ID NO: 10628 - DNA, 3331 bp, Homo sapiens
acctcctctccaagcccagctccccactgccctcttcctgccctgtccctgtctccgctgccctttagatcaggcaggcaggcaggcctagagcatccgccctgagacactgcctgttggctgccttaagacgccccttccttctctgcccgcagcctccccagcctctgcattcctctgcttcctgtctgctctgctcagcctgcaggattgatcttcccaaagccaggtgtcaaccaggccactaaccctacccactgctcagaaatcttcccacagcctcagcctggccccctcttatccatcccctccatacacacttgcctcagctcctcaaaacagtccacagccatcctccttccccacctttgcccctttcttcccttcctaaggaaatattggcccccttctctccaccaggctgaacccactcatcctgcaaaaccaagttcaacgccctgtcattttcttttttttttttttttttgagatggagtctcacactgtcgcccaggctagagtgcaatgggtgcactctcggctcactgcaacctctgcctcctaggttcaatcgattcttctgcctcagcctccagaggaactctgactacaggtgcacaccaccacacccagctaatttttgtatttttatttttatttctatttatttatttattgtgagatggagtttctctcttgttgcccatgctggagtgcaatggcacgatctcggctcattgcaacctccgcctcccaagttcaaaggattctcctatctcagcttctgaagtagctgggattacaggcatgtgccaccacacccggctaatttttttttatttttagtagagatggggtttcaccatgttggtcaggctggtctcaaactcctgacctcaagtgatccacccacctcggcctcccaaagtgctgggattacaggcgtgagccaccgtgcctggcctaatttttgtatttttagtagagacggagtttcaccacattggccagcctggtctcaaactccagacctcaagtgatccacccgcctcagcctcccaaagtgctggggttacaggtgtgagccactacgcctggcgcctgtcttcttctaatatgcctcttctgacctcctcactcccattggagccatggctcacttctggtcaggctccatgcactcaatcagccctgcctgccaggactgtagtgcccacttgatgagaaatcacctgtgaaaatgccaggcatggtctggcacacagtaggtgctcaagaaacaaatgttaatgccccagcttccttctgtcttgtgtccactaatttggcatttggagcatatttttgtacttcacgtaattaaatatttactgtgtgccaaggtcagtgtgtgacagagcactgtaggggaggcaaaaatgaaccaactctggaccttgccctgcagaagctctgtctactggcatgaggtaagacaggtccacagataacttacataagagagactgcaatctggacaagacagcctcagtgggagagggaaggagaaccctgtagatttgggtgcggggaggctgtggggagagcacagcctttcaggtaaagggacaaggttaggaaagcaagaaggtgtagcttgtgctcgtggagcccaggaaactccttgggctagaaaagatttggtggcactctatacagtgtatgtgtctgtctgtctatctaacatgaatggtactattttctcctattggtgtgcattgtacctaacaaaaaatccatgtcccaagtacttttctcttttctttctttctttttttttttggaatgaagtcttgctctgtcgcccaggctggagtgaagtggcgctatctcggcttactgcaacctcctcctcctggattcaagcagttctcctgcctcagcctccccagtagctgggattacaggcacgcaccaccacgcccagctaattttttttgtatttttagtagaggtggggtttaactgtgttggccaggctggtctcgaactcctgacctcaagtgatctgcccatctcagcctcccaaagtgctgagattataggtgtgagccgccatgcccggccaacagtacttttctctagaggtagaattgcaggggatttttctctttttgcttatctgcacttttctaaaagttctgccatgaacacgggcattttttgtggaataaacaaagtttaaatgttggctagatcagtgcttctttatgcataaggaaggattagttcttttttttctatttccaatttattgattctttgataaaatgcaatgcaataaaattattatttttttttagagacgtctccctctctcacccaggctggagtgcagtggtgcaatcatagcttactgcaaccttgaactcctgggctcaagcgatcctcttgctttagcctcctgagtagctgggactacaggtgtggaccaccacacctggctgatttttaaactttttgtagatacagggtctcgccatgttgcccaggctggtctcgaactcttgggctcaagccatcctgccacctcagcctcccaaagtgccgggattacaggcgtgagccaccatgcccagctagaaaattacttttttggctaggcaccgtggctcacgcctgtaatcccggcactttgggaggctgaggcaggcagattgcttgagcccaggagttcgagaccatcctgggaagcatggcaagacctccatctctacaaaaaattcgaaaattagctggatgttgtggtgcacacctgcagtcccagctacttgggaggctgagttgggagaaacagttgagcccgggaggtcaaggctgcagtgagtcgagattgcaccactgcactccagcctgggcgacagagaccctgtgtgaaaaaaaaaaaaagaagagaattttttttaaacagtcattgcttgctcagatgtttactttaaaagataataatgaacaagaagcagtcacataaaatacaagcccaaattttatatcattagattctgattgtcatgaaagtttctaaagacttactttcatttctcaacttaccttgttgaccagcagggattggtgaaccatgctgtgagtagcattgggctagagagaggggaggcaggaatctagaagagctgttttccagatgtgaccatctcctgaggacagggaccatgtctcatgtgccacccatcaccccccacagacagagcctgcagccaatgccccaggagccctcggttccaaccaactgatgcccctgtgcccactggcccacgccatgcagccccagtcc

SEQ ID NO: 10629 - DNA, 703 bp, Homo sapiens
acctcctctccaagcccagctccccactgccctcttcctgccctgtccctgtctccgctgccctttagatcaggcaggcaggcaggcctagagcatccgccctgagacactgcctgttggctgccttaagacgccccttccttctctgcccgcagcctccccagcctctgcattcctctgcttcctgtctgctctgctcagcctgcaggattgatcttcccaaagccaggtgtcaaccaggccactaaccctacccactgctcagaaatcttcccacagcctcagcctggccccctcttatccatcccctccatacacacttgcctcagctcctcaaaacagtccacagccatcctccttccccacctttgcccctttcttcccttcctaaggaaatattggcccccttctctccaccaggctgaacccactcatcctgcaaaaccaagttcaacgccctgtcattttcttttttttttttttttttgagatggagtctcacactgtcgcccaggctagagtgcaatgggtgcactctcggctcactgcaacctctgcctcctaggttcaatcgattcttctgcctcagcctccagaggaactctgactacagacagagcctgcagccaatgccccaggagccctcggttccaaccaactgatgcccctgtgcccactggcccacgccatgcagccccagtcc

SEQ ID NO: 10630 - DNA, 10431 bp, Homo sapiens
gctcttacgcggtctgtgggagaccggagcgggagacagcggtgacaggagcagcggccgggagcccttagggaggcaggtgagcgggggctggatgcggggagatagcgggcctggagggcggctccagggcgaggcggggactgtggcaccaagagtcctgcgtccccagattgtgctgtgcgcctgaagccctggcggtgcagccgtgcacggagtcccgtggagcgtttgtttgggctggattatcccgctgcagccgaggttgggggcccgggttcggggctccgcacctcttctctggggttcaccctctcggataccgcctgggcagactccatcgatgcagaacccgaggtgcgggtggtggttggtgggggggtagggaggtgaaaacaataacagccgttttgtactaagcgttgcgtgcattgaccattcatttattttatttatttatttatttttgagacggagtttcgctcttgttgcccaggctggagtgcaatggcgcgatctcagctcactgcaacctccgcctcccgggttcaagcgattctcctgcctcagcctgccaactagctgggattacaggcgtgtgccaccacgcctgctaatttttgtatttttagtagagatggggtttctccctgttggtcaggctagtctcgaactcccgagctcaggtgattcgcccacctcggcctcccaaagtgctgggattacaggcgtgagccaccacgcccggcctgacccattcatttcttacaacaacccattgaggtcggttctagtccccatttactaaacgaagaaactgaggtcacacaactagaaagctacagaactaggatttgtacccacatctatcagactccagagcccacatacttaaccatcctgctaccaacagcagccaggcccagagtctggctcacccaaagctctccacaagcccaacctgctgggaaacagatttgatatctatccttaaagtatggaggtgtcatggtgggcactgaggactgggctgctggagaccttcccccagatctgccgctgacccactgcgtgatcctgggcctgtgtctacccctctctgagcccagtttcacccttgtttcagtgatacaatcagcaaactttaagaagactcttagccaagatattctaggattctgggaatggcagcttctcctacgtctaaatggctaaccccagaggcgatcaggctcttcaaagccccagggcaaggctggggtctcattcttctctttaatccctgtgtctagcacttcagcaggcccatagtagatattcaagaaatgtgggttggctgaataaacacttcatctcttttcagaactgcatgacagctgctctcctgggcctttgtggggctttggatttctcagttctggccaccttctatctagctggctctcctgactgcctcctccctggccagtggcagagcctgccagggctggcagcaggtcctaagcctctgtgcgaagacccacagcctctggaatcctcagcatagtacaacttgcaggggtggggggtggcacatgaagctcatagcccctcctggtagcagtgctcagggcccaacttcagttactcccagtttggggatgttgccttccatgggaggagatactttcatattaaatctgaaacacttcttatccttcactgtcccctcttccatgaaaccacccttgactcagagacacagtccctctgacagcacctggtccacccctctactctggcagcccggtggtgattattttgtttttcctccaccacataacctgctggaaggcagggactccacttcagaaatcttggaaaaccctgtggcccacaagggtttgagctcatattcccatctggtgaggtgcagaaggcacagagctgtgccaggacatctcgttccaacccagccccactcctaatagtaataaaagtagctacatgtttactgtgcagctacttggtgccagacacctaccttatccctatcaataatctccacagccttgcaagttagagatatcatgcctattttgtagattatgaaatgaacactgaaaggtcaattactttgcccaaaattacacagcagagcatagaccaaacctgggactgtctgaccctgaaacatggatctttctgcaccgccctatactctgcgtcccagcaaagctaacctgtctgatgtggttgggcagaggtgctggacctcctggcggctcgctcctgtcttcagtgtggtaatgtcacaggcatttaaattgtggtttgcaagctcgcttgatttgggagaagtgccctcccagtctgtgaaattctcccaaactctaagggcctttttgcaaagcaaaacccaccctgcatttggctctgccaatatgtgattcagggggtgttttcccactcacagaatggagtgggaaactccacttattaagtacctcttacaatggaatgactctatggtgtaggtatcagggcactgaaatagaagccaggagctgcagggtcagtttatagctctgtatgtcactcactgtgatctccaaaagtcccgttgcctctttataccccattttccacattaaagtgtaagggattaaacaggattggcaattttcaagcttttaatattttcagcactgacagccgtttctcaaatcaaatctgtctctgaatcttaaaattcaaaaacagatcaaagtggactgctgtagtgagactgttccctttactctaaccctgccccggtctcaggctcctaggcagtcctgccccagggtttctgctaagcaggagccagttgttccctcagcctcctaaaagcgatggggagttgaggccagtggaatgcagctttggattcagaagccagaaaacaacagagattgtttgtgggaagtgagtcagagagattagacctctcttcaacatctgactagactctagaatggcattaagcaagtcactgaaccgctcagagcctctgtttccttatcactaaaagttaggacaattcttgcaatgaaatgagatactactaccaagtacttcagtgctgtgcccagcacagaacgaatacactcagtatgtttttcttttgtttcttctgtctctccagcacccaaagcagaaacagtatgggcagagagacgcctactgaatcaggtgtttatcagtattatgaaatacagtatataaaacccagcatttggagtccagaacaaattcaaattctggctcagtcactaagtagctatgtggtcttgggcaactggcttacattttggtaattctctcaatatgcaaaaatattctctcggccaggtgcggtggctcacgcctgtaatcccagcactttgggaggcagaggcgggcggatcacttgaagtcaggagtttgagaccagcctggccaacatggcgaaaccctgtctctactaaaaatacaaaaattagccaagcatggtcatgcatgcctgtagtcccatctatttgggaggctgaggcaggagaatcacttgaacccaggaggtggaggttgcagtgagccgagatcgaaccactgcactccagcttgggtgacagagccagactctgtctcaaaaaaaaaaaaaaaaaaaaaagaaaaggaaaaaaaactcctggcagacatgagagcaaaatcgagtacgaaatgggcagctgggacctcatatctactgaataattgtctgtttggaggttgagacatgactggggaggcctggcctgcccctgtgttaggtgatggggctggcccacccaggggtgtggcagcagggctggcccctgtgtgacttgtgataaccccaccctaccaaggaggaagactggataaaatgggcccctgagatggctgaaggcagctaaaggggcctaagagactatggggagaagggcagccagttcctaggcagccctgccccactgtttctgataagcaggaggcagttgttccctcagcctcctgaaagcaatgaggagttgaggccacgggaatgcagctttggattccagaagccaaggacctgttacaaaggtggttttctgggaagcaaattagagggattagacctggcttcgacatctgacttgactccaacctaccaaaggatctcccagttcacctgggagttaacacaccagggttctagtccttttgctcgctgtgtggctttgggtaagtccttgcccctctctggaccttgaggtcccattcatacaaaaagcagttggactcaggcctgccagcccccatttttgtggctcttccccgcccctccccatcctttggctatgggatagtctcccaggcacctccaaaaggaagtgtctaaaacagagctctccacctcctctccaagcccagctccccactgccctcttcctgccctgtccctgtctccgctgccctttagatcaggcaggcaggcaggcctagagcatccgccctgagacactgcctgttggctgccttaagacgccccttccttctctgcccgcagcctccccagcctctgcattcctctgcttcctgtctgctctgctcagcctgcaggattgatcttcccaaagccaggtgtcaaccaggccactaaccctacccactgctcagaaatcttcccacagcctcagcctggccccctcttatccatcccctccatacacacttgcctcagctcctcaaaacagtccacagccatcctccttccccacctttgcccctttcttcccttcctaaggaaatattggcccccttctctccaccaggctgaacccactcatcctgcaaaaccaagttcaacgccctgtcattttcttttttttttttttttttgagatggagtctcacactgtcgcccaggctagagtgcaatgggtgcactctcggctcactgcaacctctgcctcctaggttcaatcgattcttctgcctcagcctccagaggaactctgactacaggtgcacaccaccacacccagctaatttttgtatttttatttttatttctatttatttatttattgtgagatggagtttctctcttgttgcccatgctggagtgcaatggcacgatctcggctcattgcaacctccgcctcccaagttcaaaggattctcctatctcagcttctgaagtagctgggattacaggcatgtgccaccacacccggctaatttttttttatttttagtagagatggggtttcaccatgttggtcaggctggtctcaaactcctgacctcaagtgatccacccacctcggcctcccaaagtgctgggattacaggcgtgagccaccgtgcctggcctaatttttgtatttttagtagagacggagtttcaccacattggccagcctggtctcaaactccagacctcaagtgatccacccgcctcagcctcccaaagtgctggggttacaggtgtgagccactacgcctggcgcctgtcttcttctaatatgcctcttctgacctcctcactcccattggagccatggctcacttctggtcaggctccatgcactcaatcagccctgcctgccaggactgtagtgcccacttgatgagaaatcacctgtgaaaatgccaggcatggtctggcacacagtaggtgctcaagaaacaaatgttaatgccccagcttccttctgtcttgtgtccactaatttggcatttggagcatatttttgtacttcacgtaattaaatatttactgtgtgccaaggtcagtgtgtgacagagcactgtaggggaggcaaaaatgaaccaactctggaccttgccctgcagaagctctgtctactggcatgaggtaagacaggtccacagataacttacataagagagactgcaatctggacaagacagcctcagtgggagagggaaggagaaccctgtagatttgggtgcggggaggctgtggggagagcacagcctttcaggtaaagggacaaggttaggaaagcaagaaggtgtagcttgtgctcgtggagcccaggaaactccttgggctagaaaagatttggtggcactctatacagtgtatgtgtctgtctgtctatctaacatgaatggtactattttctcctattggtgtgcattgtacctaacaaaaaatccatgtcccaagtacttttctcttttctttctttctttttttttttggaatgaagtcttgctctgtcgcccaggctggagtgaagtggcgctatctcggcttactgcaacctcctcctcctggattcaagcagttctcctgcctcagcctccccagtagctgggattacaggcacgcaccaccacgcccagctaattttttttgtatttttagtagaggtggggtttaactgtgttggccaggctggtctcgaactcctgacctcaagtgatctgcccatctcagcctcccaaagtgctgagattataggtgtgagccgccatgcccggccaacagtacttttctctagaggtagaattgcaggggatttttctctttttgcttatctgcacttttctaaaagttctgccatgaacacgggcattttttgtggaataaacaaagtttaaatgttggctagatcagtgcttctttatgcataaggaaggattagttcttttttttctatttccaatttattgattctttgataaaatgcaatgcaataaaattattatttttttttagagacgtctccctctctcacccaggctggagtgcagtggtgcaatcatagcttactgcaaccttgaactcctgggctcaagcgatcctcttgctttagcctcctgagtagctgggactacaggtgtggaccaccacacctggctgatttttaaactttttgtagatacagggtctcgccatgttgcccaggctggtctcgaactcttgggctcaagccatcctgccacctcagcctcccaaagtgccgggattacaggcgtgagccaccatgcccagctagaaaattacttttttggctaggcaccgtggctcacgcctgtaatcccggcactttgggaggctgaggcaggcagattgcttgagcccaggagttcgagaccatcctgggaagcatggcaagacctccatctctacaaaaaattcgaaaattagctggatgttgtggtgcacacctgcagtcccagctacttgggaggctgagttgggagaaacagttgagcccgggaggtcaaggctgcagtgagtcgagattgcaccactgcactccagcctgggcgacagagaccctgtgtgaaaaaaaaaaaaagaagagaattttttttaaacagtcattgcttgctcagatgtttactttaaaagataataatgaacaagaagcagtcacataaaatacaagcccaaattttatatcattagattctgattgtcatgaaagtttctaaagacttactttcatttctcaacttaccttgttgaccagcagggattggtgaaccatgctgtgagtagcattgggctagagagaggggaggcaggaatctagaagagctgttttccagatgtgaccatctcctgaggacagggaccatgtctcatgtgccacccatcaccccccacagacagagcctgcagccaatgccccaggagccctcggttccaaccaactgatgcccctgtgcccactggcccacgccatgcagccccagtccgttctgcacagcggctacttccacccactacttcgggcctggcagacagccaccaccaccctcaatgcctccaacctcatctaccccatctttgtcacgtgagtctccaagaatgggccaggcctctgctctgctggttggggttggggttggggagggagtgttgactggagcgggcatcagtatggctgggggtggcaaagtgagctgtcagcttgaaattcaaggcactggaagcaggctacttggattaaggacaggaatcttaggaacaaaacaaactttgaaagaactcattcatcccatttggaaaattagaagaataacccttgcctgccatcctgagctcttgcagtaagacagaagctgagaaggtgctctgtacattgtaaagtgctatgtacctgtaagagatggcagtcattgaggctgggcacggtggctcacgcctgtaatcccagcactttgggaggctgaggcaggcggatcacgaggtcaggagatcgagaccatcctggctaatatggtgaaaccctgtctctactaaaaacacaaagaaattagccaggcgtggtggcgggtgcctgtagtcccagctacttgggaggctgaggcaggagaatggcgtgaacccgggaggcggagcttgcagtgagccgagattgcaccacttcactccagcctgggcgacggagccagactccatctcaaaaaaaaaaaaaaaaaaaagagatggcaatcgtgattgttaataataatgcagacatttactgagtacttactatctaccaggtactatgctaagcacctacacacattatctcattcaattctgagagcatttgtatgaagaaggagtagctatcctctagaacatcagctccatgagggcagggatgtttgtctattttgttcactgttgtatcatcagggcctagaacagtacttggcacataataagtactcaataaatatttgttgaatgaatgaattaaccacgcatgatatagatgaaggcctaaggctcaaagagatgatagaacttggccacggtcacccaggcagtaagtggctgggatagaaagcaaggacctgccaaattcagagtccaagttcttaaccacttaattccttcctgtaattaccgttcttttagtacagttgctagtgttgtcactgttattcttgttgttcctattattatttcaggccctgggcttggccaggcagggaagccagacactggatcccatcctcctcccaccatctccacttccatatttctttcctgcttcccaaccatccctctcagtcgcccccgcaccactggcccttcccacagctaccaatccatatcccacccccgctcttgcagggatgttcctgatgacatacagcctatcaccagcctcccaggagtggccaggtaggagacgtggagttggggggccagcgggtggtggagggagagattccacaggtggaagtgctgggaggcagaagcagacctaggaagtagaagatgcggacagacagacattagctcagtagaggaaagggtttccccggggccagagctgttccacagtggaaggggcagccccataaagtaaagagctacccatcacccgagacgtcgtggcagaggctgttgcagaagggagctgaactgcagatgggagttcaaaaagagggcctcgaaggagccttccacagccgaattccggagctctgctactcagggcctcagtcttccctcctatttagtggatgcatccctgccccttctgtcctgggggcttgagccctcctggtgccatatgcagcttggtttctaacagaggcacacagtgtggtggggtccggaggaccgttgcctgggacctgccttccttcaacccctctacccacacccacacaggtatggtgtgaagcggctggaagagatgctgaggcccttggtggaagagggcctacgctgtgtcttgatctttggcgtccccagcagagttcccaaggtgaagaatcaaaggaagggctaagaagggaggttgcgctcacgcccgtaatcccagcactttgggaggccaaagtgggtggatcacttgagcccaggattttgagaccagcctggacaacatggcaaaacccatctctacaaaaaatacaaaagttagctgggtgtgggggtatgtgcctgtagtcccagctactcgggaggtggagaggtgggaggattgcttgagcccagaaagtcgaggctgcagtgagccaaaatcgcgccagtgcactctagcctgggtgacagagcaagaccctgtctccaatacaaacagaaaaaggaagggaggttgggcaaaggtggactgagggtccacactgactgcaccctcactcccacattgtgctggccctggggccacaggtgaatggacgtggtctttgcccttaagtcagcacccatgtagggtcagtcctctgtgcttccttatccaggggctgtgatgatgaaggaaggagaaggccagggctatgctctgtgatggctgtcatcctgccttccaaagctacatgtaatagacacactgctttgtccctcccctgcccctaggacgagcggggttccgcagctgactccgaggagtccccagctattgaggcaatccatctgttgaggaagacctt

SEQ ID NO: 10631 - DNA, 536 bp, Homo sapiens
gctcttacgcggtctgtgggagaccggagcgggagacagcggtgacaggagcagcggccgggagcccttagggaggcagcacccaaagcagaaacagtatgggcagagagacgcctactgaatcagacagagcctgcagccaatgccccaggagccctcggttccaaccaactgatgcccctgtgcccactggcccacgccatgcagccccagtccgttctgcacagcggctacttccacccactacttcgggcctggcagacagccaccaccaccctcaatgcctccaacctcatctaccccatctttgtcacggatgttcctgatgacatacagcctatcaccagcctcccaggagtggccaggtatggtgtgaagcggctggaagagatgctgaggcccttggtggaagagggcctacgctgtgtcttgatctttggcgtccccagcagagttcccaaggacgagcggggttccgcagctgactccgaggagtccccagctattgaggcaatccatctgttgaggaagacctt

SEQ ID NO: 10632 - DNA, 5271 bp, Homo sapiens
aggaagactggataaaatgggcccctgagatggctgaaggcagctaaaggggcctaagagactatggggagaagggcagccagttcctaggcagccctgccccactgtttctgataagcaggaggcagttgttccctcagcctcctgaaagcaatgaggagttgaggccacgggaatgcagctttggattccagaagccaaggacctgttacaaaggtggttttctgggaagcaaattagagggattagacctggcttcgacatctgacttgactccaacctaccaaaggatctcccagttcacctgggagttaacacaccagggttctagtccttttgctcgctgtgtggctttgggtaagtccttgcccctctctggaccttgaggtcccattcatacaaaaagcagttggactcaggcctgccagcccccatttttgtggctcttccccgcccctccccatcctttggctatgggatagtctcccaggcacctccaaaaggaagtgtctaaaacagagctctccacctcctctccaagcccagctccccactgccctcttcctgccctgtccctgtctccgctgccctttagatcaggcaggcaggcaggcctagagcatccgccctgagacactgcctgttggctgccttaagacgccccttccttctctgcccgcagcctccccagcctctgcattcctctgcttcctgtctgctctgctcagcctgcaggattgatcttcccaaagccaggtgtcaaccaggccactaaccctacccactgctcagaaatcttcccacagcctcagcctggccccctcttatccatcccctccatacacacttgcctcagctcctcaaaacagtccacagccatcctccttccccacctttgcccctttcttcccttcctaaggaaatattggcccccttctctccaccaggctgaacccactcatcctgcaaaaccaagttcaacgccctgtcattttcttttttttttttttttttgagatggagtctcacactgtcgcccaggctagagtgcaatgggtgcactctcggctcactgcaacctctgcctcctaggttcaatcgattcttctgcctcagcctccagaggaactctgactacaggtgcacaccaccacacccagctaatttttgtatttttatttttatttctatttatttatttattgtgagatggagtttctctcttgttgcccatgctggagtgcaatggcacgatctcggctcattgcaacctccgcctcccaagttcaaaggattctcctatctcagcttctgaagtagctgggattacaggcatgtgccaccacacccggctaatttttttttatttttagtagagatggggtttcaccatgttggtcaggctggtctcaaactcctgacctcaagtgatccacccacctcggcctcccaaagtgctgggattacaggcgtgagccaccgtgcctggcctaatttttgtatttttagtagagacggagtttcaccacattggccagcctggtctcaaactccagacctcaagtgatccacccgcctcagcctcccaaagtgctggggttacaggtgtgagccactacgcctggcgcctgtcttcttctaatatgcctcttctgacctcctcactcccattggagccatggctcacttctggtcaggctccatgcactcaatcagccctgcctgccaggactgtagtgcccacttgatgagaaatcacctgtgaaaatgccaggcatggtctggcacacagtaggtgctcaagaaacaaatgttaatgccccagcttccttctgtcttgtgtccactaatttggcatttggagcatatttttgtacttcacgtaattaaatatttactgtgtgccaaggtcagtgtgtgacagagcactgtaggggaggcaaaaatgaaccaactctggaccttgccctgcagaagctctgtctactggcatgaggtaagacaggtccacagataacttacataagagagactgcaatctggacaagacagcctcagtgggagagggaaggagaaccctgtagatttgggtgcggggaggctgtggggagagcacagcctttcaggtaaagggacaaggttaggaaagcaagaaggtgtagcttgtgctcgtggagcccaggaaactccttgggctagaaaagatttggtggcactctatacagtgtatgtgtctgtctgtctatctaacatgaatggtactattttctcctattggtgtgcattgtacctaacaaaaaatccatgtcccaagtacttttctcttttctttctttctttttttttttggaatgaagtcttgctctgtcgcccaggctggagtgaagtggcgctatctcggcttactgcaacctcctcctcctggattcaagcagttctcctgcctcagcctccccagtagctgggattacaggcacgcaccaccacgcccagctaattttttttgtatttttagtagaggtggggtttaactgtgttggccaggctggtctcgaactcctgacctcaagtgatctgcccatctcagcctcccaaagtgctgagattataggtgtgagccgccatgcccggccaacagtacttttctctagaggtagaattgcaggggatttttctctttttgcttatctgcacttttctaaaagttctgccatgaacacgggcattttttgtggaataaacaaagtttaaatgttggctagatcagtgcttctttatgcataaggaaggattagttcttttttttctatttccaatttattgattctttgataaaatgcaatgcaataaaattattatttttttttagagacgtctccctctctcacccaggctggagtgcagtggtgcaatcatagcttactgcaaccttgaactcctgggctcaagcgatcctcttgctttagcctcctgagtagctgggactacaggtgtggaccaccacacctggctgatttttaaactttttgtagatacagggtctcgccatgttgcccaggctggtctcgaactcttgggctcaagccatcctgccacctcagcctcccaaagtgccgggattacaggcgtgagccaccatgcccagctagaaaattacttttttggctaggcaccgtggctcacgcctgtaatcccggcactttgggaggctgaggcaggcagattgcttgagcccaggagttcgagaccatcctgggaagcatggcaagacctccatctctacaaaaaattcgaaaattagctggatgttgtggtgcacacctgcagtcccagctacttgggaggctgagttgggagaaacagttgagcccgggaggtcaaggctgcagtgagtcgagattgcaccactgcactccagcctgggcgacagagaccctgtgtgaaaaaaaaaaaaagaagagaattttttttaaacagtcattgcttgctcagatgtttactttaaaagataataatgaacaagaagcagtcacataaaatacaagcccaaattttatatcattagattctgattgtcatgaaagtttctaaagacttactttcatttctcaacttaccttgttgaccagcagggattggtgaaccatgctgtgagtagcattgggctagagagaggggaggcaggaatctagaagagctgttttccagatgtgaccatctcctgaggacagggaccatgtctcatgtgccacccatcaccccccacagacagagcctgcagccaatgccccaggagccctcggttccaaccaactgatgcccctgtgcccactggcccacgccatgcagccccagtccgttctgcacagcggctacttccacccactacttcgggcctggcagacagccaccaccaccctcaatgcctccaacctcatctaccccatctttgtcacgtgagtctccaagaatgggccaggcctctgctctgctggttggggttggggttggggagggagtgttgactggagcgggcatcagtatggctgggggtggcaaagtgagctgtcagcttgaaattcaaggcactggaagcaggctacttggattaaggacaggaatcttaggaacaaaacaaactttgaaagaactcattcatcccatttggaaaattagaagaataacccttgcctgccatcctgagctcttgcagtaagacagaagctgagaaggtgctctgtacattgtaaagtgctatgtacctgtaagagatggcagtcattgaggctgggcacggtggctcacgcctgtaatcccagcactttgggaggctgaggcaggcggatcacgaggtcaggagatcgagaccatcctggctaatatggtgaaaccctgtctctactaaaaacacaaagaaattagccaggcgtggtggcgggtgcctgtagtcccagctacttgggaggctgaggcaggagaatggcgtgaacccgggaggcggagcttgcagtgagccgagattgcaccacttcactccagcctgggcgacggagccagactccatctcaaaaaaaaaaaaaaaaaaaagagatggcaatcgtgattgttaataataatgcagacatttactgagtacttactatctaccaggtactatgctaagcacctacacacattatctcattcaattctgagagcatttgtatgaagaaggagtagctatcctctagaacatcagctccatgagggcagggatgtttgtctattttgttcactgttgtatcatcagggcctagaacagtacttggcacataataagtactcaataaatatttgttgaatgaatgaattaaccacgcatgatatagatgaaggcctaaggctcaaagagatgatagaacttggccacggtcacccaggcagtaagtggctgggatagaaagcaaggacctgccaaattcagagtccaagttcttaaccacttaattccttcctgtaattaccgttcttttagtacagttgctagtgttgtcactgttattcttgttgttcctattattatttcaggccctgggcttggccaggcagggaagccagacactggatcccatcctcctcccaccatctccacttccatatttctttcctgcttcccaaccatccctctcagtcgcccccgcaccactggcccttcccacagctaccaatccatatcccacccccgctcttgcagggatgttcctgatgacatacagcctatcaccagcctcc

SEQ ID NO: 10633 - DNA, 583 bp, Homo sapiens
aggaagactggataaaatgggcccctgagatggctgaaggcagctaaaggggcctaagagactatggggagaagggcagccagttcctaggcagccctgccccactgtttctgataagcaggaggcagttgttccctcagcctcctgaaagcaatgaggagttgaggccacgggaatgcagctttggattccagaagccaaggacctgttacaaaggtggttttctgggaagcaaattagagggattagacctggcttcgacatctgacttgactccaacctaccaaaggatctcccagttcacctgggagttaacacaccagggttctagtccttttgctcgctgtgtggctttggacagagcctgcagccaatgccccaggagccctcggttccaaccaactgatgcccctgtgcccactggcccacgccatgcagccccagtccgttctgcacagcggctacttccacccactacttcgggcctggcagacagccaccaccaccctcaatgcctccaacctcatctaccccatctttgtcacggatgttcctgatgacatacagcctatcaccagcctcc

SEQ ID NO: 10634 - DNA, 10657 bp, Homo sapiens
acgcggtctgtgggagaccggagcgggagacagcggtgacaggagcagcggccgggagcccttagggaggcaggtgagcgggggctggatgcggggagatagcgggcctggagggcggctccagggcgaggcggggactgtggcaccaagagtcctgcgtccccagattgtgctgtgcgcctgaagccctggcggtgcagccgtgcacggagtcccgtggagcgtttgtttgggctggattatcccgctgcagccgaggttgggggcccgggttcggggctccgcacctcttctctggggttcaccctctcggataccgcctgggcagactccatcgatgcagaacccgaggtgcgggtggtggttggtgggggggtagggaggtgaaaacaataacagccgttttgtactaagcgttgcgtgcattgaccattcatttattttatttatttatttatttttgagacggagtttcgctcttgttgcccaggctggagtgcaatggcgcgatctcagctcactgcaacctccgcctcccgggttcaagcgattctcctgcctcagcctgccaactagctgggattacaggcgtgtgccaccacgcctgctaatttttgtatttttagtagagatggggtttctccctgttggtcaggctagtctcgaactcccgagctcaggtgattcgcccacctcggcctcccaaagtgctgggattacaggcgtgagccaccacgcccggcctgacccattcatttcttacaacaacccattgaggtcggttctagtccccatttactaaacgaagaaactgaggtcacacaactagaaagctacagaactaggatttgtacccacatctatcagactccagagcccacatacttaaccatcctgctaccaacagcagccaggcccagagtctggctcacccaaagctctccacaagcccaacctgctgggaaacagatttgatatctatccttaaagtatggaggtgtcatggtgggcactgaggactgggctgctggagaccttcccccagatctgccgctgacccactgcgtgatcctgggcctgtgtctacccctctctgagcccagtttcacccttgtttcagtgatacaatcagcaaactttaagaagactcttagccaagatattctaggattctgggaatggcagcttctcctacgtctaaatggctaaccccagaggcgatcaggctcttcaaagccccagggcaaggctggggtctcattcttctctttaatccctgtgtctagcacttcagcaggcccatagtagatattcaagaaatgtgggttggctgaataaacacttcatctcttttcagaactgcatgacagctgctctcctgggcctttgtggggctttggatttctcagttctggccaccttctatctagctggctctcctgactgcctcctccctggccagtggcagagcctgccagggctggcagcaggtcctaagcctctgtgcgaagacccacagcctctggaatcctcagcatagtacaacttgcaggggtggggggtggcacatgaagctcatagcccctcctggtagcagtgctcagggcccaacttcagttactcccagtttggggatgttgccttccatgggaggagatactttcatattaaatctgaaacacttcttatccttcactgtcccctcttccatgaaaccacccttgactcagagacacagtccctctgacagcacctggtccacccctctactctggcagcccggtggtgattattttgtttttcctccaccacataacctgctggaaggcagggactccacttcagaaatcttggaaaaccctgtggcccacaagggtttgagctcatattcccatctggtgaggtgcagaaggcacagagctgtgccaggacatctcgttccaacccagccccactcctaatagtaataaaagtagctacatgtttactgtgcagctacttggtgccagacacctaccttatccctatcaataatctccacagccttgcaagttagagatatcatgcctattttgtagattatgaaatgaacactgaaaggtcaattactttgcccaaaattacacagcagagcatagaccaaacctgggactgtctgaccctgaaacatggatctttctgcaccgccctatactctgcgtcccagcaaagctaacctgtctgatgtggttgggcagaggtgctggacctcctggcggctcgctcctgtcttcagtgtggtaatgtcacaggcatttaaattgtggtttgcaagctcgcttgatttgggagaagtgccctcccagtctgtgaaattctcccaaactctaagggcctttttgcaaagcaaaacccaccctgcatttggctctgccaatatgtgattcagggggtgttttcccactcacagaatggagtgggaaactccacttattaagtacctcttacaatggaatgactctatggtgtaggtatcagggcactgaaatagaagccaggagctgcagggtcagtttatagctctgtatgtcactcactgtgatctccaaaagtcccgttgcctctttataccccattttccacattaaagtgtaagggattaaacaggattggcaattttcaagcttttaatattttcagcactgacagccgtttctcaaatcaaatctgtctctgaatcttaaaattcaaaaacagatcaaagtggactgctgtagtgagactgttccctttactctaaccctgccccggtctcaggctcctaggcagtcctgccccagggtttctgctaagcaggagccagttgttccctcagcctcctaaaagcgatggggagttgaggccagtggaatgcagctttggattcagaagccagaaaacaacagagattgtttgtgggaagtgagtcagagagattagacctctcttcaacatctgactagactctagaatggcattaagcaagtcactgaaccgctcagagcctctgtttccttatcactaaaagttaggacaattcttgcaatgaaatgagatactactaccaagtacttcagtgctgtgcccagcacagaacgaatacactcagtatgtttttcttttgtttcttctgtctctccagcacccaaagcagaaacagtatgggcagagagacgcctactgaatcaggtgtttatcagtattatgaaatacagtatataaaacccagcatttggagtccagaacaaattcaaattctggctcagtcactaagtagctatgtggtcttgggcaactggcttacattttggtaattctctcaatatgcaaaaatattctctcggccaggtgcggtggctcacgcctgtaatcccagcactttgggaggcagaggcgggcggatcacttgaagtcaggagtttgagaccagcctggccaacatggcgaaaccctgtctctactaaaaatacaaaaattagccaagcatggtcatgcatgcctgtagtcccatctatttgggaggctgaggcaggagaatcacttgaacccaggaggtggaggttgcagtgagccgagatcgaaccactgcactccagcttgggtgacagagccagactctgtctcaaaaaaaaaaaaaaaaaaaaaagaaaaggaaaaaaaactcctggcagacatgagagcaaaatcgagtacgaaatgggcagctgggacctcatatctactgaataattgtctgtttggaggttgagacatgactggggaggcctggcctgcccctgtgttaggtgatggggctggcccacccaggggtgtggcagcagggctggcccctgtgtgacttgtgataaccccaccctaccaaggaggaagactggataaaatgggcccctgagatggctgaaggcagctaaaggggcctaagagactatggggagaagggcagccagttcctaggcagccctgccccactgtttctgataagcaggaggcagttgttccctcagcctcctgaaagcaatgaggagttgaggccacgggaatgcagctttggattccagaagccaaggacctgttacaaaggtggttttctgggaagcaaattagagggattagacctggcttcgacatctgacttgactccaacctaccaaaggatctcccagttcacctgggagttaacacaccagggttctagtccttttgctcgctgtgtggctttgggtaagtccttgcccctctctggaccttgaggtcccattcatacaaaaagcagttggactcaggcctgccagcccccatttttgtggctcttccccgcccctccccatcctttggctatgggatagtctcccaggcacctccaaaaggaagtgtctaaaacagagctctccacctcctctccaagcccagctccccactgccctcttcctgccctgtccctgtctccgctgccctttagatcaggcaggcaggcaggcctagagcatccgccctgagacactgcctgttggctgccttaagacgccccttccttctctgcccgcagcctccccagcctctgcattcctctgcttcctgtctgctctgctcagcctgcaggattgatcttcccaaagccaggtgtcaaccaggccactaaccctacccactgctcagaaatcttcccacagcctcagcctggccccctcttatccatcccctccatacacacttgcctcagctcctcaaaacagtccacagccatcctccttccccacctttgcccctttcttcccttcctaaggaaatattggcccccttctctccaccaggctgaacccactcatcctgcaaaaccaagttcaacgccctgtcattttcttttttttttttttttttgagatggagtctcacactgtcgcccaggctagagtgcaatgggtgcactctcggctcactgcaacctctgcctcctaggttcaatcgattcttctgcctcagcctccagaggaactctgactacaggtgcacaccaccacacccagctaatttttgtatttttatttttatttctatttatttatttattgtgagatggagtttctctcttgttgcccatgctggagtgcaatggcacgatctcggctcattgcaacctccgcctcccaagttcaaaggattctcctatctcagcttctgaagtagctgggattacaggcatgtgccaccacacccggctaatttttttttatttttagtagagatggggtttcaccatgttggtcaggctggtctcaaactcctgacctcaagtgatccacccacctcggcctcccaaagtgctgggattacaggcgtgagccaccgtgcctggcctaatttttgtatttttagtagagacggagtttcaccacattggccagcctggtctcaaactccagacctcaagtgatccacccgcctcagcctcccaaagtgctggggttacaggtgtgagccactacgcctggcgcctgtcttcttctaatatgcctcttctgacctcctcactcccattggagccatggctcacttctggtcaggctccatgcactcaatcagccctgcctgccaggactgtagtgcccacttgatgagaaatcacctgtgaaaatgccaggcatggtctggcacacagtaggtgctcaagaaacaaatgttaatgccccagcttccttctgtcttgtgtccactaatttggcatttggagcatatttttgtacttcacgtaattaaatatttactgtgtgccaaggtcagtgtgtgacagagcactgtaggggaggcaaaaatgaaccaactctggaccttgccctgcagaagctctgtctactggcatgaggtaagacaggtccacagataacttacataagagagactgcaatctggacaagacagcctcagtgggagagggaaggagaaccctgtagatttgggtgcggggaggctgtggggagagcacagcctttcaggtaaagggacaaggttaggaaagcaagaaggtgtagcttgtgctcgtggagcccaggaaactccttgggctagaaaagatttggtggcactctatacagtgtatgtgtctgtctgtctatctaacatgaatggtactattttctcctattggtgtgcattgtacctaacaaaaaatccatgtcccaagtacttttctcttttctttctttctttttttttttggaatgaagtcttgctctgtcgcccaggctggagtgaagtggcgctatctcggcttactgcaacctcctcctcctggattcaagcagttctcctgcctcagcctccccagtagctgggattacaggcacgcaccaccacgcccagctaattttttttgtatttttagtagaggtggggtttaactgtgttggccaggctggtctcgaactcctgacctcaagtgatctgcccatctcagcctcccaaagtgctgagattataggtgtgagccgccatgcccggccaacagtacttttctctagaggtagaattgcaggggatttttctctttttgcttatctgcacttttctaaaagttctgccatgaacacgggcattttttgtggaataaacaaagtttaaatgttggctagatcagtgcttctttatgcataaggaaggattagttcttttttttctatttccaatttattgattctttgataaaatgcaatgcaataaaattattatttttttttagagacgtctccctctctcacccaggctggagtgcagtggtgcaatcatagcttactgcaaccttgaactcctgggctcaagcgatcctcttgctttagcctcctgagtagctgggactacaggtgtggaccaccacacctggctgatttttaaactttttgtagatacagggtctcgccatgttgcccaggctggtctcgaactcttgggctcaagccatcctgccacctcagcctcccaaagtgccgggattacaggcgtgagccaccatgcccagctagaaaattacttttttggctaggcaccgtggctcacgcctgtaatcccggcactttgggaggctgaggcaggcagattgcttgagcccaggagttcgagaccatcctgggaagcatggcaagacctccatctctacaaaaaattcgaaaattagctggatgttgtggtgcacacctgcagtcccagctacttgggaggctgagttgggagaaacagttgagcccgggaggtcaaggctgcagtgagtcgagattgcaccactgcactccagcctgggcgacagagaccctgtgtgaaaaaaaaaaaaagaagagaattttttttaaacagtcattgcttgctcagatgtttactttaaaagataataatgaacaagaagcagtcacataaaatacaagcccaaattttatatcattagattctgattgtcatgaaagtttctaaagacttactttcatttctcaacttaccttgttgaccagcagggattggtgaaccatgctgtgagtagcattgggctagagagaggggaggcaggaatctagaagagctgttttccagatgtgaccatctcctgaggacagggaccatgtctcatgtgccacccatcaccccccacagacagagcctgcagccaatgccccaggagccctcggttccaaccaactgatgcccctgtgcccactggcccacgccatgcagccccagtccgttctgcacagcggctacttccacccactacttcgggcctggcagacagccaccaccaccctcaatgcctccaacctcatctaccccatctttgtcacgtgagtctccaagaatgggccaggcctctgctctgctggttggggttggggttggggagggagtgttgactggagcgggcatcagtatggctgggggtggcaaagtgagctgtcagcttgaaattcaaggcactggaagcaggctacttggattaaggacaggaatcttaggaacaaaacaaactttgaaagaactcattcatcccatttggaaaattagaagaataacccttgcctgccatcctgagctcttgcagtaagacagaagctgagaaggtgctctgtacattgtaaagtgctatgtacctgtaagagatggcagtcattgaggctgggcacggtggctcacgcctgtaatcccagcactttgggaggctgaggcaggcggatcacgaggtcaggagatcgagaccatcctggctaatatggtgaaaccctgtctctactaaaaacacaaagaaattagccaggcgtggtggcgggtgcctgtagtcccagctacttgggaggctgaggcaggagaatggcgtgaacccgggaggcggagcttgcagtgagccgagattgcaccacttcactccagcctgggcgacggagccagactccatctcaaaaaaaaaaaaaaaaaaaagagatggcaatcgtgattgttaataataatgcagacatttactgagtacttactatctaccaggtactatgctaagcacctacacacattatctcattcaattctgagagcatttgtatgaagaaggagtagctatcctctagaacatcagctccatgagggcagggatgtttgtctattttgttcactgttgtatcatcagggcctagaacagtacttggcacataataagtactcaataaatatttgttgaatgaatgaattaaccacgcatgatatagatgaaggcctaaggctcaaagagatgatagaacttggccacggtcacccaggcagtaagtggctgggatagaaagcaaggacctgccaaattcagagtccaagttcttaaccacttaattccttcctgtaattaccgttcttttagtacagttgctagtgttgtcactgttattcttgttgttcctattattatttcaggccctgggcttggccaggcagggaagccagacactggatcccatcctcctcccaccatctccacttccatatttctttcctgcttcccaaccatccctctcagtcgcccccgcaccactggcccttcccacagctaccaatccatatcccacccccgctcttgcagggatgttcctgatgacatacagcctatcaccagcctcccaggagtggccaggtaggagacgtggagttggggggccagcgggtggtggagggagagattccacaggtggaagtgctgggaggcagaagcagacctaggaagtagaagatgcggacagacagacattagctcagtagaggaaagggtttccccggggccagagctgttccacagtggaaggggcagccccataaagtaaagagctacccatcacccgagacgtcgtggcagaggctgttgcagaagggagctgaactgcagatgggagttcaaaaagagggcctcgaaggagccttccacagccgaattccggagctctgctactcagggcctcagtcttccctcctatttagtggatgcatccctgccccttctgtcctgggggcttgagccctcctggtgccatatgcagcttggtttctaacagaggcacacagtgtggtggggtccggaggaccgttgcctgggacctgccttccttcaacccctctacccacacccacacaggtatggtgtgaagcggctggaagagatgctgaggcccttggtggaagagggcctacgctgtgtcttgatctttggcgtccccagcagagttcccaaggtgaagaatcaaaggaagggctaagaagggaggttgcgctcacgcccgtaatcccagcactttgggaggccaaagtgggtggatcacttgagcccaggattttgagaccagcctggacaacatggcaaaacccatctctacaaaaaatacaaaagttagctgggtgtgggggtatgtgcctgtagtcccagctactcgggaggtggagaggtgggaggattgcttgagcccagaaagtcgaggctgcagtgagccaaaatcgcgccagtgcactctagcctgggtgacagagcaagaccctgtctccaatacaaacagaaaaaggaagggaggttgggcaaaggtggactgagggtccacactgactgcaccctcactcccacattgtgctggccctggggccacaggtgaatggacgtggtctttgcccttaagtcagcacccatgtagggtcagtcctctgtgcttccttatccaggggctgtgatgatgaaggaaggagaaggccagggctatgctctgtgatggctgtcatcctgccttccaaagctacatgtaatagacacactgctttgtccctcccctgcccctaggacgagcggggttccgcagctgactccgaggagtccccagctattgaggcaatccatctgttgaggaagaccttccccaacctcctggtggcctgtgatgtctgcctgtgtccctacacctcccatggtcactgcggtgagttccctccctcccaccagccctgctgccacccacactcctactgcccacttctcaacagggtggggacaggccagggcccaaggtgctccccaaaacccagtcatctgtcctgaagggctcctgagtgaaaacggagcattccgggctgaggagagccgccagcg

SEQ ID NO: 10635 - DNA, 563 bp, Homo sapiens
acgcggtctgtgggagaccggagcgggagacagcggtgacaggagcagcggccgggagcccttagggaggcagagcctgcagccaatgccccaggagccctcggttccaaccaactgatgcccctgtgcccactggcccacgccatgcagccccagtccgttctgcacagcggctacttccacccactacttcgggcctggcagacagccaccaccaccctcaatgcctccaacctcatctaccccatctttgtcacgacgagcggggttccgcagctgactccgaggagtccccagctattgaggcaatccatctgttgaggaagaccttccccaacctcctggtggcctgtgatgtctgcctgtgtccctacacctcccatggtcactgcggtgagttccctccctcccaccagccctgctgccacccacactcctactgcccacttctcaacagggtggggacaggccagggcccaaggtgctccccaaaacccagtcatctgtcctgaagggctcctgagtgaaaacggagcattccgggctgaggagagccgccagcg

SEQ ID NO: 10636 - DNA, 11468 bp, Homo sapiens
gagacagcggtgacaggagcagcggccgggagcccttagggaggcaggtgagcgggggctggatgcggggagatagcgggcctggagggcggctccagggcgaggcggggactgtggcaccaagagtcctgcgtccccagattgtgctgtgcgcctgaagccctggcggtgcagccgtgcacggagtcccgtggagcgtttgtttgggctggattatcccgctgcagccgaggttgggggcccgggttcggggctccgcacctcttctctggggttcaccctctcggataccgcctgggcagactccatcgatgcagaacccgaggtgcgggtggtggttggtgggggggtagggaggtgaaaacaataacagccgttttgtactaagcgttgcgtgcattgaccattcatttattttatttatttatttatttttgagacggagtttcgctcttgttgcccaggctggagtgcaatggcgcgatctcagctcactgcaacctccgcctcccgggttcaagcgattctcctgcctcagcctgccaactagctgggattacaggcgtgtgccaccacgcctgctaatttttgtatttttagtagagatggggtttctccctgttggtcaggctagtctcgaactcccgagctcaggtgattcgcccacctcggcctcccaaagtgctgggattacaggcgtgagccaccacgcccggcctgacccattcatttcttacaacaacccattgaggtcggttctagtccccatttactaaacgaagaaactgaggtcacacaactagaaagctacagaactaggatttgtacccacatctatcagactccagagcccacatacttaaccatcctgctaccaacagcagccaggcccagagtctggctcacccaaagctctccacaagcccaacctgctgggaaacagatttgatatctatccttaaagtatggaggtgtcatggtgggcactgaggactgggctgctggagaccttcccccagatctgccgctgacccactgcgtgatcctgggcctgtgtctacccctctctgagcccagtttcacccttgtttcagtgatacaatcagcaaactttaagaagactcttagccaagatattctaggattctgggaatggcagcttctcctacgtctaaatggctaaccccagaggcgatcaggctcttcaaagccccagggcaaggctggggtctcattcttctctttaatccctgtgtctagcacttcagcaggcccatagtagatattcaagaaatgtgggttggctgaataaacacttcatctcttttcagaactgcatgacagctgctctcctgggcctttgtggggctttggatttctcagttctggccaccttctatctagctggctctcctgactgcctcctccctggccagtggcagagcctgccagggctggcagcaggtcctaagcctctgtgcgaagacccacagcctctggaatcctcagcatagtacaacttgcaggggtggggggtggcacatgaagctcatagcccctcctggtagcagtgctcagggcccaacttcagttactcccagtttggggatgttgccttccatgggaggagatactttcatattaaatctgaaacacttcttatccttcactgtcccctcttccatgaaaccacccttgactcagagacacagtccctctgacagcacctggtccacccctctactctggcagcccggtggtgattattttgtttttcctccaccacataacctgctggaaggcagggactccacttcagaaatcttggaaaaccctgtggcccacaagggtttgagctcatattcccatctggtgaggtgcagaaggcacagagctgtgccaggacatctcgttccaacccagccccactcctaatagtaataaaagtagctacatgtttactgtgcagctacttggtgccagacacctaccttatccctatcaataatctccacagccttgcaagttagagatatcatgcctattttgtagattatgaaatgaacactgaaaggtcaattactttgcccaaaattacacagcagagcatagaccaaacctgggactgtctgaccctgaaacatggatctttctgcaccgccctatactctgcgtcccagcaaagctaacctgtctgatgtggttgggcagaggtgctggacctcctggcggctcgctcctgtcttcagtgtggtaatgtcacaggcatttaaattgtggtttgcaagctcgcttgatttgggagaagtgccctcccagtctgtgaaattctcccaaactctaagggcctttttgcaaagcaaaacccaccctgcatttggctctgccaatatgtgattcagggggtgttttcccactcacagaatggagtgggaaactccacttattaagtacctcttacaatggaatgactctatggtgtaggtatcagggcactgaaatagaagccaggagctgcagggtcagtttatagctctgtatgtcactcactgtgatctccaaaagtcccgttgcctctttataccccattttccacattaaagtgtaagggattaaacaggattggcaattttcaagcttttaatattttcagcactgacagccgtttctcaaatcaaatctgtctctgaatcttaaaattcaaaaacagatcaaagtggactgctgtagtgagactgttccctttactctaaccctgccccggtctcaggctcctaggcagtcctgccccagggtttctgctaagcaggagccagttgttccctcagcctcctaaaagcgatggggagttgaggccagtggaatgcagctttggattcagaagccagaaaacaacagagattgtttgtgggaagtgagtcagagagattagacctctcttcaacatctgactagactctagaatggcattaagcaagtcactgaaccgctcagagcctctgtttccttatcactaaaagttaggacaattcttgcaatgaaatgagatactactaccaagtacttcagtgctgtgcccagcacagaacgaatacactcagtatgtttttcttttgtttcttctgtctctccagcacccaaagcagaaacagtatgggcagagagacgcctactgaatcaggtgtttatcagtattatgaaatacagtatataaaacccagcatttggagtccagaacaaattcaaattctggctcagtcactaagtagctatgtggtcttgggcaactggcttacattttggtaattctctcaatatgcaaaaatattctctcggccaggtgcggtggctcacgcctgtaatcccagcactttgggaggcagaggcgggcggatcacttgaagtcaggagtttgagaccagcctggccaacatggcgaaaccctgtctctactaaaaatacaaaaattagccaagcatggtcatgcatgcctgtagtcccatctatttgggaggctgaggcaggagaatcacttgaacccaggaggtggaggttgcagtgagccgagatcgaaccactgcactccagcttgggtgacagagccagactctgtctcaaaaaaaaaaaaaaaaaaaaaagaaaaggaaaaaaaactcctggcagacatgagagcaaaatcgagtacgaaatgggcagctgggacctcatatctactgaataattgtctgtttggaggttgagacatgactggggaggcctggcctgcccctgtgttaggtgatggggctggcccacccaggggtgtggcagcagggctggcccctgtgtgacttgtgataaccccaccctaccaaggaggaagactggataaaatgggcccctgagatggctgaaggcagctaaaggggcctaagagactatggggagaagggcagccagttcctaggcagccctgccccactgtttctgataagcaggaggcagttgttccctcagcctcctgaaagcaatgaggagttgaggccacgggaatgcagctttggattccagaagccaaggacctgttacaaaggtggttttctgggaagcaaattagagggattagacctggcttcgacatctgacttgactccaacctaccaaaggatctcccagttcacctgggagttaacacaccagggttctagtccttttgctcgctgtgtggctttgggtaagtccttgcccctctctggaccttgaggtcccattcatacaaaaagcagttggactcaggcctgccagcccccatttttgtggctcttccccgcccctccccatcctttggctatgggatagtctcccaggcacctccaaaaggaagtgtctaaaacagagctctccacctcctctccaagcccagctccccactgccctcttcctgccctgtccctgtctccgctgccctttagatcaggcaggcaggcaggcctagagcatccgccctgagacactgcctgttggctgccttaagacgccccttccttctctgcccgcagcctccccagcctctgcattcctctgcttcctgtctgctctgctcagcctgcaggattgatcttcccaaagccaggtgtcaaccaggccactaaccctacccactgctcagaaatcttcccacagcctcagcctggccccctcttatccatcccctccatacacacttgcctcagctcctcaaaacagtccacagccatcctccttccccacctttgcccctttcttcccttcctaaggaaatattggcccccttctctccaccaggctgaacccactcatcctgcaaaaccaagttcaacgccctgtcattttcttttttttttttttttttgagatggagtctcacactgtcgcccaggctagagtgcaatgggtgcactctcggctcactgcaacctctgcctcctaggttcaatcgattcttctgcctcagcctccagaggaactctgactacaggtgcacaccaccacacccagctaatttttgtatttttatttttatttctatttatttatttattgtgagatggagtttctctcttgttgcccatgctggagtgcaatggcacgatctcggctcattgcaacctccgcctcccaagttcaaaggattctcctatctcagcttctgaagtagctgggattacaggcatgtgccaccacacccggctaatttttttttatttttagtagagatggggtttcaccatgttggtcaggctggtctcaaactcctgacctcaagtgatccacccacctcggcctcccaaagtgctgggattacaggcgtgagccaccgtgcctggcctaatttttgtatttttagtagagacggagtttcaccacattggccagcctggtctcaaactccagacctcaagtgatccacccgcctcagcctcccaaagtgctggggttacaggtgtgagccactacgcctggcgcctgtcttcttctaatatgcctcttctgacctcctcactcccattggagccatggctcacttctggtcaggctccatgcactcaatcagccctgcctgccaggactgtagtgcccacttgatgagaaatcacctgtgaaaatgccaggcatggtctggcacacagtaggtgctcaagaaacaaatgttaatgccccagcttccttctgtcttgtgtccactaatttggcatttggagcatatttttgtacttcacgtaattaaatatttactgtgtgccaaggtcagtgtgtgacagagcactgtaggggaggcaaaaatgaaccaactctggaccttgccctgcagaagctctgtctactggcatgaggtaagacaggtccacagataacttacataagagagactgcaatctggacaagacagcctcagtgggagagggaaggagaaccctgtagatttgggtgcggggaggctgtggggagagcacagcctttcaggtaaagggacaaggttaggaaagcaagaaggtgtagcttgtgctcgtggagcccaggaaactccttgggctagaaaagatttggtggcactctatacagtgtatgtgtctgtctgtctatctaacatgaatggtactattttctcctattggtgtgcattgtacctaacaaaaaatccatgtcccaagtacttttctcttttctttctttctttttttttttggaatgaagtcttgctctgtcgcccaggctggagtgaagtggcgctatctcggcttactgcaacctcctcctcctggattcaagcagttctcctgcctcagcctccccagtagctgggattacaggcacgcaccaccacgcccagctaattttttttgtatttttagtagaggtggggtttaactgtgttggccaggctggtctcgaactcctgacctcaagtgatctgcccatctcagcctcccaaagtgctgagattataggtgtgagccgccatgcccggccaacagtacttttctctagaggtagaattgcaggggatttttctctttttgcttatctgcacttttctaaaagttctgccatgaacacgggcattttttgtggaataaacaaagtttaaatgttggctagatcagtgcttctttatgcataaggaaggattagttcttttttttctatttccaatttattgattctttgataaaatgcaatgcaataaaattattatttttttttagagacgtctccctctctcacccaggctggagtgcagtggtgcaatcatagcttactgcaaccttgaactcctgggctcaagcgatcctcttgctttagcctcctgagtagctgggactacaggtgtggaccaccacacctggctgatttttaaactttttgtagatacagggtctcgccatgttgcccaggctggtctcgaactcttgggctcaagccatcctgccacctcagcctcccaaagtgccgggattacaggcgtgagccaccatgcccagctagaaaattacttttttggctaggcaccgtggctcacgcctgtaatcccggcactttgggaggctgaggcaggcagattgcttgagcccaggagttcgagaccatcctgggaagcatggcaagacctccatctctacaaaaaattcgaaaattagctggatgttgtggtgcacacctgcagtcccagctacttgggaggctgagttgggagaaacagttgagcccgggaggtcaaggctgcagtgagtcgagattgcaccactgcactccagcctgggcgacagagaccctgtgtgaaaaaaaaaaaaagaagagaattttttttaaacagtcattgcttgctcagatgtttactttaaaagataataatgaacaagaagcagtcacataaaatacaagcccaaattttatatcattagattctgattgtcatgaaagtttctaaagacttactttcatttctcaacttaccttgttgaccagcagggattggtgaaccatgctgtgagtagcattgggctagagagaggggaggcaggaatctagaagagctgttttccagatgtgaccatctcctgaggacagggaccatgtctcatgtgccacccatcaccccccacagacagagcctgcagccaatgccccaggagccctcggttccaaccaactgatgcccctgtgcccactggcccacgccatgcagccccagtccgttctgcacagcggctacttccacccactacttcgggcctggcagacagccaccaccaccctcaatgcctccaacctcatctaccccatctttgtcacgtgagtctccaagaatgggccaggcctctgctctgctggttggggttggggttggggagggagtgttgactggagcgggcatcagtatggctgggggtggcaaagtgagctgtcagcttgaaattcaaggcactggaagcaggctacttggattaaggacaggaatcttaggaacaaaacaaactttgaaagaactcattcatcccatttggaaaattagaagaataacccttgcctgccatcctgagctcttgcagtaagacagaagctgagaaggtgctctgtacattgtaaagtgctatgtacctgtaagagatggcagtcattgaggctgggcacggtggctcacgcctgtaatcccagcactttgggaggctgaggcaggcggatcacgaggtcaggagatcgagaccatcctggctaatatggtgaaaccctgtctctactaaaaacacaaagaaattagccaggcgtggtggcgggtgcctgtagtcccagctacttgggaggctgaggcaggagaatggcgtgaacccgggaggcggagcttgcagtgagccgagattgcaccacttcactccagcctgggcgacggagccagactccatctcaaaaaaaaaaaaaaaaaaaagagatggcaatcgtgattgttaataataatgcagacatttactgagtacttactatctaccaggtactatgctaagcacctacacacattatctcattcaattctgagagcatttgtatgaagaaggagtagctatcctctagaacatcagctccatgagggcagggatgtttgtctattttgttcactgttgtatcatcagggcctagaacagtacttggcacataataagtactcaataaatatttgttgaatgaatgaattaaccacgcatgatatagatgaaggcctaaggctcaaagagatgatagaacttggccacggtcacccaggcagtaagtggctgggatagaaagcaaggacctgccaaattcagagtccaagttcttaaccacttaattccttcctgtaattaccgttcttttagtacagttgctagtgttgtcactgttattcttgttgttcctattattatttcaggccctgggcttggccaggcagggaagccagacactggatcccatcctcctcccaccatctccacttccatatttctttcctgcttcccaaccatccctctcagtcgcccccgcaccactggcccttcccacagctaccaatccatatcccacccccgctcttgcagggatgttcctgatgacatacagcctatcaccagcctcccaggagtggccaggtaggagacgtggagttggggggccagcgggtggtggagggagagattccacaggtggaagtgctgggaggcagaagcagacctaggaagtagaagatgcggacagacagacattagctcagtagaggaaagggtttccccggggccagagctgttccacagtggaaggggcagccccataaagtaaagagctacccatcacccgagacgtcgtggcagaggctgttgcagaagggagctgaactgcagatgggagttcaaaaagagggcctcgaaggagccttccacagccgaattccggagctctgctactcagggcctcagtcttccctcctatttagtggatgcatccctgccccttctgtcctgggggcttgagccctcctggtgccatatgcagcttggtttctaacagaggcacacagtgtggtggggtccggaggaccgttgcctgggacctgccttccttcaacccctctacccacacccacacaggtatggtgtgaagcggctggaagagatgctgaggcccttggtggaagagggcctacgctgtgtcttgatctttggcgtccccagcagagttcccaaggtgaagaatcaaaggaagggctaagaagggaggttgcgctcacgcccgtaatcccagcactttgggaggccaaagtgggtggatcacttgagcccaggattttgagaccagcctggacaacatggcaaaacccatctctacaaaaaatacaaaagttagctgggtgtgggggtatgtgcctgtagtcccagctactcgggaggtggagaggtgggaggattgcttgagcccagaaagtcgaggctgcagtgagccaaaatcgcgccagtgcactctagcctgggtgacagagcaagaccctgtctccaatacaaacagaaaaaggaagggaggttgggcaaaggtggactgagggtccacactgactgcaccctcactcccacattgtgctggccctggggccacaggtgaatggacgtggtctttgcccttaagtcagcacccatgtagggtcagtcctctgtgcttccttatccaggggctgtgatgatgaaggaaggagaaggccagggctatgctctgtgatggctgtcatcctgccttccaaagctacatgtaatagacacactgctttgtccctcccctgcccctaggacgagcggggttccgcagctgactccgaggagtccccagctattgaggcaatccatctgttgaggaagaccttccccaacctcctggtggcctgtgatgtctgcctgtgtccctacacctcccatggtcactgcggtgagttccctccctcccaccagccctgctgccacccacactcctactgcccacttctcaacagggtggggacaggccagggcccaaggtgctccccaaaacccagtcatctgtcctgaagggctcctgagtgaaaacggagcattccgggctgaggagagccgccagcggctggctgaggtggcattggcgtatgccaaggcaggtgagtgaaccaccagcagggatgggcacctctgggtcaggaggtggcagagtggctaggagggccccagagttctgaaggccaccctctgccccccaggatgtcaggtggtagccccgtcggacatgatggatggacgcgtggaagccatcaaagaggccctgatggcacatggacttggcaacagggtaagggcagggaatgcagcacagggctggcaggagatagtctgcaccagccctgcccccgtgtctgctaagaatcacagaactgccgggcgtgttggctcacacctgtagtcccagcactttgggaggctgaggcaggtagatcacttgaggtcaggggttcaagaccagcctggccaacatggtgaaaccccatctctactaaaaacacaaaaattagctgggcgtggtggcaggcgcctgtaatcccagctactggggaggctgaggcaggagaatcgcttgaacccacgaggcagtgagctgagatcatgccactgcacttcagcctggatgacagagctagactccatctcaaaaaaaaaaagaatcacagaactgaagacagtgctggatgaggctttggggaaccatttaaacctctgggcctctgcagggaaatcaagcccagcactccaacaggaccagaacacaggcagtctccttcccagcctaggttctttctctccctgccacatcaccctgggatacctggcaagggccgaataagccaagacctccattgtctccccataggtatcggtgatgagctacagtgccaaatttgcttcctg

SEQ ID NO: 10637 - DNA, 851 bp, Homo sapiens
gagacagcggtgacaggagcagcggccgggagcccttagggaggcagacagagcctgcagccaatgccccaggagccctcggttccaaccaactgatgcccctgtgcccactggcccacgccatgcagccccagtccgttctgcacagcggctacttccacccactacttcgggcctggcagacagccaccaccaccctcaatgcctccaacctcatctaccccatctttgtcacggatgttcctgatgacatacagcctatcaccagcctcccaggagtggccaggtatggtgtgaagcggctggaagagatgctgaggcccttggtggaagagggcctacgctgtgtcttgatctttggcgtccccagcagagttcccaaggacgagcggggttccgcagctgactccgaggagtccccagctattgaggcaatccatctgttgaggaagaccttccccaacctcctggtggcctgtgatgtctgcctgtgtccctacacctcccatggtcactgcggtgagttccctccctcccaccagccctgctgccacccacactcctactgcccacttctcaacagggtggggacaggccagggcccaaggtgctccccaaaacccagtcatctgtcctgaagggctcctgagtgaaaacggagcattccgggctgaggagagccgccagcggctggctgaggtggcattggcgtatgccaaggcaggatgtcaggtggtagccccgtcggacatgatggatggacgcgtggaagccatcaaagaggccctgatggcacatggacttggcaacagggtatcggtgatgagctacagtgccaaatttgcttcctg

SEQ ID NO: 10638 - DNA, 1650 bp, Homo sapiens
aattaaccacgcatgatatagatgaaggcctaaggctcaaagagatgatagaacttggccacggtcacccaggcagtaagtggctgggatagaaagcaaggacctgccaaattcagagtccaagttcttaaccacttaattccttcctgtaattaccgttcttttagtacagttgctagtgttgtcactgttattcttgttgttcctattattatttcaggccctgggcttggccaggcagggaagccagacactggatcccatcctcctcccaccatctccacttccatatttctttcctgcttcccaaccatccctctcagtcgcccccgcaccactggcccttcccacagctaccaatccatatcccacccccgctcttgcagggatgttcctgatgacatacagcctatcaccagcctcccaggagtggccaggtaggagacgtggagttggggggccagcgggtggtggagggagagattccacaggtggaagtgctgggaggcagaagcagacctaggaagtagaagatgcggacagacagacattagctcagtagaggaaagggtttccccggggccagagctgttccacagtggaaggggcagccccataaagtaaagagctacccatcacccgagacgtcgtggcagaggctgttgcagaagggagctgaactgcagatgggagttcaaaaagagggcctcgaaggagccttccacagccgaattccggagctctgctactcagggcctcagtcttccctcctatttagtggatgcatccctgccccttctgtcctgggggcttgagccctcctggtgccatatgcagcttggtttctaacagaggcacacagtgtggtggggtccggaggaccgttgcctgggacctgccttccttcaacccctctacccacacccacacaggtatggtgtgaagcggctggaagagatgctgaggcccttggtggaagagggcctacgctgtgtcttgatctttggcgtccccagcagagttcccaaggtgaagaatcaaaggaagggctaagaagggaggttgcgctcacgcccgtaatcccagcactttgggaggccaaagtgggtggatcacttgagcccaggattttgagaccagcctggacaacatggcaaaacccatctctacaaaaaatacaaaagttagctgggtgtgggggtatgtgcctgtagtcccagctactcgggaggtggagaggtgggaggattgcttgagcccagaaagtcgaggctgcagtgagccaaaatcgcgccagtgcactctagcctgggtgacagagcaagaccctgtctccaatacaaacagaaaaaggaagggaggttgggcaaaggtggactgagggtccacactgactgcaccctcactcccacattgtgctggccctggggccacaggtgaatggacgtggtctttgcccttaagtcagcacccatgtagggtcagtcctctgtgcttccttatccaggggctgtgatgatgaaggaaggagaaggccagggctatgctctgtgatggctgtcatcctgccttccaaagctacatgtaatagacacactgctttgtccctcccctgcccctaggacgagcggggttccgcagctgactccg

SEQ ID NO: 10639 - DNA, 562 bp, Homo sapiens
aattaaccacgcatgatatagatgaaggcctaaggctcaaagagatgatagaacttggccacggtcacccaggcagtaagtggctgggatagaaagcaaggacctgccaaattcagagtccaagttcttaaccacttaattccttcctgtaattaccgttcttttagtacagttgctagtgttgtcactgttattcttgttgttcctattattatttcaggccctgggcttggccaggcagggaagccagacactggatcccatcctcctcccaccatctccacttccatatttctttcctgcttcccaaccatccctctcagtcgcccccgcaccactggcccttcccacagctaccaatccatatcccacccccgctcttgcagggatgttcctgatgacatacagcctatcaccagcctcccaggagtggccaggtatggtgtgaagcggctggaagagatgctgaggcccttggtggaagagggcctacgctgtgtcttgatctttggcgtccccagcagagttcccaaggacgagcggggttccgcagctgactccg

SEQ ID NO: 10640 - DNA, 14925 bp, Homo sapiens
ggagcagcggccgggagcccttagggaggcaggtgagcgggggctggatgcggggagatagcgggcctggagggcggctccagggcgaggcggggactgtggcaccaagagtcctgcgtccccagattgtgctgtgcgcctgaagccctggcggtgcagccgtgcacggagtcccgtggagcgtttgtttgggctggattatcccgctgcagccgaggttgggggcccgggttcggggctccgcacctcttctctggggttcaccctctcggataccgcctgggcagactccatcgatgcagaacccgaggtgcgggtggtggttggtgggggggtagggaggtgaaaacaataacagccgttttgtactaagcgttgcgtgcattgaccattcatttattttatttatttatttatttttgagacggagtttcgctcttgttgcccaggctggagtgcaatggcgcgatctcagctcactgcaacctccgcctcccgggttcaagcgattctcctgcctcagcctgccaactagctgggattacaggcgtgtgccaccacgcctgctaatttttgtatttttagtagagatggggtttctccctgttggtcaggctagtctcgaactcccgagctcaggtgattcgcccacctcggcctcccaaagtgctgggattacaggcgtgagccaccacgcccggcctgacccattcatttcttacaacaacccattgaggtcggttctagtccccatttactaaacgaagaaactgaggtcacacaactagaaagctacagaactaggatttgtacccacatctatcagactccagagcccacatacttaaccatcctgctaccaacagcagccaggcccagagtctggctcacccaaagctctccacaagcccaacctgctgggaaacagatttgatatctatccttaaagtatggaggtgtcatggtgggcactgaggactgggctgctggagaccttcccccagatctgccgctgacccactgcgtgatcctgggcctgtgtctacccctctctgagcccagtttcacccttgtttcagtgatacaatcagcaaactttaagaagactcttagccaagatattctaggattctgggaatggcagcttctcctacgtctaaatggctaaccccagaggcgatcaggctcttcaaagccccagggcaaggctggggtctcattcttctctttaatccctgtgtctagcacttcagcaggcccatagtagatattcaagaaatgtgggttggctgaataaacacttcatctcttttcagaactgcatgacagctgctctcctgggcctttgtggggctttggatttctcagttctggccaccttctatctagctggctctcctgactgcctcctccctggccagtggcagagcctgccagggctggcagcaggtcctaagcctctgtgcgaagacccacagcctctggaatcctcagcatagtacaacttgcaggggtggggggtggcacatgaagctcatagcccctcctggtagcagtgctcagggcccaacttcagttactcccagtttggggatgttgccttccatgggaggagatactttcatattaaatctgaaacacttcttatccttcactgtcccctcttccatgaaaccacccttgactcagagacacagtccctctgacagcacctggtccacccctctactctggcagcccggtggtgattattttgtttttcctccaccacataacctgctggaaggcagggactccacttcagaaatcttggaaaaccctgtggcccacaagggtttgagctcatattcccatctggtgaggtgcagaaggcacagagctgtgccaggacatctcgttccaacccagccccactcctaatagtaataaaagtagctacatgtttactgtgcagctacttggtgccagacacctaccttatccctatcaataatctccacagccttgcaagttagagatatcatgcctattttgtagattatgaaatgaacactgaaaggtcaattactttgcccaaaattacacagcagagcatagaccaaacctgggactgtctgaccctgaaacatggatctttctgcaccgccctatactctgcgtcccagcaaagctaacctgtctgatgtggttgggcagaggtgctggacctcctggcggctcgctcctgtcttcagtgtggtaatgtcacaggcatttaaattgtggtttgcaagctcgcttgatttgggagaagtgccctcccagtctgtgaaattctcccaaactctaagggcctttttgcaaagcaaaacccaccctgcatttggctctgccaatatgtgattcagggggtgttttcccactcacagaatggagtgggaaactccacttattaagtacctcttacaatggaatgactctatggtgtaggtatcagggcactgaaatagaagccaggagctgcagggtcagtttatagctctgtatgtcactcactgtgatctccaaaagtcccgttgcctctttataccccattttccacattaaagtgtaagggattaaacaggattggcaattttcaagcttttaatattttcagcactgacagccgtttctcaaatcaaatctgtctctgaatcttaaaattcaaaaacagatcaaagtggactgctgtagtgagactgttccctttactctaaccctgccccggtctcaggctcctaggcagtcctgccccagggtttctgctaagcaggagccagttgttccctcagcctcctaaaagcgatggggagttgaggccagtggaatgcagctttggattcagaagccagaaaacaacagagattgtttgtgggaagtgagtcagagagattagacctctcttcaacatctgactagactctagaatggcattaagcaagtcactgaaccgctcagagcctctgtttccttatcactaaaagttaggacaattcttgcaatgaaatgagatactactaccaagtacttcagtgctgtgcccagcacagaacgaatacactcagtatgtttttcttttgtttcttctgtctctccagcacccaaagcagaaacagtatgggcagagagacgcctactgaatcaggtgtttatcagtattatgaaatacagtatataaaacccagcatttggagtccagaacaaattcaaattctggctcagtcactaagtagctatgtggtcttgggcaactggcttacattttggtaattctctcaatatgcaaaaatattctctcggccaggtgcggtggctcacgcctgtaatcccagcactttgggaggcagaggcgggcggatcacttgaagtcaggagtttgagaccagcctggccaacatggcgaaaccctgtctctactaaaaatacaaaaattagccaagcatggtcatgcatgcctgtagtcccatctatttgggaggctgaggcaggagaatcacttgaacccaggaggtggaggttgcagtgagccgagatcgaaccactgcactccagcttgggtgacagagccagactctgtctcaaaaaaaaaaaaaaaaaaaaaagaaaaggaaaaaaaactcctggcagacatgagagcaaaatcgagtacgaaatgggcagctgggacctcatatctactgaataattgtctgtttggaggttgagacatgactggggaggcctggcctgcccctgtgttaggtgatggggctggcccacccaggggtgtggcagcagggctggcccctgtgtgacttgtgataaccccaccctaccaaggaggaagactggataaaatgggcccctgagatggctgaaggcagctaaaggggcctaagagactatggggagaagggcagccagttcctaggcagccctgccccactgtttctgataagcaggaggcagttgttccctcagcctcctgaaagcaatgaggagttgaggccacgggaatgcagctttggattccagaagccaaggacctgttacaaaggtggttttctgggaagcaaattagagggattagacctggcttcgacatctgacttgactccaacctaccaaaggatctcccagttcacctgggagttaacacaccagggttctagtccttttgctcgctgtgtggctttgggtaagtccttgcccctctctggaccttgaggtcccattcatacaaaaagcagttggactcaggcctgccagcccccatttttgtggctcttccccgcccctccccatcctttggctatgggatagtctcccaggcacctccaaaaggaagtgtctaaaacagagctctccacctcctctccaagcccagctccccactgccctcttcctgccctgtccctgtctccgctgccctttagatcaggcaggcaggcaggcctagagcatccgccctgagacactgcctgttggctgccttaagacgccccttccttctctgcccgcagcctccccagcctctgcattcctctgcttcctgtctgctctgctcagcctgcaggattgatcttcccaaagccaggtgtcaaccaggccactaaccctacccactgctcagaaatcttcccacagcctcagcctggccccctcttatccatcccctccatacacacttgcctcagctcctcaaaacagtccacagccatcctccttccccacctttgcccctttcttcccttcctaaggaaatattggcccccttctctccaccaggctgaacccactcatcctgcaaaaccaagttcaacgccctgtcattttcttttttttttttttttttgagatggagtctcacactgtcgcccaggctagagtgcaatgggtgcactctcggctcactgcaacctctgcctcctaggttcaatcgattcttctgcctcagcctccagaggaactctgactacaggtgcacaccaccacacccagctaatttttgtatttttatttttatttctatttatttatttattgtgagatggagtttctctcttgttgcccatgctggagtgcaatggcacgatctcggctcattgcaacctccgcctcccaagttcaaaggattctcctatctcagcttctgaagtagctgggattacaggcatgtgccaccacacccggctaatttttttttatttttagtagagatggggtttcaccatgttggtcaggctggtctcaaactcctgacctcaagtgatccacccacctcggcctcccaaagtgctgggattacaggcgtgagccaccgtgcctggcctaatttttgtatttttagtagagacggagtttcaccacattggccagcctggtctcaaactccagacctcaagtgatccacccgcctcagcctcccaaagtgctggggttacaggtgtgagccactacgcctggcgcctgtcttcttctaatatgcctcttctgacctcctcactcccattggagccatggctcacttctggtcaggctccatgcactcaatcagccctgcctgccaggactgtagtgcccacttgatgagaaatcacctgtgaaaatgccaggcatggtctggcacacagtaggtgctcaagaaacaaatgttaatgccccagcttccttctgtcttgtgtccactaatttggcatttggagcatatttttgtacttcacgtaattaaatatttactgtgtgccaaggtcagtgtgtgacagagcactgtaggggaggcaaaaatgaaccaactctggaccttgccctgcagaagctctgtctactggcatgaggtaagacaggtccacagataacttacataagagagactgcaatctggacaagacagcctcagtgggagagggaaggagaaccctgtagatttgggtgcggggaggctgtggggagagcacagcctttcaggtaaagggacaaggttaggaaagcaagaaggtgtagcttgtgctcgtggagcccaggaaactccttgggctagaaaagatttggtggcactctatacagtgtatgtgtctgtctgtctatctaacatgaatggtactattttctcctattggtgtgcattgtacctaacaaaaaatccatgtcccaagtacttttctcttttctttctttctttttttttttggaatgaagtcttgctctgtcgcccaggctggagtgaagtggcgctatctcggcttactgcaacctcctcctcctggattcaagcagttctcctgcctcagcctccccagtagctgggattacaggcacgcaccaccacgcccagctaattttttttgtatttttagtagaggtggggtttaactgtgttggccaggctggtctcgaactcctgacctcaagtgatctgcccatctcagcctcccaaagtgctgagattataggtgtgagccgccatgcccggccaacagtacttttctctagaggtagaattgcaggggatttttctctttttgcttatctgcacttttctaaaagttctgccatgaacacgggcattttttgtggaataaacaaagtttaaatgttggctagatcagtgcttctttatgcataaggaaggattagttcttttttttctatttccaatttattgattctttgataaaatgcaatgcaataaaattattatttttttttagagacgtctccctctctcacccaggctggagtgcagtggtgcaatcatagcttactgcaaccttgaactcctgggctcaagcgatcctcttgctttagcctcctgagtagctgggactacaggtgtggaccaccacacctggctgatttttaaactttttgtagatacagggtctcgccatgttgcccaggctggtctcgaactcttgggctcaagccatcctgccacctcagcctcccaaagtgccgggattacaggcgtgagccaccatgcccagctagaaaattacttttttggctaggcaccgtggctcacgcctgtaatcccggcactttgggaggctgaggcaggcagattgcttgagcccaggagttcgagaccatcctgggaagcatggcaagacctccatctctacaaaaaattcgaaaattagctggatgttgtggtgcacacctgcagtcccagctacttgggaggctgagttgggagaaacagttgagcccgggaggtcaaggctgcagtgagtcgagattgcaccactgcactccagcctgggcgacagagaccctgtgtgaaaaaaaaaaaaagaagagaattttttttaaacagtcattgcttgctcagatgtttactttaaaagataataatgaacaagaagcagtcacataaaatacaagcccaaattttatatcattagattctgattgtcatgaaagtttctaaagacttactttcatttctcaacttaccttgttgaccagcagggattggtgaaccatgctgtgagtagcattgggctagagagaggggaggcaggaatctagaagagctgttttccagatgtgaccatctcctgaggacagggaccatgtctcatgtgccacccatcaccccccacagacagagcctgcagccaatgccccaggagccctcggttccaaccaactgatgcccctgtgcccactggcccacgccatgcagccccagtccgttctgcacagcggctacttccacccactacttcgggcctggcagacagccaccaccaccctcaatgcctccaacctcatctaccccatctttgtcacgtgagtctccaagaatgggccaggcctctgctctgctggttggggttggggttggggagggagtgttgactggagcgggcatcagtatggctgggggtggcaaagtgagctgtcagcttgaaattcaaggcactggaagcaggctacttggattaaggacaggaatcttaggaacaaaacaaactttgaaagaactcattcatcccatttggaaaattagaagaataacccttgcctgccatcctgagctcttgcagtaagacagaagctgagaaggtgctctgtacattgtaaagtgctatgtacctgtaagagatggcagtcattgaggctgggcacggtggctcacgcctgtaatcccagcactttgggaggctgaggcaggcggatcacgaggtcaggagatcgagaccatcctggctaatatggtgaaaccctgtctctactaaaaacacaaagaaattagccaggcgtggtggcgggtgcctgtagtcccagctacttgggaggctgaggcaggagaatggcgtgaacccgggaggcggagcttgcagtgagccgagattgcaccacttcactccagcctgggcgacggagccagactccatctcaaaaaaaaaaaaaaaaaaaagagatggcaatcgtgattgttaataataatgcagacatttactgagtacttactatctaccaggtactatgctaagcacctacacacattatctcattcaattctgagagcatttgtatgaagaaggagtagctatcctctagaacatcagctccatgagggcagggatgtttgtctattttgttcactgttgtatcatcagggcctagaacagtacttggcacataataagtactcaataaatatttgttgaatgaatgaattaaccacgcatgatatagatgaaggcctaaggctcaaagagatgatagaacttggccacggtcacccaggcagtaagtggctgggatagaaagcaaggacctgccaaattcagagtccaagttcttaaccacttaattccttcctgtaattaccgttcttttagtacagttgctagtgttgtcactgttattcttgttgttcctattattatttcaggccctgggcttggccaggcagggaagccagacactggatcccatcctcctcccaccatctccacttccatatttctttcctgcttcccaaccatccctctcagtcgcccccgcaccactggcccttcccacagctaccaatccatatcccacccccgctcttgcagggatgttcctgatgacatacagcctatcaccagcctcccaggagtggccaggtaggagacgtggagttggggggccagcgggtggtggagggagagattccacaggtggaagtgctgggaggcagaagcagacctaggaagtagaagatgcggacagacagacattagctcagtagaggaaagggtttccccggggccagagctgttccacagtggaaggggcagccccataaagtaaagagctacccatcacccgagacgtcgtggcagaggctgttgcagaagggagctgaactgcagatgggagttcaaaaagagggcctcgaaggagccttccacagccgaattccggagctctgctactcagggcctcagtcttccctcctatttagtggatgcatccctgccccttctgtcctgggggcttgagccctcctggtgccatatgcagcttggtttctaacagaggcacacagtgtggtggggtccggaggaccgttgcctgggacctgccttccttcaacccctctacccacacccacacaggtatggtgtgaagcggctggaagagatgctgaggcccttggtggaagagggcctacgctgtgtcttgatctttggcgtccccagcagagttcccaaggtgaagaatcaaaggaagggctaagaagggaggttgcgctcacgcccgtaatcccagcactttgggaggccaaagtgggtggatcacttgagcccaggattttgagaccagcctggacaacatggcaaaacccatctctacaaaaaatacaaaagttagctgggtgtgggggtatgtgcctgtagtcccagctactcgggaggtggagaggtgggaggattgcttgagcccagaaagtcgaggctgcagtgagccaaaatcgcgccagtgcactctagcctgggtgacagagcaagaccctgtctccaatacaaacagaaaaaggaagggaggttgggcaaaggtggactgagggtccacactgactgcaccctcactcccacattgtgctggccctggggccacaggtgaatggacgtggtctttgcccttaagtcagcacccatgtagggtcagtcctctgtgcttccttatccaggggctgtgatgatgaaggaaggagaaggccagggctatgctctgtgatggctgtcatcctgccttccaaagctacatgtaatagacacactgctttgtccctcccctgcccctaggacgagcggggttccgcagctgactccgaggagtccccagctattgaggcaatccatctgttgaggaagaccttccccaacctcctggtggcctgtgatgtctgcctgtgtccctacacctcccatggtcactgcggtgagttccctccctcccaccagccctgctgccacccacactcctactgcccacttctcaacagggtggggacaggccagggcccaaggtgctccccaaaacccagtcatctgtcctgaagggctcctgagtgaaaacggagcattccgggctgaggagagccgccagcggctggctgaggtggcattggcgtatgccaaggcaggtgagtgaaccaccagcagggatgggcacctctgggtcaggaggtggcagagtggctaggagggccccagagttctgaaggccaccctctgccccccaggatgtcaggtggtagccccgtcggacatgatggatggacgcgtggaagccatcaaagaggccctgatggcacatggacttggcaacagggtaagggcagggaatgcagcacagggctggcaggagatagtctgcaccagccctgcccccgtgtctgctaagaatcacagaactgccgggcgtgttggctcacacctgtagtcccagcactttgggaggctgaggcaggtagatcacttgaggtcaggggttcaagaccagcctggccaacatggtgaaaccccatctctactaaaaacacaaaaattagctgggcgtggtggcaggcgcctgtaatcccagctactggggaggctgaggcaggagaatcgcttgaacccacgaggcagtgagctgagatcatgccactgcacttcagcctggatgacagagctagactccatctcaaaaaaaaaaagaatcacagaactgaagacagtgctggatgaggctttggggaaccatttaaacctctgggcctctgcagggaaatcaagcccagcactccaacaggaccagaacacaggcagtctccttcccagcctaggttctttctctccctgccacatcaccctgggatacctggcaagggccgaataagccaagacctccattgtctccccataggtatcggtgatgagctacagtgccaaatttgcttcctgtttctatggccctttccggtgagcaggggtgggcaggggtctgctgtgaatccctggccctttggcccaaagctggagcccaccctgatgactctgctttgcagggatgcagctaagtcaagcccagcttttggggaccgccgctgctaccagctgccccctggagcacgaggcctggctctccgagctgtggtgagtgactaggacttgagccccaccctcagccccctcctaggcaccacccacattataccctcatcccttaggaccgggatgtacgggaaggagctgacatgctcatggtgaagccgggaatgccctacctggacatcgtgcgggaggtaaaggacaaggtgagcacaggtacgaggcaaagggggctcagggggctgggacagagttttccacagactctggaatctcagagttggaagcagtttgcccttaagcatgcatcctctcctccccttccctgcccaggaaccatcgtggccttctatgtcggggcttgcacgagcctcaaacagccctgctttaacagttcaagagtgggccaggctgccagccgcagtaacccaggacacggggctcaagatggtcacagattgagcaggggggaagggacgcttccagagccacatccaccctccatttcagcctgtctccctgtctgcttccctgcagcaccctgacctccctctcgccgtgtaccacgtctctggagagtttgccatgctgtggcatggagcccaggccggggcatttgatctcaaggctgccgtactggaggccatgactgccttccgcagagcaggtaggcaggcaagggtggggtgttttgacctgcgccacagggactgataagcactctgcctagattggggaacgacgtcctgagagcttgggatcttattccgggaattactagtgatctaaacagacacacactgaggaagagatatggaactgcagcatagaacacggcccggtgaagcaagcagagcccttcatttttggttgtgagaacgtgggcaagccacttctctgaacctcagtgtcctcacccataactggataactggggataagatacctggtgcgtggttgtcctgaggattaaatgaagtaatatcactccataaaggggactcattttgttagaattgcacaccagcatgggaaggaacttgcctcttacctatttccttcactgtgcattttattctttggtaaactgaggccccaaaagaggaaatgacttgcccaagaaatagagtttcccaaagctgggctccgtctcatgtggtgtgcccacaggctgtgcttcttcatggtagccttcttccccgcctggccttcccatcgcagaaggtgtgctcagagctgatcagcgtccccccagcaactttctgcatctctcccaacacaggtgctgacatcatcatcacctactacacaccgcagctgctgcagtggctgaaggaggaatgatggagacagtgccaggcccaagaactagaactttaaaacgttcccggggcctcagacaagtgaaaaccaaagtaaatgctgcttttagaactgtgccctcatgccctcttcctgctcacatgctagcggggcccagcagccctgggtggttttgccagcatgctaactcttgtaactcgcagctgcatcctatgagctctcccaagcttccccgcccctcccctgggtcagccgtgaggcccacctttgccaccctcagctctttcctctggtgtggcttcagcttgaaagcaacctggagtcgggggcacagcctttggggcctggctgggagagggtcttggagcattaggggaagaagagagcagtgggatcttggggcctgagaagccttggaacgcttctggcagcagagctgggtgtgggaatgaggcctagatcgatatccctgggttagagttgaaatttgccgcaattccactggaaggcatttcccacgaggccagaggttgccaggctgcctgaggtctcctattctactctgaaccataaacccagagaagaattactcattaaccagcataaatactgcctgaggatcaaaactcagaggcaaagagggagttcctgactgctagaggtgccaccaccacaaacactttttattcaggagatactttttgagaatctctgctctgttcctaggttcagtgctgggtcctgggaatacagcaggacagacctcagcttatctcttcatagaaattatacaaagagaattggggagacagctaagaagaaaacaaagaaataaagcagttacaaattgtgataagtgctttgaaggaaagaaggggtctgagacaacaacagggaaggggcctctcttgaaacagtagttgggaaggaggcagacatgcaccagtgatgtggtgacaggtgctctgaaggaggtcaccaggacctgacctctttgaaggatcagaaaatacttccctgaaggactgacatttgagcctagacctgaagggtgagccatcaagctaagacaattggggaagagcattccagggagagggaggagttgtgcaaaggccctggggctccttctagctggaggaatgcaaggctagcttgtctggagcactgagaggatggcctgaactgagtggagagagacagaccaggaccaaaccatgcagaggtcaagggccacattcaccttttcagagtgactcaatcaaatttgtagtttgtaaaagtattttaacagctctgcggcaaagtgcaaatgaaaagtcttgatggcatggactggagcggggacagtggggatggagaaaggggaatggattgtggatgtgtttagaaggtagattcgatgtgaaggatgaatctggcttgaccttctgggtggctgatgggccatttactgagatggggcagcctggaagaggaacagaagcagggtcggggtggagggagaatactaaacttagcttgagacattttgcaataaggaagctatatctagagtgcttatgtgactcacctaaggccactcaacaagtttgtggcagaactggattagaactgcacagaaaacagccaagctgggatttgaacccatgtagtccaactccaaggcctctgcccctaaccactgtgccataccacctcccaataatcaacagcaaaattataggtctaacaatgttttatagacacccctccatttatgtgatgggtttgcatcctgataaacccatcataagttgaaaatatgatcataagttgaaaatatgatcataagtcaaaaatgtatttaatatacctaacctaccaaacatcatagcttagcctagcctgccttaaacatgctcagaacacttacattagcctacagtgggcaaaactatccaacacaaaatctatattgtaataaagttgtaaagaattttgaataaaaattcaatatttg

SEQ ID NO: 10641 - DNA, 3247 bp, Homo sapiens
ggagcagcggccgggagcccttagggaggcagacagagcctgcagccaatgccccaggagccctcggttccaaccaactgatgcccctgtgcccactggcccacgccatgcagccccagtccgttctgcacagcggctacttccacccactacttcgggcctggcagacagccaccaccaccctcaatgcctccaacctcatctaccccatctttgtcacgccctgggcttggccaggcagggaagccagacactggatcccatcctcctcccaccatctccacttccatatttctttcctgcttcccaaccatccctctcagtcgcccccgcaccactggcccttcccacagctaccaatccatatcccacccccgctcttgcagggatgttcctgatgacatacagcctatcaccagcctcccaggagtggccaggtatggtgtgaagcggctggaagagatgctgaggcccttggtggaagagggcctacgctgtgtcttgatctttggcgtccccagcagagttcccaaggacgagcggggttccgcagctgactccgaggagtccccagctattgaggcaatccatctgttgaggaagaccttccccaacctcctggtggcctgtgatgtctgcctgtgtccctacacctcccatggtcactgcgggctcctgagtgaaaacggagcattccgggctgaggagagccgccagcggctggctgaggtggcattggcgtatgccaaggcaggatgtcaggtggtagccccgtcggacatgatggatggacgcgtggaagccatcaaagaggccctgatggcacatggacttggcaacagggtatcggtgatgagctacagtgccaaatttgcttcctgtttctatggccctttccgggatgcagctaagtcaagcccagcttttggggaccgccgctgctaccagctgccccctggagcacgaggcctggctctccgagctgtggaccgggatgtacgggaaggagctgacatgctcatggtgaagccgggaatgccctacctggacatcgtgcgggaggtaaaggacaagcaccctgacctccctctcgccgtgtaccacgtctctggagagtttgccatgctgtggcatggagcccaggccggggcatttgatctcaaggctgccgtactggaggccatgactgccttccgcagagcaggtgctgacatcatcatcacctactacacaccgcagctgctgcagtggctgaaggaggaatgatggagacagtgccaggcccaagaactagaactttaaaacgttcccggggcctcagacaagtgaaaaccaaagtaaatgctgcttttagaactgtgccctcatgccctcttcctgctcacatgctagcggggcccagcagccctgggtggttttgccagcatgctaactcttgtaactcgcagctgcatcctatgagctctcccaagcttccccgcccctcccctgggtcagccgtgaggcccacctttgccaccctcagctctttcctctggtgtggcttcagcttgaaagcaacctggagtcgggggcacagcctttggggcctggctgggagagggtcttggagcattaggggaagaagagagcagtgggatcttggggcctgagaagccttggaacgcttctggcagcagagctgggtgtgggaatgaggcctagatcgatatccctgggttagagttgaaatttgccgcaattccactggaaggcatttcccacgaggccagaggttgccaggctgcctgaggtctcctattctactctgaaccataaacccagagaagaattactcattaaccagcataaatactgcctgaggatcaaaactcagaggcaaagagggagttcctgactgctagaggtgccaccaccacaaacactttttattcaggagatactttttgagaatctctgctctgttcctaggttcagtgctgggtcctgggaatacagcaggacagacctcagcttatctcttcatagaaattatacaaagagaattggggagacagctaagaagaaaacaaagaaataaagcagttacaaattgtgataagtgctttgaaggaaagaaggggtctgagacaacaacagggaaggggcctctcttgaaacagtagttgggaaggaggcagacatgcaccagtgatgtggtgacaggtgctctgaaggaggtcaccaggacctgacctctttgaaggatcagaaaatacttccctgaaggactgacatttgagcctagacctgaagggtgagccatcaagctaagacaattggggaagagcattccagggagagggaggagttgtgcaaaggccctggggctccttctagctggaggaatgcaaggctagcttgtctggagcactgagaggatggcctgaactgagtggagagagacagaccaggaccaaaccatgcagaggtcaagggccacattcaccttttcagagtgactcaatcaaatttgtagtttgtaaaagtattttaacagctctgcggcaaagtgcaaatgaaaagtcttgatggcatggactggagcggggacagtggggatggagaaaggggaatggattgtggatgtgtttagaaggtagattcgatgtgaaggatgaatctggcttgaccttctgggtggctgatgggccatttactgagatggggcagcctggaagaggaacagaagcagggtcggggtggagggagaatactaaacttagcttgagacattttgcaataaggaagctatatctagagtgcttatgtgactcacctaaggccactcaacaagtttgtggcagaactggattagaactgcacagaaaacagccaagctgggatttgaacccatgtagtccaactccaaggcctctgcccctaaccactgtgccataccacctcccaataatcaacagcaaaattataggtctaacaatgttttatagacacccctccatttatgtgatgggtttgcatcctgataaacccatcataagttgaaaatatgatcataagttgaaaatatgatcataagtcaaaaatgtatttaatatacctaacctaccaaacatcatagcttagcctagcctgccttaaacatgctcagaacacttacattagcctacagtgggcaaaactatccaacacaaaatctatattgtaataaagttgtaaagaattttgaataaaaattcaatatttg

SEQ ID NO: 10642 - DNA, 8124 bp, Homo sapiens
acgcggtctgtgggagaccggagcgggagacagcggtgacaggagcagcggccgggagcccttagggaggcaggtgagcgggggctggatgcggggagatagcgggcctggagggcggctccagggcgaggcggggactgtggcaccaagagtcctgcgtccccagattgtgctgtgcgcctgaagccctggcggtgcagccgtgcacggagtcccgtggagcgtttgtttgggctggattatcccgctgcagccgaggttgggggcccgggttcggggctccgcacctcttctctggggttcaccctctcggataccgcctgggcagactccatcgatgcagaacccgaggtgcgggtggtggttggtgggggggtagggaggtgaaaacaataacagccgttttgtactaagcgttgcgtgcattgaccattcatttattttatttatttatttatttttgagacggagtttcgctcttgttgcccaggctggagtgcaatggcgcgatctcagctcactgcaacctccgcctcccgggttcaagcgattctcctgcctcagcctgccaactagctgggattacaggcgtgtgccaccacgcctgctaatttttgtatttttagtagagatggggtttctccctgttggtcaggctagtctcgaactcccgagctcaggtgattcgcccacctcggcctcccaaagtgctgggattacaggcgtgagccaccacgcccggcctgacccattcatttcttacaacaacccattgaggtcggttctagtccccatttactaaacgaagaaactgaggtcacacaactagaaagctacagaactaggatttgtacccacatctatcagactccagagcccacatacttaaccatcctgctaccaacagcagccaggcccagagtctggctcacccaaagctctccacaagcccaacctgctgggaaacagatttgatatctatccttaaagtatggaggtgtcatggtgggcactgaggactgggctgctggagaccttcccccagatctgccgctgacccactgcgtgatcctgggcctgtgtctacccctctctgagcccagtttcacccttgtttcagtgatacaatcagcaaactttaagaagactcttagccaagatattctaggattctgggaatggcagcttctcctacgtctaaatggctaaccccagaggcgatcaggctcttcaaagccccagggcaaggctggggtctcattcttctctttaatccctgtgtctagcacttcagcaggcccatagtagatattcaagaaatgtgggttggctgaataaacacttcatctcttttcagaactgcatgacagctgctctcctgggcctttgtggggctttggatttctcagttctggccaccttctatctagctggctctcctgactgcctcctccctggccagtggcagagcctgccagggctggcagcaggtcctaagcctctgtgcgaagacccacagcctctggaatcctcagcatagtacaacttgcaggggtggggggtggcacatgaagctcatagcccctcctggtagcagtgctcagggcccaacttcagttactcccagtttggggatgttgccttccatgggaggagatactttcatattaaatctgaaacacttcttatccttcactgtcccctcttccatgaaaccacccttgactcagagacacagtccctctgacagcacctggtccacccctctactctggcagcccggtggtgattattttgtttttcctccaccacataacctgctggaaggcagggactccacttcagaaatcttggaaaaccctgtggcccacaagggtttgagctcatattcccatctggtgaggtgcagaaggcacagagctgtgccaggacatctcgttccaacccagccccactcctaatagtaataaaagtagctacatgtttactgtgcagctacttggtgccagacacctaccttatccctatcaataatctccacagccttgcaagttagagatatcatgcctattttgtagattatgaaatgaacactgaaaggtcaattactttgcccaaaattacacagcagagcatagaccaaacctgggactgtctgaccctgaaacatggatctttctgcaccgccctatactctgcgtcccagcaaagctaacctgtctgatgtggttgggcagaggtgctggacctcctggcggctcgctcctgtcttcagtgtggtaatgtcacaggcatttaaattgtggtttgcaagctcgcttgatttgggagaagtgccctcccagtctgtgaaattctcccaaactctaagggcctttttgcaaagcaaaacccaccctgcatttggctctgccaatatgtgattcagggggtgttttcccactcacagaatggagtgggaaactccacttattaagtacctcttacaatggaatgactctatggtgtaggtatcagggcactgaaatagaagccaggagctgcagggtcagtttatagctctgtatgtcactcactgtgatctccaaaagtcccgttgcctctttataccccattttccacattaaagtgtaagggattaaacaggattggcaattttcaagcttttaatattttcagcactgacagccgtttctcaaatcaaatctgtctctgaatcttaaaattcaaaaacagatcaaagtggactgctgtagtgagactgttccctttactctaaccctgccccggtctcaggctcctaggcagtcctgccccagggtttctgctaagcaggagccagttgttccctcagcctcctaaaagcgatggggagttgaggccagtggaatgcagctttggattcagaagccagaaaacaacagagattgtttgtgggaagtgagtcagagagattagacctctcttcaacatctgactagactctagaatggcattaagcaagtcactgaaccgctcagagcctctgtttccttatcactaaaagttaggacaattcttgcaatgaaatgagatactactaccaagtacttcagtgctgtgcccagcacagaacgaatacactcagtatgtttttcttttgtttcttctgtctctccagcacccaaagcagaaacagtatgggcagagagacgcctactgaatcaggtgtttatcagtattatgaaatacagtatataaaacccagcatttggagtccagaacaaattcaaattctggctcagtcactaagtagctatgtggtcttgggcaactggcttacattttggtaattctctcaatatgcaaaaatattctctcggccaggtgcggtggctcacgcctgtaatcccagcactttgggaggcagaggcgggcggatcacttgaagtcaggagtttgagaccagcctggccaacatggcgaaaccctgtctctactaaaaatacaaaaattagccaagcatggtcatgcatgcctgtagtcccatctatttgggaggctgaggcaggagaatcacttgaacccaggaggtggaggttgcagtgagccgagatcgaaccactgcactccagcttgggtgacagagccagactctgtctcaaaaaaaaaaaaaaaaaaaaaagaaaaggaaaaaaaactcctggcagacatgagagcaaaatcgagtacgaaatgggcagctgggacctcatatctactgaataattgtctgtttggaggttgagacatgactggggaggcctggcctgcccctgtgttaggtgatggggctggcccacccaggggtgtggcagcagggctggcccctgtgtgacttgtgataaccccaccctaccaaggaggaagactggataaaatgggcccctgagatggctgaaggcagctaaaggggcctaagagactatggggagaagggcagccagttcctaggcagccctgccccactgtttctgataagcaggaggcagttgttccctcagcctcctgaaagcaatgaggagttgaggccacgggaatgcagctttggattccagaagccaaggacctgttacaaaggtggttttctgggaagcaaattagagggattagacctggcttcgacatctgacttgactccaacctaccaaaggatctcccagttcacctgggagttaacacaccagggttctagtccttttgctcgctgtgtggctttgggtaagtccttgcccctctctggaccttgaggtcccattcatacaaaaagcagttggactcaggcctgccagcccccatttttgtggctcttccccgcccctccccatcctttggctatgggatagtctcccaggcacctccaaaaggaagtgtctaaaacagagctctccacctcctctccaagcccagctccccactgccctcttcctgccctgtccctgtctccgctgccctttagatcaggcaggcaggcaggcctagagcatccgccctgagacactgcctgttggctgccttaagacgccccttccttctctgcccgcagcctccccagcctctgcattcctctgcttcctgtctgctctgctcagcctgcaggattgatcttcccaaagccaggtgtcaaccaggccactaaccctacccactgctcagaaatcttcccacagcctcagcctggccccctcttatccatcccctccatacacacttgcctcagctcctcaaaacagtccacagccatcctccttccccacctttgcccctttcttcccttcctaaggaaatattggcccccttctctccaccaggctgaacccactcatcctgcaaaaccaagttcaacgccctgtcattttcttttttttttttttttttgagatggagtctcacactgtcgcccaggctagagtgcaatgggtgcactctcggctcactgcaacctctgcctcctaggttcaatcgattcttctgcctcagcctccagaggaactctgactacaggtgcacaccaccacacccagctaatttttgtatttttatttttatttctatttatttatttattgtgagatggagtttctctcttgttgcccatgctggagtgcaatggcacgatctcggctcattgcaacctccgcctcccaagttcaaaggattctcctatctcagcttctgaagtagctgggattacaggcatgtgccaccacacccggctaatttttttttatttttagtagagatggggtttcaccatgttggtcaggctggtctcaaactcctgacctcaagtgatccacccacctcggcctcccaaagtgctgggattacaggcgtgagccaccgtgcctggcctaatttttgtatttttagtagagacggagtttcaccacattggccagcctggtctcaaactccagacctcaagtgatccacccgcctcagcctcccaaagtgctggggttacaggtgtgagccactacgcctggcgcctgtcttcttctaatatgcctcttctgacctcctcactcccattggagccatggctcacttctggtcaggctccatgcactcaatcagccctgcctgccaggactgtagtgcccacttgatgagaaatcacctgtgaaaatgccaggcatggtctggcacacagtaggtgctcaagaaacaaatgttaatgccccagcttccttctgtcttgtgtccactaatttggcatttggagcatatttttgtacttcacgtaattaaatatttactgtgtgccaaggtcagtgtgtgacagagcactgtaggggaggcaaaaatgaaccaactctggaccttgccctgcagaagctctgtctactggcatgaggtaagacaggtccacagataacttacataagagagactgcaatctggacaagacagcctcagtgggagagggaaggagaaccctgtagatttgggtgcggggaggctgtggggagagcacagcctttcaggtaaagggacaaggttaggaaagcaagaaggtgtagcttgtgctcgtggagcccaggaaactccttgggctagaaaagatttggtggcactctatacagtgtatgtgtctgtctgtctatctaacatgaatggtactattttctcctattggtgtgcattgtacctaacaaaaaatccatgtcccaagtacttttctcttttctttctttctttttttttttggaatgaagtcttgctctgtcgcccaggctggagtgaagtggcgctatctcggcttactgcaacctcctcctcctggattcaagcagttctcctgcctcagcctccccagtagctgggattacaggcacgcaccaccacgcccagctaattttttttgtatttttagtagaggtggggtttaactgtgttggccaggctggtctcgaactcctgacctcaagtgatctgcccatctcagcctcccaaagtgctgagattataggtgtgagccgccatgcccggccaacagtacttttctctagaggtagaattgcaggggatttttctctttttgcttatctgcacttttctaaaagttctgccatgaacacgggcattttttgtggaataaacaaagtttaaatgttggctagatcagtgcttctttatgcataaggaaggattagttcttttttttctatttccaatttattgattctttgataaaatgcaatgcaataaaattattatttttttttagagacgtctccctctctcacccaggctggagtgcagtggtgcaatcatagcttactgcaaccttgaactcctgggctcaagcgatcctcttgctttagcctcctgagtagctgggactacaggtgtggaccaccacacctggctgatttttaaactttttgtagatacagggtctcgccatgttgcccaggctggtctcgaactcttgggctcaagccatcctgccacctcagcctcccaaagtgccgggattacaggcgtgagccaccatgcccagctagaaaattacttttttggctaggcaccgtggctcacgcctgtaatcccggcactttgggaggctgaggcaggcagattgcttgagcccaggagttcgagaccatcctgggaagcatggcaagacctccatctctacaaaaaattcgaaaattagctggatgttgtggtgcacacctgcagtcccagctacttgggaggctgagttgggagaaacagttgagcccgggaggtcaaggctgcagtgagtcgagattgcaccactgcactccagcctgggcgacagagaccctgtgtgaaaaaaaaaaaaagaagagaattttttttaaacagtcattgcttgctcagatgtttactttaaaagataataatgaacaagaagcagtcacataaaatacaagcccaaattttatatcattagattctgattgtcatgaaagtttctaaagacttactttcatttctcaacttaccttgttgaccagcagggattggtgaaccatgctgtgagtagcattgggctagagagaggggaggcaggaatctagaagagctgttttccagatgtgaccatctcctgaggacagggaccatgtctcatgtgccacccatcaccccccacagacagagcctgcagccaatgccccaggagccctcggttccaaccaactgatgcccctgtgcccactggcccacgccatgcagccccagtccgttctgcacagcggctacttccacccactacttcgggcctggcagacagccaccaccaccctcaatgcctccaacctcatctaccccatctttgtcacgtgagtctccaagaatgggccaggcctctgctctgctggttggggttggggttggggagggagtgttgactggagcgggcatcagtatggctgggggtggcaaagtgagctgtcagcttgaaattcaaggcactggaagcaggctacttggattaaggacaggaatcttaggaacaaaacaaactttgaaagaactcattcatcccatttggaaaattagaagaataacccttgcctgccatcctgagctcttgcagtaagacagaagctgagaaggtgctctgta

SEQ ID NO: 10643 - DNA, 547 bp, Homo sapiens
acgcggtctgtgggagaccggagcgggagacagcggtgacaggagcagcggccgggagcccttagggaggcagacagagcctgcagccaatgccccaggagccctcggttccaaccaactgatgcccctgtgcccactggcccacgccatgcagccccagtccgttctgcacagcggctacttccacccactacttcgggcctggcagacagccaccaccaccctcaatgcctccaacctcatctaccccatctttgtcacgtgagtctccaagaatgggccaggcctctgctctgctggttggggttggggttggggagggagtgttgactggagcgggcatcagtatggctgggggtggcaaagtgagctgtcagcttgaaattcaaggcactggaagcaggctacttggattaaggacaggaatcttaggaacaaaacaaactttgaaagaactcattcatcccatttggaaaattagaagaataacccttgcctgccatcctgagctcttgcagtaagacagaagctgagaaggtgctctgta

SEQ ID NO: 10644 - DNA, 6662 bp, Homo sapiens
acacaagcggcgcaccgttaagatggcggctgggctgcggaaacgcggccggtccggttccgcggcccaggcagagggactctgcaagcaatggctgcagcgcgcctggcaagagcggcgcctgctgctgcgggagccgcgctacacgctgctggtggccgcctgcctctgcctggcggaggtgggcatcaccttctgggtcattcacagggtggcatgtgagtgcgccgagggggaggggaggggagggagggagacctgaacccgcgacccaaactggatctcagacctggaactccaaaccagactctgtatccactcactcgtcaattgcgaacccatccatatcccttacctgagcgccaagcctgctctacagaaaaccggatcttaatctgcccgcatggcagaggtggataccctagagattggccttctgcactgaacttacagcctgcaaaccagcttagaagtcagatttgagccaaaattgttgtactgctgctgctgctgcttttctctgtggctttggacacctcaggtctcctcctggatctcagctttttccatgtgttcagttctgtgatctttgaacgtcccttctcaatgatggcatcttgtgaccacttgagtccattaggcattattggctactcctttccaggctgaaactatactctaggcttaaggcacttggctttcttgctaaagactcttaattcaacaaatatttatttagtgcttattatatgcctagcattatgctggttaccagagagaggtacagtggtgaataagagatgcatttctgccgggcgcggtggctcacgcctgtaatcccagcactttgggaggccgaggcgggcggatcacgaggtcaggagatcgaggccatcctggctaacacggtgaaaccccgtctctactgaaaaaaaaaaaaaaaaaagaatttagccgggcatggtggcgggcgcctgtagtcccagctactcgggaggctgaggcaggagaatggcgtgaacccgggaggcagagctttcagtgagccgagatcacgccactgcactccagcctgggcgacagagcaagactccgtctcaaaaaaaaaaaaagaaaaaggatgcatttctaactcgggcctggacagtaagttagcaggcaattataatgcatcataatcatggtagtagtaacacaggataccataaagggcataggaagtcacttaaaccaggttggaggagtcagcaaaggcttcatagagccacccttggaaggtaggaattagctatttaaggaaagaagaaaaaggtgaggggaaggagtgctgtggacagaggatcctctattaaaaatctccagctaggctgggcgcagcggcacacgcctgtaatcccagcactttggtaggcctaggcgggtggatctcctgaggtcaggaatttgagaccagcctggccaacatgatgaaatcctgtctctactaaaaatacaaaaattagctgggcgtggtggcatatgcctgtaatcccagctactcgggaggttgagacaggagaattgcttgaacccgggaggtggaggttgcagtgagccgagattgcgccactgtactccagcctgggtgacagagcaagctccgtgtcaaaaaaaaaaaaaattcagttagactgggcacggtggctcatgcctgtaatcccagcactttgggaggctgaggtgggcggatcacttgggggcaggagttaaagaccagcctggctgggcacggtggcttatgcctgtaattctagcactttgggagcccgaggcgggcagatcacctgaggtcaggagttcaacaccagcctggccaatatgttgacaccctgtctctactaaaatagaaaaattagctgggcatgatggcaagtgcctgtaatcccagctacttgggaggctgagatgggaaaatggctcgaaccggggagatggtggttgcagtgagctgagatcgcaccactgcactccagcctgggtggctgagcgagaccctgtctcaaaagaaaaacaaacaaacaaaccagcctggccaacacggtgaaaccccatctctactaaaaatacaaaacttaaaaaattagccaagcatggtggcacacacctgtagtcccagctactcgggagactgaggcaggagaatcacttgaacccgggaggcggaggttgcagtgagctgagatcgtaccactgcactccagtctgggtgacagagtgagactctgtcaaaaaaaaaaaaaaaagaagacagcctggttcctttgaggaactgaaatgatttttttagagctagagtgtagaaatcaagtgaagggagtagtaagagatgggaatgcagaaactgaggccagatcatgaaggaatttgaaagctttgttaagaagatagcatgataattaagaacttgggaccctgcaagcttcaatcccaactccaccatcctagctcaattatcttaagccagtcacttaacctaattaattcttaggctccccttcaaaaaatgggaataatacagagttttctttatcttaagggtcttggggaatcattgagaggttttaagcagaggcctgttatgatttgtattttaggaggagctctttggtgtacgaggtggaaaatatattgtagcagggtgaaagtagaagtcaggagcctaattagcaggctattgtatactcattggggctagagattactttaggctcaaatttgagtatgtagtagcagagaaggatgagatagagatatttacggtgaggaacaggcagaacttgttgacgaagggttgcaaatgagagaggagggagtatcaaagatgttactcaggttcgtgacctggtagctaagaggtcggtggtgccatttgcggaacccaggaaaaggagtagattggaatgggaagaaagatcacaaattcacttatagaaatgttgagtttgagatgcctgggctcacccagagaatgtcagataaagagttagattaagaggtagtaaagccctgggaattggctgaaagtctgtgttttgatggtctggaggcatggggagggtggcagacaagttctagactcagaagtaaccagatcatcttgtcttcttccagacacagagattgactggaaggcctacatggccgaggtagaaggcgtcatcaatggtacctatgactatacccaactgcagggtgacaccggaccacttgtgtgagtggggacaggaagttcagggaggatgtgaggggctggttaggtactagtctgtgtgacctgacccaggctcacattttctctcatcttccaggtacccagctggtttcgtgtacatctttatggggttgtactatgccaccagccgaggcactgacatccgcatggcccagaacatctttgctgtgctctacctggctaccttgctgcttgtcttcttgatctatcaccagacctgcaaggtgagtccatgctaccagggctagagggccccagcctgggagggctgggtggtggggatggctcaggcttgctgagctgaccttgtaccttactgtgttttccctttaggtacctcccttcgtctttttcttcatgtgctgcgcctcttaccgtgtccactccatctttgtgctgcggctcttcaatgacccagtggccatggtgctgctcttcctcagtatcaacctcctgctggcccagcgctggggctggggttgctgctttttcaggtcaacacctcttcctttctggtcccctctcgttttctgcatttccatctcttcccaatttcctgcagcagagggagtaaaggagtagccaagacagcatgggtcactcagggctccacaaagcgagtccaggatctatagaaagtttctgccctgccatcccccaacatacacacatgccctctttccatcctgtcttcctcccagacagcattccttgttggaattagtccttcacattctaaatactcagtatatgctcattcgcatctagtaggcatagagactatgtatctgcctcctgcctactccaggctcttccctccaacagttgtgagtgtaggtcccatcttggagtttgttggcgtggcggcgggggggaggttgctgtggtgatggtggggggtatgtctttgggtgttgtgtgcatggccctggagctgatctccacccttcctctcccctgctcaccccagcctggcagtctctgtgaagatgaatgtgctgctcttcgcccctgggttactgtttcttctcctcacacagtttggcttccgtggggccctccccaagctgggaatctgtgctggccttcaggtacccccatctcacccttcctctttctaatcaaggagaagccacttgtcttgattgaggggctctatccctgagactccctcaaagccaagagacagggttttggagttgattctgagctagggagccactatcgctaggctgtagtttccatagctgtaaaatagggtattaaatttgatggtctctgagagcctttttgctttttttaattttaagttttgagatgggctcttgctgggttgcccaggctggtctcaaactcctgggctcaagcaatcctcctgccttggcctcccaaagcgctaggattttgggcatgagccaccctgcctggcttctgagagccttccttgctctgcccagttatgacttggtgaatccacaccttaaagcattgttatgacctgcctcctgagcttctttggccccaggcactggcctgggccggggggtggggaacgtggttttcctgctatttctagtgggaattggggaacctctgaggcctacatccccgtcccacacccctcaatgagtagcatgaaggctggtcattgggaatgagccttggcagctctgctgacatcacaccaatcctcaggtggtgctggggctgcccttcctgctggagaaccccagcggctacctgtcccgctcctttgaccttggccgccagtttctgttccactggacagtgaactggcgcttcctcccagaggcgctcttcctgcatcgagccttccacctggccctgttgactgcccacctcaccctgctcctgctgtttgccctctgcaggtggcacaggtgagaaaaggcagtagtgccatgggcagagttgggggaaggagtgaagggcctaagccttaggggctgcttgggggaagtgtcagttaagctcatggggtgagtctagagtttgactcacaaaaggggcttgataactgtctgaatggcttttctccaggacaggggaaagtatcttgtcgctgctgagggatccctccaaaaggaaggttccaccccagccccttacacccaaccatatcctttaaattgtgggaaggtaagtcttgccctctctaggtgctgacagagtcctggtcaggtatcccttgacagctggtgacctgggcgaggaaaggggaccccaatcatagaagtcctattctgcaccactgtgctgagcacttcacatattgaaggatatttgattcttaattctaaatacgagctactcttatgagtacttctccctggtactatcataagagatttacatatgttctaatattgaaagctcacaagagaccccgagacagggaggtacacttacatttactattctcattttacagatggaaaaattaagacttcatgaggttaagtaacttaccaaggtcacacagccagtaagttaggggttcaaacccacaagaccttatggccctaggtattactctctccatattccatatttggttgaggagcaggtccagagaggttaataaacttgcccaaaggcatgcatcaaggaatggcagagccagagggctatgtgacctaaaaactattgcccctctgttttgggatagtcccccccacacacactcctgcccttggccttgaccaccgcatacagatcgtttctaccctcttcacctccaacttcattggcatctgcttcagccgctccctccactaccagttctacgtctggtatttccacacactgccctacctcctgtgggccatgcctgcacgctggctcacacacctgctcaggtaccagctgggacaacctgggggagtgggaagggatagggagttcctgttgggggtttatgtctagggcatgaggagctgcaggtctgcaggccttgcaactggatgaaacgtggaacctgtttctcatctccaggttgttggtgctggggctcatcgagctctcctggaacacatacccttccacatcctgcagctctgctgccctgcacatatgccatgccgtcatcctgctgcagctctggctgggcccgcagcctttccccaagagcacccaacacagcaagaaagcccactgaagtccacccctttccctcaggacctgagtctaccctcaggacctggggttggttggactctgcccttccaaataaaccttgctaagtccaactctgtgcaacctacatggaggtgggggcagccgatgcctggtccaggctgtgagggacacgtatggagcagataaagaattcactcaagcagtcctaagaggcactttattgcataggatt

SEQ ID NO: 10645 - DNA, 1552 bp, Homo sapiens
acacaagcggcgcaccgttaagatggcggctgggctgcggaaacgcggccggtccggttccgcggcccaggcagagggactctgcaagcaatggctgcagcgcgcctggcaagagcggcgcctgctgctgcgggagccgcgctacacgctgctggtggccgcctgcctctgcctggcggaggtgggcatcaccttctgggtcattcacagggtggcatacacagagattgactggaaggcctacatggccgaggtagaaggcgtcatcaatggtacctatgactatacccaactgcagggtgacaccggaccacttgtgtacccagctggtttcgtgtacatctttatggggttgtactatgccaccagccgaggcactgacatccgcatggcccagaacatctttgctgtgctctacctggctaccttgctgcttgtcttcttgatctatcaccagacctgcaaggtacctcccttcgtctttttcttcatgtgctgcgcctcttaccgtgtccactccatctttgtgctgcggctcttcaatgacccagtggccatggtgctgctcttcctcagtatcaacctcctgctggcccagcgctggggctggggttgctgctttttcagcctggcagtctctgtgaagatgaatgtgctgctcttcgcccctgggttactgtttcttctcctcacacagtttggcttccgtggggccctccccaagctgggaatctgtgctggccttcaggtggtgctggggctgcccttcctgctggagaaccccagcggctacctgtcccgctcctttgaccttggccgccagtttctgttccactggacagtgaactggcgcttcctcccagaggcgctcttcctgcatcgagccttccacctggccctgttgactgcccacctcaccctgctcctgctgtttgccctctgcaggtggcacaggacaggggaaagtatcttgtcgctgctgagggatccctccaaaaggaaggttccaccccagccccttacacccaaccagatcgtttctaccctcttcacctccaacttcattggcatctgcttcagccgctccctccactaccagttctacgtctggtatttccacacactgccctacctcctgtgggccatgcctgcacgctggctcacacacctgctcaggttgttggtgctggggctcatcgagctctcctggaacacatacccttccacatcctgcagctctgctgccctgcacatatgccatgccgtcatcctgctgcagctctggctgggcccgcagcctttccccaagagcacccaacacagcaagaaagcccactgaagtccacccctttccctcaggacctgagtctaccctcaggacctggggttggttggactctgcccttccaaataaaccttgctaagtccaactctgtgcaacctacatggaggtgggggcagccgatgcctggtccaggctgtgagggacacgtatggagcagataaagaattcactcaagcagtcctaagaggcactttattgcataggatt

SEQ ID NO: 10646 - DNA, 6662 bp, Homo sapiens; identical to SEQ ID NO: 10644

SEQ ID NO: 10647 - DNA, 1452 bp, Homo sapiens
acacaagcggcgcaccgttaagatggcggctgggctgcggaaacgcggccggtccggttccgcggcccaggcagagggactctgcaagcaatggctgcagcgcgcctggcaagagcggcgcctgctgctgcgggagccgcgctacacgctgctggtggccgcctgcctctgcctggcggaggtgggcatcaccttctgggtcattcacagggtggcatgtacccagctggtttcgtgtacatctttatggggttgtactatgccaccagccgaggcactgacatccgcatggcccagaacatctttgctgtgctctacctggctaccttgctgcttgtcttcttgatctatcaccagacctgcaaggtacctcccttcgtctttttcttcatgtgctgcgcctcttaccgtgtccactccatctttgtgctgcggctcttcaatgacccagtggccatggtgctgctcttcctcagtatcaacctcctgctggcccagcgctggggctggggttgctgctttttcagcctggcagtctctgtgaagatgaatgtgctgctcttcgcccctgggttactgtttcttctcctcacacagtttggcttccgtggggccctccccaagctgggaatctgtgctggccttcaggtggtgctggggctgcccttcctgctggagaaccccagcggctacctgtcccgctcctttgaccttggccgccagtttctgttccactggacagtgaactggcgcttcctcccagaggcgctcttcctgcatcgagccttccacctggccctgttgactgcccacctcaccctgctcctgctgtttgccctctgcaggtggcacaggacaggggaaagtatcttgtcgctgctgagggatccctccaaaaggaaggttccaccccagccccttacacccaaccagatcgtttctaccctcttcacctccaacttcattggcatctgcttcagccgctccctccactaccagttctacgtctggtatttccacacactgccctacctcctgtgggccatgcctgcacgctggctcacacacctgctcaggttgttggtgctggggctcatcgagctctcctggaacacatacccttccacatcctgcagctctgctgccctgcacatatgccatgccgtcatcctgctgcagctctggctgggcccgcagcctttccccaagagcacccaacacagcaagaaagcccactgaagtccacccctttccctcaggacctgagtctaccctcaggacctggggttggttggactctgcccttccaaataaaccttgctaagtccaactctgtgcaacctacatggaggtgggggcagccgatgcctggtccaggctgtgagggacacgtatggagcagataaagaattcactcaagcagtcctaagaggcactttattgcataggatt

SEQ ID NO: 10648 - DNA, 6049 bp, Homo sapiens
ctgggctgcggaaacgcggccggtccggttccgcggcccaggcagagggactctgcaagcaatggctgcagcgcgcctggcaagagcggcgcctgctgctgcgggagccgcgctacacgctgctggtggccgcctgcctctgcctggcggaggtgggcatcaccttctgggtcattcacagggtggcatgtgagtgcgccgagggggaggggaggggagggagggagacctgaacccgcgacccaaactggatctcagacctggaactccaaaccagactctgtatccactcactcgtcaattgcgaacccatccatatcccttacctgagcgccaagcctgctctacagaaaaccggatcttaatctgcccgcatggcagaggtggataccctagagattggccttctgcactgaacttacagcctgcaaaccagcttagaagtcagatttgagccaaaattgttgtactgctgctgctgctgcttttctctgtggctttggacacctcaggtctcctcctggatctcagctttttccatgtgttcagttctgtgatctttgaacgtcccttctcaatgatggcatcttgtgaccacttgagtccattaggcattattggctactcctttccaggctgaaactatactctaggcttaaggcacttggctttcttgctaaagactcttaattcaacaaatatttatttagtgcttattatatgcctagcattatgctggttaccagagagaggtacagtggtgaataagagatgcatttctgccgggcgcggtggctcacgcctgtaatcccagcactttgggaggccgaggcgggcggatcacgaggtcaggagatcgaggccatcctggctaacacggtgaaaccccgtctctactgaaaaaaaaaaaaaaaaaagaatttagccgggcatggtggcgggcgcctgtagtcccagctactcgggaggctgaggcaggagaatggcgtgaacccgggaggcagagctttcagtgagccgagatcacgccactgcactccagcctgggcgacagagcaagactccgtctcaaaaaaaaaaaaagaaaaaggatgcatttctaactcgggcctggacagtaagttagcaggcaattataatgcatcataatcatggtagtagtaacacaggataccataaagggcataggaagtcacttaaaccaggttggaggagtcagcaaaggcttcatagagccacccttggaaggtaggaattagctatttaaggaaagaagaaaaaggtgaggggaaggagtgctgtggacagaggatcctctattaaaaatctccagctaggctgggcgcagcggcacacgcctgtaatcccagcactttggtaggcctaggcgggtggatctcctgaggtcaggaatttgagaccagcctggccaacatgatgaaatcctgtctctactaaaaatacaaaaattagctgggcgtggtggcatatgcctgtaatcccagctactcgggaggttgagacaggagaattgcttgaacccgggaggtggaggttgcagtgagccgagattgcgccactgtactccagcctgggtgacagagcaagctccgtgtcaaaaaaaaaaaaaattcagttagactgggcacggtggctcatgcctgtaatcccagcactttgggaggctgaggtgggcggatcacttgggggcaggagttaaagaccagcctggctgggcacggtggcttatgcctgtaattctagcactttgggagcccgaggcgggcagatcacctgaggtcaggagttcaacaccagcctggccaatatgttgacaccctgtctctactaaaatagaaaaattagctgggcatgatggcaagtgcctgtaatcccagctacttgggaggctgagatgggaaaatggctcgaaccggggagatggtggttgcagtgagctgagatcgcaccactgcactccagcctgggtggctgagcgagaccctgtctcaaaagaaaaacaaacaaacaaaccagcctggccaacacggtgaaaccccatctctactaaaaatacaaaacttaaaaaattagccaagcatggtggcacacacctgtagtcccagctactcgggagactgaggcaggagaatcacttgaacccgggaggcggaggttgcagtgagctgagatcgtaccactgcactccagtctgggtgacagagtgagactctgtcaaaaaaaaaaaaaaaagaagacagcctggttcctttgaggaactgaaatgatttttttagagctagagtgtagaaatcaagtgaagggagtagtaagagatgggaatgcagaaactgaggccagatcatgaaggaatttgaaagctttgttaagaagatagcatgataattaagaacttgggaccctgcaagcttcaatcccaactccaccatcctagctcaattatcttaagccagtcacttaacctaattaattcttaggctccccttcaaaaaatgggaataatacagagttttctttatcttaagggtcttggggaatcattgagaggttttaagcagaggcctgttatgatttgtattttaggaggagctctttggtgtacgaggtggaaaatatattgtagcagggtgaaagtagaagtcaggagcctaattagcaggctattgtatactcattggggctagagattactttaggctcaaatttgagtatgtagtagcagagaaggatgagatagagatatttacggtgaggaacaggcagaacttgttgacgaagggttgcaaatgagagaggagggagtatcaaagatgttactcaggttcgtgacctggtagctaagaggtcggtggtgccatttgcggaacccaggaaaaggagtagattggaatgggaagaaagatcacaaattcacttatagaaatgttgagtttgagatgcctgggctcacccagagaatgtcagataaagagttagattaagaggtagtaaagccctgggaattggctgaaagtctgtgttttgatggtctggaggcatggggagggtggcagacaagttctagactcagaagtaaccagatcatcttgtcttcttccagacacagagattgactggaaggcctacatggccgaggtagaaggcgtcatcaatggtacctatgactatacccaactgcagggtgacaccggaccacttgtgtgagtggggacaggaagttcagggaggatgtgaggggctggttaggtactagtctgtgtgacctgacccaggctcacattttctctcatcttccaggtacccagctggtttcgtgtacatctttatggggttgtactatgccaccagccgaggcactgacatccgcatggcccagaacatctttgctgtgctctacctggctaccttgctgcttgtcttcttgatctatcaccagacctgcaaggtgagtccatgctaccagggctagagggccccagcctgggagggctgggtggtggggatggctcaggcttgctgagctgaccttgtaccttactgtgttttccctttaggtacctcccttcgtctttttcttcatgtgctgcgcctcttaccgtgtccactccatctttgtgctgcggctcttcaatgacccagtggccatggtgctgctcttcctcagtatcaacctcctgctggcccagcgctggggctggggttgctgctttttcaggtcaacacctcttcctttctggtcccctctcgttttctgcatttccatctcttcccaatttcctgcagcagagggagtaaaggagtagccaagacagcatgggtcactcagggctccacaaagcgagtccaggatctatagaaagtttctgccctgccatcccccaacatacacacatgccctctttccatcctgtcttcctcccagacagcattccttgttggaattagtccttcacattctaaatactcagtatatgctcattcgcatctagtaggcatagagactatgtatctgcctcctgcctactccaggctcttccctccaacagttgtgagtgtaggtcccatcttggagtttgttggcgtggcggcgggggggaggttgctgtggtgatggtggggggtatgtctttgggtgttgtgtgcatggccctggagctgatctccacccttcctctcccctgctcaccccagcctggcagtctctgtgaagatgaatgtgctgctcttcgcccctgggttactgtttcttctcctcacacagtttggcttccgtggggccctccccaagctgggaatctgtgctggccttcaggtacccccatctcacccttcctctttctaatcaaggagaagccacttgtcttgattgaggggctctatccctgagactccctcaaagccaagagacagggttttggagttgattctgagctagggagccactatcgctaggctgtagtttccatagctgtaaaatagggtattaaatttgatggtctctgagagcctttttgctttttttaattttaagttttgagatgggctcttgctgggttgcccaggctggtctcaaactcctgggctcaagcaatcctcctgccttggcctcccaaagcgctaggattttgggcatgagccaccctgcctggcttctgagagccttccttgctctgcccagttatgacttggtgaatccacaccttaaagcattgttatgacctgcctcctgagcttctttggccccaggcactggcctgggccggggggtggggaacgtggttttcctgctatttctagtgggaattggggaacctctgaggcctacatccccgtcccacacccctcaatgagtagcatgaaggctggtcattgggaatgagccttggcagctctgctgacatcacaccaatcctcaggtggtgctggggctgcccttcctgctggagaaccccagcggctacctgtcccgctcctttgaccttggccgccagtttctgttccactggacagtgaactggcgcttcctcccagaggcgctcttcctgcatcgagccttccacctggccctgttgactgcccacctcaccctgctcctgctgtttgccctctgcaggtggcacaggtgagaaaaggcagtagtgccatgggcagagttgggggaaggagtgaagggcctaagccttaggggctgcttgggggaagtgtcagttaagctcatggggtgagtctagagtttgactcacaaaaggggcttgataactgtctgaatggcttttctccaggacaggggaaagtatcttgtcgctgctgagggatccctccaaaaggaaggttccaccccagccccttacacccaaccatatcctttaaattgtgggaaggtaagtcttgccctctctaggtgctgacagagtcctggtcaggtatcccttgacagctggtgacctgggcgaggaaaggggaccccaatcatagaagtcctattctgcaccactgtgctgagcacttcacatattgaaggatatttgattcttaattctaaatacgagctactcttatgagtacttctccctggtactatcataagagatttacatatgttctaatattgaaagctcacaagagaccccgagacagggaggtacacttacatttactattctcattttacagatggaaaaattaagacttcatgaggttaagtaacttaccaaggtcacacagccagtaagttaggggttcaaacccacaagaccttatggccctaggtattactctctccatattccatatttggttgaggagcaggtccagagaggttaataaacttgcccaaaggcatgcatcaaggaatggcagagccagagggctatgtgacctaaaaactattgcccctctgttttgggatagtcccccccacacacactcctgcccttggccttgaccaccgcatacagatcgtttctaccctcttcacctccaacttcattggcatctgcttcagccgctccctccactaccagttcta

SEQ ID NO: 10649 - DNA, 814 bp, Homo sapiens
ctgggctgcggaaacgcggccggtccggttccgcggcccaggcagagggactctgcaagcaatggctgcagcgcgcctggcaagagcggcgcctgctgctgcgggagccgcgctacacgctgctggtggccgcctgcctctgcctggcggaggtgggcatcaccttctgggtcattcacagggtggcatgtacccagctggtttcgtgtacatctttatggggttgtactatgccaccagccgaggcactgacatccgcatggcccagaacatctttgctgtgctctacctggctaccttgctgcttgtcttcttgatctatcaccagacctgcaagcctggcagtctctgtgaagatgaatgtgctgctcttcgcccctgggttactgtttcttctcctcacacagtttggcttccgtggggccctccccaagctgggaatctgtgctggccttcaggtggtgctggggctgcccttcctgctggagaaccccagcggctacctgtcccgctcctttgaccttggccgccagtttctgttccactggacagtgaactggcgcttcctcccagaggcgctcttcctgcatcgagccttccacctggccctgttgactgcccacctcaccctgctcctgctgtttgccctctgcaggtggcacaggacaggggaaagtatcttgtcgctgctgagggatccctccaaaaggaaggttccaccccagccccttacacccaaccagatcgtttctaccctcttcacctccaacttcattggcatctgcttcagccgctccctccactaccagttcta

SEQ ID NO: 10650 - DNA, 5159 bp, Homo sapiens
accgttaagatggcggctgggctgcggaaacgcggccggtccggttccgcggcccaggcagagggactctgcaagcaatggctgcagcgcgcctggcaagagcggcgcctgctgctgcgggagccgcgctacacgctgctggtggccgcctgcctctgcctggcggaggtgggcatcaccttctgggtcattcacagggtggcatgtgagtgcgccgagggggaggggaggggagggagggagacctgaacccgcgacccaaactggatctcagacctggaactccaaaccagactctgtatccactcactcgtcaattgcgaacccatccatatcccttacctgagcgccaagcctgctctacagaaaaccggatcttaatctgcccgcatggcagaggtggataccctagagattggccttctgcactgaacttacagcctgcaaaccagcttagaagtcagatttgagccaaaattgttgtactgctgctgctgctgcttttctctgtggctttggacacctcaggtctcctcctggatctcagctttttccatgtgttcagttctgtgatctttgaacgtcccttctcaatgatggcatcttgtgaccacttgagtccattaggcattattggctactcctttccaggctgaaactatactctaggcttaaggcacttggctttcttgctaaagactcttaattcaacaaatatttatttagtgcttattatatgcctagcattatgctggttaccagagagaggtacagtggtgaataagagatgcatttctgccgggcgcggtggctcacgcctgtaatcccagcactttgggaggccgaggcgggcggatcacgaggtcaggagatcgaggccatcctggctaacacggtgaaaccccgtctctactgaaaaaaaaaaaaaaaaaagaatttagccgggcatggtggcgggcgcctgtagtcccagctactcgggaggctgaggcaggagaatggcgtgaacccgggaggcagagctttcagtgagccgagatcacgccactgcactccagcctgggcgacagagcaagactccgtctcaaaaaaaaaaaaagaaaaaggatgcatttctaactcgggcctggacagtaagttagcaggcaattataatgcatcataatcatggtagtagtaacacaggataccataaagggcataggaagtcacttaaaccaggttggaggagtcagcaaaggcttcatagagccacccttggaaggtaggaattagctatttaaggaaagaagaaaaaggtgaggggaaggagtgctgtggacagaggatcctctattaaaaatctccagctaggctgggcgcagcggcacacgcctgtaatcccagcactttggtaggcctaggcgggtggatctcctgaggtcaggaatttgagaccagcctggccaacatgatgaaatcctgtctctactaaaaatacaaaaattagctgggcgtggtggcatatgcctgtaatcccagctactcgggaggttgagacaggagaattgcttgaacccgggaggtggaggttgcagtgagccgagattgcgccactgtactccagcctgggtgacagagcaagctccgtgtcaaaaaaaaaaaaaattcagttagactgggcacggtggctcatgcctgtaatcccagcactttgggaggctgaggtgggcggatcacttgggggcaggagttaaagaccagcctggctgggcacggtggcttatgcctgtaattctagcactttgggagcccgaggcgggcagatcacctgaggtcaggagttcaacaccagcctggccaatatgttgacaccctgtctctactaaaatagaaaaattagctgggcatgatggcaagtgcctgtaatcccagctacttgggaggctgagatgggaaaatggctcgaaccggggagatggtggttgcagtgagctgagatcgcaccactgcactccagcctgggtggctgagcgagaccctgtctcaaaagaaaaacaaacaaacaaaccagcctggccaacacggtgaaaccccatctctactaaaaatacaaaacttaaaaaattagccaagcatggtggcacacacctgtagtcccagctactcgggagactgaggcaggagaatcacttgaacccgggaggcggaggttgcagtgagctgagatcgtaccactgcactccagtctgggtgacagagtgagactctgtcaaaaaaaaaaaaaaaagaagacagcctggttcctttgaggaactgaaatgatttttttagagctagagtgtagaaatcaagtgaagggagtagtaagagatgggaatgcagaaactgaggccagatcatgaaggaatttgaaagctttgttaagaagatagcatgataattaagaacttgggaccctgcaagcttcaatcccaactccaccatcctagctcaattatcttaagccagtcacttaacctaattaattcttaggctccccttcaaaaaatgggaataatacagagttttctttatcttaagggtcttggggaatcattgagaggttttaagcagaggcctgttatgatttgtattttaggaggagctctttggtgtacgaggtggaaaatatattgtagcagggtgaaagtagaagtcaggagcctaattagcaggctattgtatactcattggggctagagattactttaggctcaaatttgagtatgtagtagcagagaaggatgagatagagatatttacggtgaggaacaggcagaacttgttgacgaagggttgcaaatgagagaggagggagtatcaaagatgttactcaggttcgtgacctggtagctaagaggtcggtggtgccatttgcggaacccaggaaaaggagtagattggaatgggaagaaagatcacaaattcacttatagaaatgttgagtttgagatgcctgggctcacccagagaatgtcagataaagagttagattaagaggtagtaaagccctgggaattggctgaaagtctgtgttttgatggtctggaggcatggggagggtggcagacaagttctagactcagaagtaaccagatcatcttgtcttcttccagacacagagattgactggaaggcctacatggccgaggtagaaggcgtcatcaatggtacctatgactatacccaactgcagggtgacaccggaccacttgtgtgagtggggacaggaagttcagggaggatgtgaggggctggttaggtactagtctgtgtgacctgacccaggctcacattttctctcatcttccaggtacccagctggtttcgtgtacatctttatggggttgtactatgccaccagccgaggcactgacatccgcatggcccagaacatctttgctgtgctctacctggctaccttgctgcttgtcttcttgatctatcaccagacctgcaaggtgagtccatgctaccagggctagagggccccagcctgggagggctgggtggtggggatggctcaggcttgctgagctgaccttgtaccttactgtgttttccctttaggtacctcccttcgtctttttcttcatgtgctgcgcctcttaccgtgtccactccatctttgtgctgcggctcttcaatgacccagtggccatggtgctgctcttcctcagtatcaacctcctgctggcccagcgctggggctggggttgctgctttttcaggtcaacacctcttcctttctggtcccctctcgttttctgcatttccatctcttcccaatttcctgcagcagagggagtaaaggagtagccaagacagcatgggtcactcagggctccacaaagcgagtccaggatctatagaaagtttctgccctgccatcccccaacatacacacatgccctctttccatcctgtcttcctcccagacagcattccttgttggaattagtccttcacattctaaatactcagtatatgctcattcgcatctagtaggcatagagactatgtatctgcctcctgcctactccaggctcttccctccaacagttgtgagtgtaggtcccatcttggagtttgttggcgtggcggcgggggggaggttgctgtggtgatggtggggggtatgtctttgggtgttgtgtgcatggccctggagctgatctccacccttcctctcccctgctcaccccagcctggcagtctctgtgaagatgaatgtgctgctcttcgcccctgggttactgtttcttctcctcacacagtttggcttccgtggggccctccccaagctgggaatctgtgctggccttcaggtacccccatctcacccttcctctttctaatcaaggagaagccacttgtcttgattgaggggctctatccctgagactccctcaaagccaagagacagggttttggagttgattctgagctagggagccactatcgctaggctgtagtttccatagctgtaaaatagggtattaaatttgatggtctctgagagcctttttgctttttttaattttaagttttgagatgggctcttgctgggttgcccaggctggtctcaaactcctgggctcaagcaatcctcctgccttggcctcccaaagcgctaggattttgggcatgagccaccctgcctggcttctgagagccttccttgctctgcccagttatgacttggtgaatccacaccttaaagcattgttatgacctgcctcctgagcttctttggccccaggcactggcctgggccggggggtggggaacgtggttttcctgctatttctagtgggaattggggaacctctgaggcctacatccccgtcccacacccctcaatgagtagcatgaaggctggtcattgggaatgagccttggcagctctgctgacatcacaccaatcctcaggtggtgctggggctgcccttcctgctggagaaccccagcggctacctgtcccgctcctttgaccttggccgccagtttctgttccactggacagtgaactggcgcttcctcccagaggcgctcttcctgcatcgagccttccacctggccctgttgactgcccacctcaccctgctcctgctgtttgccctctgcaggtggcacag

SEQ ID NO: 10651 - DNA, 904 bp, Homo sapiens
accgttaagatggcggctgggctgcggaaacgcggccggtccggttccgcggcccaggcagagggactctgcaagcaatggctgcagcgcgcctggcaagagcggcgcctgctgctgcgggagccgcgctacacgctgctggtggccgcctgcctctgcctggcggagacacagagattgactggaaggcctacatggccgaggtagaaggcgtcatcaatggtacctatgactatacccaactgcagggtgacaccggaccacttgtgtacccagctggtttcgtgtacatctttatggggttgtactatgccaccagccgaggcactgacatccgcatggcccagaacatctttgctgtgctctacctggctaccttgctgcttgtcttcttgatctatcaccagacctgcaaggtacctcccttcgtctttttcttcatgtgctgcgcctcttaccgtgtccactccatctttgtgctgcggctcttcaatgacccagtggccatggtgctgctcttcctcagtatcaacctcctgctggcccagcgctggggctggggttgctgctttttcagcctggcagtctctgtgaagatgaatgtgctgctcttcgcccctgggttactgtttcttctcctcacacagtttggcttccgtggggccctccccaagctgggaatctgtgctggccttcaggtggtgctggggctgcccttcctgctggagaaccccagcggctacctgtcccgctcctttgaccttggccgccagtttctgttccactggacagtgaactggcgcttcctcccagaggcgctcttcctgcatcgagccttccacctggccctgttgactgcccacctcaccctgctcctgctgtttgccctctgcaggtggcacag

SEQ ID NO: 10652 - DNA, 7124 bp, Homo sapiens
ttcgaagaatcctccggctgggaaaactatcgtccagaccctgaatcctccggctgtactgccaagtcatttcctagggccgcactcaaggtgtcagactcacgtgggctcatcactgcgtcctctcatattttcaatatgaatgacttttatcaggaaatctgaaaattagtgaaaggttcatttttctcagcatccggaaggctcgaagggcaggcaggaggggcgcgaacaggggctttgccctcctggagagacagcatgaacacagatgttcccagcgcaggcgaaggagaatgctggcttcagcggttgtgggggaggtaggcaggaatgttgcttttctggacattcgttctaaattagcgcctgtgtacccagggctgggtataaactgaggagtaagacattgtccctgctcctatggagcgtggagtgcatcagaggagacaaatgcagaaaaattacattttagtggagtaaatgaagactggctactcggatcggcgcttagcctggtgggacgccaggcacgggaagcggaacctaagtgtcgaaggttcgggtttccgggggtggtgggcccacacaagcggcgcaccgttaagatggcggctgggctgcggaaacgcggccggtccggttccgcggcccaggcagagggactctgcaagcaatggctgcagcgcgcctggcaagagcggcgcctgctgctgcgggagccgcgctacacgctgctggtggccgcctgcctctgcctggcggaggtgggcatcaccttctgggtcattcacagggtggcatgtgagtgcgccgagggggaggggaggggagggagggagacctgaacccgcgacccaaactggatctcagacctggaactccaaaccagactctgtatccactcactcgtcaattgcgaacccatccatatcccttacctgagcgccaagcctgctctacagaaaaccggatcttaatctgcccgcatggcagaggtggataccctagagattggccttctgcactgaacttacagcctgcaaaccagcttagaagtcagatttgagccaaaattgttgtactgctgctgctgctgcttttctctgtggctttggacacctcaggtctcctcctggatctcagctttttccatgtgttcagttctgtgatctttgaacgtcccttctcaatgatggcatcttgtgaccacttgagtccattaggcattattggctactcctttccaggctgaaactatactctaggcttaaggcacttggctttcttgctaaagactcttaattcaacaaatatttatttagtgcttattatatgcctagcattatgctggttaccagagagaggtacagtggtgaataagagatgcatttctgccgggcgcggtggctcacgcctgtaatcccagcactttgggaggccgaggcgggcggatcacgaggtcaggagatcgaggccatcctggctaacacggtgaaaccccgtctctactgaaaaaaaaaaaaaaaaaagaatttagccgggcatggtggcgggcgcctgtagtcccagctactcgggaggctgaggcaggagaatggcgtgaacccgggaggcagagctttcagtgagccgagatcacgccactgcactccagcctgggcgacagagcaagactccgtctcaaaaaaaaaaaaagaaaaaggatgcatttctaactcgggcctggacagtaagttagcaggcaattataatgcatcataatcatggtagtagtaacacaggataccataaagggcataggaagtcacttaaaccaggttggaggagtcagcaaaggcttcatagagccacccttggaaggtaggaattagctatttaaggaaagaagaaaaaggtgaggggaaggagtgctgtggacagaggatcctctattaaaaatctccagctaggctgggcgcagcggcacacgcctgtaatcccagcactttggtaggcctaggcgggtggatctcctgaggtcaggaatttgagaccagcctggccaacatgatgaaatcctgtctctactaaaaatacaaaaattagctgggcgtggtggcatatgcctgtaatcccagctactcgggaggttgagacaggagaattgcttgaacccgggaggtggaggttgcagtgagccgagattgcgccactgtactccagcctgggtgacagagcaagctccgtgtcaaaaaaaaaaaaaattcagttagactgggcacggtggctcatgcctgtaatcccagcactttgggaggctgaggtgggcggatcacttgggggcaggagttaaagaccagcctggctgggcacggtggcttatgcctgtaattctagcactttgggagcccgaggcgggcagatcacctgaggtcaggagttcaacaccagcctggccaatatgttgacaccctgtctctactaaaatagaaaaattagctgggcatgatggcaagtgcctgtaatcccagctacttgggaggctgagatgggaaaatggctcgaaccggggagatggtggttgcagtgagctgagatcgcaccactgcactccagcctgggtggctgagcgagaccctgtctcaaaagaaaaacaaacaaacaaaccagcctggccaacacggtgaaaccccatctctactaaaaatacaaaacttaaaaaattagccaagcatggtggcacacacctgtagtcccagctactcgggagactgaggcaggagaatcacttgaacccgggaggcggaggttgcagtgagctgagatcgtaccactgcactccagtctgggtgacagagtgagactctgtcaaaaaaaaaaaaaaaagaagacagcctggttcctttgaggaactgaaatgatttttttagagctagagtgtagaaatcaagtgaagggagtagtaagagatgggaatgcagaaactgaggccagatcatgaaggaatttgaaagctttgttaagaagatagcatgataattaagaacttgggaccctgcaagcttcaatcccaactccaccatcctagctcaattatcttaagccagtcacttaacctaattaattcttaggctccccttcaaaaaatgggaataatacagagttttctttatcttaagggtcttggggaatcattgagaggttttaagcagaggcctgttatgatttgtattttaggaggagctctttggtgtacgaggtggaaaatatattgtagcagggtgaaagtagaagtcaggagcctaattagcaggctattgtatactcattggggctagagattactttaggctcaaatttgagtatgtagtagcagagaaggatgagatagagatatttacggtgaggaacaggcagaacttgttgacgaagggttgcaaatgagagaggagggagtatcaaagatgttactcaggttcgtgacctggtagctaagaggtcggtggtgccatttgcggaacccaggaaaaggagtagattggaatgggaagaaagatcacaaattcacttatagaaatgttgagtttgagatgcctgggctcacccagagaatgtcagataaagagttagattaagaggtagtaaagccctgggaattggctgaaagtctgtgttttgatggtctggaggcatggggagggtggcagacaagttctagactcagaagtaaccagatcatcttgtcttcttccagacacagagattgactggaaggcctacatggccgaggtagaaggcgtcatcaatggtacctatgactatacccaactgcagggtgacaccggaccacttgtgtgagtggggacaggaagttcagggaggatgtgaggggctggttaggtactagtctgtgtgacctgacccaggctcacattttctctcatcttccaggtacccagctggtttcgtgtacatctttatggggttgtactatgccaccagccgaggcactgacatccgcatggcccagaacatctttgctgtgctctacctggctaccttgctgcttgtcttcttgatctatcaccagacctgcaaggtgagtccatgctaccagggctagagggccccagcctgggagggctgggtggtggggatggctcaggcttgctgagctgaccttgtaccttactgtgttttccctttaggtacctcccttcgtctttttcttcatgtgctgcgcctcttaccgtgtccactccatctttgtgctgcggctcttcaatgacccagtggccatggtgctgctcttcctcagtatcaacctcctgctggcccagcgctggggctggggttgctgctttttcaggtcaacacctcttcctttctggtcccctctcgttttctgcatttccatctcttcccaatttcctgcagcagagggagtaaaggagtagccaagacagcatgggtcactcagggctccacaaagcgagtccaggatctatagaaagtttctgccctgccatcccccaacatacacacatgccctctttccatcctgtcttcctcccagacagcattccttgttggaattagtccttcacattctaaatactcagtatatgctcattcgcatctagtaggcatagagactatgtatctgcctcctgcctactccaggctcttccctccaacagttgtgagtgtaggtcccatcttggagtttgttggcgtggcggcgggggggaggttgctgtggtgatggtggggggtatgtctttgggtgttgtgtgcatggccctggagctgatctccacccttcctctcccctgctcaccccagcctggcagtctctgtgaagatgaatgtgctgctcttcgcccctgggttactgtttcttctcctcacacagtttggcttccgtggggccctccccaagctgggaatctgtgctggccttcaggtacccccatctcacccttcctctttctaatcaaggagaagccacttgtcttgattgaggggctctatccctgagactccctcaaagccaagagacagggttttggagttgattctgagctagggagccactatcgctaggctgtagtttccatagctgtaaaatagggtattaaatttgatggtctctgagagcctttttgctttttttaattttaagttttgagatgggctcttgctgggttgcccaggctggtctcaaactcctgggctcaagcaatcctcctgccttggcctcccaaagcgctaggattttgggcatgagccaccctgcctggcttctgagagccttccttgctctgcccagttatgacttggtgaatccacaccttaaagcattgttatgacctgcctcctgagcttctttggccccaggcactggcctgggccggggggtggggaacgtggttttcctgctatttctagtgggaattggggaacctctgaggcctacatccccgtcccacacccctcaatgagtagcatgaaggctggtcattgggaatgagccttggcagctctgctgacatcacaccaatcctcaggtggtgctggggctgcccttcctgctggagaaccccagcggctacctgtcccgctcctttgaccttggccgccagtttctgttccactggacagtgaactggcgcttcctcccagaggcgctcttcctgcatcgagccttccacctggccctgttgactgcccacctcaccctgctcctgctgtttgccctctgcaggtggcacaggtgagaaaaggcagtagtgccatgggcagagttgggggaaggagtgaagggcctaagccttaggggctgcttgggggaagtgtcagttaagctcatggggtgagtctagagtttgactcacaaaaggggcttgataactgtctgaatggcttttctccaggacaggggaaagtatcttgtcgctgctgagggatccctccaaaaggaaggttccaccccagccccttacacccaaccatatcctttaaattgtgggaaggtaagtcttgccctctctaggtgctgacagagtcctggtcaggtatcccttgacagctggtgacctgggcgaggaaaggggaccccaatcatagaagtcctattctgcaccactgtgctgagcacttcacatattgaaggatatttgattcttaattctaaatacgagctactcttatgagtacttctccctggtactatcataagagatttacatatgttctaatattgaaagctcacaagagaccccgagacagggaggtacacttacatttactattctcattttacagatggaaaaattaagacttcatgaggttaagtaacttaccaaggtcacacagccagtaagttaggggttcaaacccacaagaccttatggccctaggtattactctctccatattccatatttggttgaggagcaggtccagagaggttaataaacttgcccaaaggcatgcatcaaggaatggcagagccagagggctatgtgacctaaaaactattgcccctctgttttgggatagtcccccccacacacactcctgcccttggccttgaccaccgcatacagatcgtttctaccctcttcacctccaacttcattggcatctgcttcagccgctccctccactaccagttctacgtctggtatttccacacactgccctacctcctgtgggccatgcctgcacgctggctcacacacctgctcaggtaccagctgggacaacctgggggagtgggaagggatagggagttcctgttgggggtttatgtctagggcatgaggagctgcaggtctgcaggccttgcaactggatgaaacgtggaacctgtttctcatctccaggttgttggtgctggggctcatcgagctctcctggaacacatacccttccacatcctgcagctctgctgccctgcacatatgccatgccgtcatcctgctgcagctctggctgggcccgcagcctttccccaagagcacccaacacagcaagaaagcccactgaagtccacccctttccctcaggacctgagtctaccctcaggacctggggttggttggactctgcccttccaaataaaccttgctaagtcc

SEQ ID NO: 10653 - DNA, 1533 bp, Homo sapiens
ttcgaagaatcctccggctgggaaaactatcgtccagaccctgaatcctccggctgtactgccaagtcatttcctagggccgcactcaaggtgtcagactcacgtgggctcatcactgcgtcctctcatattttcaatatgaatgacttttatcaggaaatctgaaaattagtgaaaggttcatttttctcagcatccggaaggctcgaagggcaggcaggaggggcgcgaacaggggctttgccctcctggagagacagcatgaacacagatgttcccagcgcaggcgaaggagaatgctggcttcagcggttgtgggggagacacagagattgactggaaggcctacatggccgaggtagaaggcgtcatcaatggtacctatgactatacccaactgcagggtgacaccggaccacttgtgtacccagctggtttcgtgtacatctttatggggttgtactatgccaccagccgaggcactgacatccgcatggcccagaacatctttgctgtgctctacctggctaccttgctgcttgtcttcttgatctatcaccagacctgcaaggtacctcccttcgtctttttcttcatgtgctgcgcctcttaccgtgtccactccatctttgtgctgcggctcttcaatgacccagtggccatggtgctgctcttcctcagtatcaacctcctgctggcccagcgctggggctggggttgctgctttttcagcctggcagtctctgtgaagatgaatgtgctgctcttcgcccctgggttactgtttcttctcctcacacagtttggcttccgtggggccctccccaagctgggaatctgtgctggccttcaggtggtgctggggctgcccttcctgctggagaaccccagcggctacctgtcccgctcctttgaccttggccgccagtttctgttccactggacagtgaactggcgcttcctcccagaggcgctcttcctgcatcgagccttccacctggccctgttgactgcccacctcaccctgctcctgctgtttgccctctgcaggtggcacaggacaggggaaagtatcttgtcgctgctgagggatccctccaaaaggaaggttccaccccagccccttacacccaaccagatcgtttctaccctcttcacctccaacttcattggcatctgcttcagccgctccctccactaccagttctacgtctggtatttccacacactgccctacctcctgtgggccatgcctgcacgctggctcacacacctgctcaggttgttggtgctggggctcatcgagctctcctggaacacatacccttccacatcctgcagctctgctgccctgcacatatgccatgccgtcatcctgctgcagctctggctgggcccgcagcctttccccaagagcacccaacacagcaagaaagcccactgaagtccacccctttccctcaggacctgagtctaccctcaggacctggggttggttggactctgcccttccaaataaaccttgctaagtcc

SEQ ID NO: 10654 - DNA, 6362 bp, Homo sapiens
ggctgggctgcggaaacgcggccggtccggttccgcggcccaggcagagggactctgcaagcaatggctgcagcgcgcctggcaagagcggcgcctgctgctgcgggagccgcgctacacgctgctggtggccgcctgcctctgcctggcggaggtgggcatcaccttctgggtcattcacagggtggcatgtgagtgcgccgagggggaggggaggggagggagggagacctgaacccgcgacccaaactggatctcagacctggaactccaaaccagactctgtatccactcactcgtcaattgcgaacccatccatatcccttacctgagcgccaagcctgctctacagaaaaccggatcttaatctgcccgcatggcagaggtggataccctagagattggccttctgcactgaacttacagcctgcaaaccagcttagaagtcagatttgagccaaaattgttgtactgctgctgctgctgcttttctctgtggctttggacacctcaggtctcctcctggatctcagctttttccatgtgttcagttctgtgatctttgaacgtcccttctcaatgatggcatcttgtgaccacttgagtccattaggcattattggctactcctttccaggctgaaactatactctaggcttaaggcacttggctttcttgctaaagactcttaattcaacaaatatttatttagtgcttattatatgcctagcattatgctggttaccagagagaggtacagtggtgaataagagatgcatttctgccgggcgcggtggctcacgcctgtaatcccagcactttgggaggccgaggcgggcggatcacgaggtcaggagatcgaggccatcctggctaacacggtgaaaccccgtctctactgaaaaaaaaaaaaaaaaaagaatttagccgggcatggtggcgggcgcctgtagtcccagctactcgggaggctgaggcaggagaatggcgtgaacccgggaggcagagctttcagtgagccgagatcacgccactgcactccagcctgggcgacagagcaagactccgtctcaaaaaaaaaaaaagaaaaaggatgcatttctaactcgggcctggacagtaagttagcaggcaattataatgcatcataatcatggtagtagtaacacaggataccataaagggcataggaagtcacttaaaccaggttggaggagtcagcaaaggcttcatagagccacccttggaaggtaggaattagctatttaaggaaagaagaaaaaggtgaggggaaggagtgctgtggacagaggatcctctattaaaaatctccagctaggctgggcgcagcggcacacgcctgtaatcccagcactttggtaggcctaggcgggtggatctcctgaggtcaggaatttgagaccagcctggccaacatgatgaaatcctgtctctactaaaaatacaaaaattagctgggcgtggtggcatatgcctgtaatcccagctactcgggaggttgagacaggagaattgcttgaacccgggaggtggaggttgcagtgagccgagattgcgccactgtactccagcctgggtgacagagcaagctccgtgtcaaaaaaaaaaaaaattcagttagactgggcacggtggctcatgcctgtaatcccagcactttgggaggctgaggtgggcggatcacttgggggcaggagttaaagaccagcctggctgggcacggtggcttatgcctgtaattctagcactttgggagcccgaggcgggcagatcacctgaggtcaggagttcaacaccagcctggccaatatgttgacaccctgtctctactaaaatagaaaaattagctgggcatgatggcaagtgcctgtaatcccagctacttgggaggctgagatgggaaaatggctcgaaccggggagatggtggttgcagtgagctgagatcgcaccactgcactccagcctgggtggctgagcgagaccctgtctcaaaagaaaaacaaacaaacaaaccagcctggccaacacggtgaaaccccatctctactaaaaatacaaaacttaaaaaattagccaagcatggtggcacacacctgtagtcccagctactcgggagactgaggcaggagaatcacttgaacccgggaggcggaggttgcagtgagctgagatcgtaccactgcactccagtctgggtgacagagtgagactctgtcaaaaaaaaaaaaaaaagaagacagcctggttcctttgaggaactgaaatgatttttttagagctagagtgtagaaatcaagtgaagggagtagtaagagatgggaatgcagaaactgaggccagatcatgaaggaatttgaaagctttgttaagaagatagcatgataattaagaacttgggaccctgcaagcttcaatcccaactccaccatcctagctcaattatcttaagccagtcacttaacctaattaattcttaggctccccttcaaaaaatgggaataatacagagttttctttatcttaagggtcttggggaatcattgagaggttttaagcagaggcctgttatgatttgtattttaggaggagctctttggtgtacgaggtggaaaatatattgtagcagggtgaaagtagaagtcaggagcctaattagcaggctattgtatactcattggggctagagattactttaggctcaaatttgagtatgtagtagcagagaaggatgagatagagatatttacggtgaggaacaggcagaacttgttgacgaagggttgcaaatgagagaggagggagtatcaaagatgttactcaggttcgtgacctggtagctaagaggtcggtggtgccatttgcggaacccaggaaaaggagtagattggaatgggaagaaagatcacaaattcacttatagaaatgttgagtttgagatgcctgggctcacccagagaatgtcagataaagagttagattaagaggtagtaaagccctgggaattggctgaaagtctgtgttttgatggtctggaggcatggggagggtggcagacaagttctagactcagaagtaaccagatcatcttgtcttcttccagacacagagattgactggaaggcctacatggccgaggtagaaggcgtcatcaatggtacctatgactatacccaactgcagggtgacaccggaccacttgtgtgagtggggacaggaagttcagggaggatgtgaggggctggttaggtactagtctgtgtgacctgacccaggctcacattttctctcatcttccaggtacccagctggtttcgtgtacatctttatggggttgtactatgccaccagccgaggcactgacatccgcatggcccagaacatctttgctgtgctctacctggctaccttgctgcttgtcttcttgatctatcaccagacctgcaaggtgagtccatgctaccagggctagagggccccagcctgggagggctgggtggtggggatggctcaggcttgctgagctgaccttgtaccttactgtgttttccctttaggtacctcccttcgtctttttcttcatgtgctgcgcctcttaccgtgtccactccatctttgtgctgcggctcttcaatgacccagtggccatggtgctgctcttcctcagtatcaacctcctgctggcccagcgctggggctggggttgctgctttttcaggtcaacacctcttcctttctggtcccctctcgttttctgcatttccatctcttcccaatttcctgcagcagagggagtaaaggagtagccaagacagcatgggtcactcagggctccacaaagcgagtccaggatctatagaaagtttctgccctgccatcccccaacatacacacatgccctctttccatcctgtcttcctcccagacagcattccttgttggaattagtccttcacattctaaatactcagtatatgctcattcgcatctagtaggcatagagactatgtatctgcctcctgcctactccaggctcttccctccaacagttgtgagtgtaggtcccatcttggagtttgttggcgtggcggcgggggggaggttgctgtggtgatggtggggggtatgtctttgggtgttgtgtgcatggccctggagctgatctccacccttcctctcccctgctcaccccagcctggcagtctctgtgaagatgaatgtgctgctcttcgcccctgggttactgtttcttctcctcacacagtttggcttccgtggggccctccccaagctgggaatctgtgctggccttcaggtacccccatctcacccttcctctttctaatcaaggagaagccacttgtcttgattgaggggctctatccctgagactccctcaaagccaagagacagggttttggagttgattctgagctagggagccactatcgctaggctgtagtttccatagctgtaaaatagggtattaaatttgatggtctctgagagcctttttgctttttttaattttaagttttgagatgggctcttgctgggttgcccaggctggtctcaaactcctgggctcaagcaatcctcctgccttggcctcccaaagcgctaggattttgggcatgagccaccctgcctggcttctgagagccttccttgctctgcccagttatgacttggtgaatccacaccttaaagcattgttatgacctgcctcctgagcttctttggccccaggcactggcctgggccggggggtggggaacgtggttttcctgctatttctagtgggaattggggaacctctgaggcctacatccccgtcccacacccctcaatgagtagcatgaaggctggtcattgggaatgagccttggcagctctgctgacatcacaccaatcctcaggtggtgctggggctgcccttcctgctggagaaccccagcggctacctgtcccgctcctttgaccttggccgccagtttctgttccactggacagtgaactggcgcttcctcccagaggcgctcttcctgcatcgagccttccacctggccctgttgactgcccacctcaccctgctcctgctgtttgccctctgcaggtggcacaggtgagaaaaggcagtagtgccatgggcagagttgggggaaggagtgaagggcctaagccttaggggctgcttgggggaagtgtcagttaagctcatggggtgagtctagagtttgactcacaaaaggggcttgataactgtctgaatggcttttctccaggacaggggaaagtatcttgtcgctgctgagggatccctccaaaaggaaggttccaccccagccccttacacccaaccatatcctttaaattgtgggaaggtaagtcttgccctctctaggtgctgacagagtcctggtcaggtatcccttgacagctggtgacctgggcgaggaaaggggaccccaatcatagaagtcctattctgcaccactgtgctgagcacttcacatattgaaggatatttgattcttaattctaaatacgagctactcttatgagtacttctccctggtactatcataagagatttacatatgttctaatattgaaagctcacaagagaccccgagacagggaggtacacttacatttactattctcattttacagatggaaaaattaagacttcatgaggttaagtaacttaccaaggtcacacagccagtaagttaggggttcaaacccacaagaccttatggccctaggtattactctctccatattccatatttggttgaggagcaggtccagagaggttaataaacttgcccaaaggcatgcatcaaggaatggcagagccagagggctatgtgacctaaaaactattgcccctctgttttgggatagtcccccccacacacactcctgcccttggccttgaccaccgcatacagatcgtttctaccctcttcacctccaacttcattggcatctgcttcagccgctccctccactaccagttctacgtctggtatttccacacactgccctacctcctgtgggccatgcctgcacgctggctcacacacctgctcaggtaccagctgggacaacctgggggagtgggaagggatagggagttcctgttgggggtttatgtctagggcatgaggagctgcaggtctgcaggccttgcaactggatgaaacgtggaacctgtttctcatctccaggttgttggtgctggggctcatcgagctctcctggaacacatacccttccacatcctgcagctctgctgccctgcacatatgccatgccgtcatcctgctgcag

SEQ ID NO: 10655 - DNA, 967 bp, Homo sapiens
ggctgggctgcggaaacgcggccggtccggttccgcggcccaggcagagggactctgcaagcaatggctgcagcgcgcctggcaagagcggcgcctgctgctgcgggagccgcgctacacgctgctggtggccgcctgcctctgcctggcggaggtacctcccttcgtctttttcttcatgtgctgcgcctcttaccgtgtccactccatctttgtgctgcggctcttcaatgacccagtggccatggtgctgctcttcctcagtatcaacctcctgctggcccagcgctggggctggggttgctgctttttcagcctggcagtctctgtgaagatgaatgtgctgctcttcgcccctgggttactgtttcttctcctcacacagtttggcttccgtggggccctccccaagctgggaatctgtgctggccttcaggtggtgctggggctgcccttcctgctggagaaccccagcggctacctgtcccgctcctttgaccttggccgccagtttctgttccactggacagtgaactggcgcttcctcccagaggcgctcttcctgcatcgagccttccacctggccctgttgactgcccacctcaccctgctcctgctgtttgccctctgcaggtggcacaggacaggggaaagtatcttgtcgctgctgagggatccctccaaaaggaaggttccaccccagccccttacacccaaccagatcgtttctaccctcttcacctccaacttcattggcatctgcttcagccgctccctccactaccagttctacgtctggtatttccacacactgccctacctcctgtgggccatgcctgcacgctggctcacacacctgctcaggttgttggtgctggggctcatcgagctctcctggaacacatacccttccacatcctgcagctctgctgccctgcacatatgccatgccgtcatcctgctgcag

SEQ ID NO: 10656 - DNA, 7052 bp, Homo sapiens
atcgtccagaccctgaatcctccggctgtactgccaagtcatttcctagggccgcactcaaggtgtcagactcacgtgggctcatcactgcgtcctctcatattttcaatatgaatgacttttatcaggaaatctgaaaattagtgaaaggttcatttttctcagcatccggaaggctcgaagggcaggcaggaggggcgcgaacaggggctttgccctcctggagagacagcatgaacacagatgttcccagcgcaggcgaaggagaatgctggcttcagcggttgtgggggaggtaggcaggaatgttgcttttctggacattcgttctaaattagcgcctgtgtacccagggctgggtataaactgaggagtaagacattgtccctgctcctatggagcgtggagtgcatcagaggagacaaatgcagaaaaattacattttagtggagtaaatgaagactggctactcggatcggcgcttagcctggtgggacgccaggcacgggaagcggaacctaagtgtcgaaggttcgggtttccgggggtggtgggcccacacaagcggcgcaccgttaagatggcggctgggctgcggaaacgcggccggtccggttccgcggcccaggcagagggactctgcaagcaatggctgcagcgcgcctggcaagagcggcgcctgctgctgcgggagccgcgctacacgctgctggtggccgcctgcctctgcctggcggaggtgggcatcaccttctgggtcattcacagggtggcatgtgagtgcgccgagggggaggggaggggagggagggagacctgaacccgcgacccaaactggatctcagacctggaactccaaaccagactctgtatccactcactcgtcaattgcgaacccatccatatcccttacctgagcgccaagcctgctctacagaaaaccggatcttaatctgcccgcatggcagaggtggataccctagagattggccttctgcactgaacttacagcctgcaaaccagcttagaagtcagatttgagccaaaattgttgtactgctgctgctgctgcttttctctgtggctttggacacctcaggtctcctcctggatctcagctttttccatgtgttcagttctgtgatctttgaacgtcccttctcaatgatggcatcttgtgaccacttgagtccattaggcattattggctactcctttccaggctgaaactatactctaggcttaaggcacttggctttcttgctaaagactcttaattcaacaaatatttatttagtgcttattatatgcctagcattatgctggttaccagagagaggtacagtggtgaataagagatgcatttctgccgggcgcggtggctcacgcctgtaatcccagcactttgggaggccgaggcgggcggatcacgaggtcaggagatcgaggccatcctggctaacacggtgaaaccccgtctctactgaaaaaaaaaaaaaaaaaagaatttagccgggcatggtggcgggcgcctgtagtcccagctactcgggaggctgaggcaggagaatggcgtgaacccgggaggcagagctttcagtgagccgagatcacgccactgcactccagcctgggcgacagagcaagactccgtctcaaaaaaaaaaaaagaaaaaggatgcatttctaactcgggcctggacagtaagttagcaggcaattataatgcatcataatcatggtagtagtaacacaggataccataaagggcataggaagtcacttaaaccaggttggaggagtcagcaaaggcttcatagagccacccttggaaggtaggaattagctatttaaggaaagaagaaaaaggtgaggggaaggagtgctgtggacagaggatcctctattaaaaatctccagctaggctgggcgcagcggcacacgcctgtaatcccagcactttggtaggcctaggcgggtggatctcctgaggtcaggaatttgagaccagcctggccaacatgatgaaatcctgtctctactaaaaatacaaaaattagctgggcgtggtggcatatgcctgtaatcccagctactcgggaggttgagacaggagaattgcttgaacccgggaggtggaggttgcagtgagccgagattgcgccactgtactccagcctgggtgacagagcaagctccgtgtcaaaaaaaaaaaaaattcagttagactgggcacggtggctcatgcctgtaatcccagcactttgggaggctgaggtgggcggatcacttgggggcaggagttaaagaccagcctggctgggcacggtggcttatgcctgtaattctagcactttgggagcccgaggcgggcagatcacctgaggtcaggagttcaacaccagcctggccaatatgttgacaccctgtctctactaaaatagaaaaattagctgggcatgatggcaagtgcctgtaatcccagctacttgggaggctgagatgggaaaatggctcgaaccggggagatggtggttgcagtgagctgagatcgcaccactgcactccagcctgggtggctgagcgagaccctgtctcaaaagaaaaacaaacaaacaaaccagcctggccaacacggtgaaaccccatctctactaaaaatacaaaacttaaaaaattagccaagcatggtggcacacacctgtagtcccagctactcgggagactgaggcaggagaatcacttgaacccgggaggcggaggttgcagtgagctgagatcgtaccactgcactccagtctgggtgacagagtgagactctgtcaaaaaaaaaaaaaaaagaagacagcctggttcctttgaggaactgaaatgatttttttagagctagagtgtagaaatcaagtgaagggagtagtaagagatgggaatgcagaaactgaggccagatcatgaaggaatttgaaagctttgttaagaagatagcatgataattaagaacttgggaccctgcaagcttcaatcccaactccaccatcctagctcaattatcttaagccagtcacttaacctaattaattcttaggctccccttcaaaaaatgggaataatacagagttttctttatcttaagggtcttggggaatcattgagaggttttaagcagaggcctgttatgatttgtattttaggaggagctctttggtgtacgaggtggaaaatatattgtagcagggtgaaagtagaagtcaggagcctaattagcaggctattgtatactcattggggctagagattactttaggctcaaatttgagtatgtagtagcagagaaggatgagatagagatatttacggtgaggaacaggcagaacttgttgacgaagggttgcaaatgagagaggagggagtatcaaagatgttactcaggttcgtgacctggtagctaagaggtcggtggtgccatttgcggaacccaggaaaaggagtagattggaatgggaagaaagatcacaaattcacttatagaaatgttgagtttgagatgcctgggctcacccagagaatgtcagataaagagttagattaagaggtagtaaagccctgggaattggctgaaagtctgtgttttgatggtctggaggcatggggagggtggcagacaagttctagactcagaagtaaccagatcatcttgtcttcttccagacacagagattgactggaaggcctacatggccgaggtagaaggcgtcatcaatggtacctatgactatacccaactgcagggtgacaccggaccacttgtgtgagtggggacaggaagttcagggaggatgtgaggggctggttaggtactagtctgtgtgacctgacccaggctcacattttctctcatcttccaggtacccagctggtttcgtgtacatctttatggggttgtactatgccaccagccgaggcactgacatccgcatggcccagaacatctttgctgtgctctacctggctaccttgctgcttgtcttcttgatctatcaccagacctgcaaggtgagtccatgctaccagggctagagggccccagcctgggagggctgggtggtggggatggctcaggcttgctgagctgaccttgtaccttactgtgttttccctttaggtacctcccttcgtctttttcttcatgtgctgcgcctcttaccgtgtccactccatctttgtgctgcggctcttcaatgacccagtggccatggtgctgctcttcctcagtatcaacctcctgctggcccagcgctggggctggggttgctgctttttcaggtcaacacctcttcctttctggtcccctctcgttttctgcatttccatctcttcccaatttcctgcagcagagggagtaaaggagtagccaagacagcatgggtcactcagggctccacaaagcgagtccaggatctatagaaagtttctgccctgccatcccccaacatacacacatgccctctttccatcctgtcttcctcccagacagcattccttgttggaattagtccttcacattctaaatactcagtatatgctcattcgcatctagtaggcatagagactatgtatctgcctcctgcctactccaggctcttccctccaacagttgtgagtgtaggtcccatcttggagtttgttggcgtggcggcgggggggaggttgctgtggtgatggtggggggtatgtctttgggtgttgtgtgcatggccctggagctgatctccacccttcctctcccctgctcaccccagcctggcagtctctgtgaagatgaatgtgctgctcttcgcccctgggttactgtttcttctcctcacacagtttggcttccgtggggccctccccaagctgggaatctgtgctggccttcaggtacccccatctcacccttcctctttctaatcaaggagaagccacttgtcttgattgaggggctctatccctgagactccctcaaagccaagagacagggttttggagttgattctgagctagggagccactatcgctaggctgtagtttccatagctgtaaaatagggtattaaatttgatggtctctgagagcctttttgctttttttaattttaagttttgagatgggctcttgctgggttgcccaggctggtctcaaactcctgggctcaagcaatcctcctgccttggcctcccaaagcgctaggattttgggcatgagccaccctgcctggcttctgagagccttccttgctctgcccagttatgacttggtgaatccacaccttaaagcattgttatgacctgcctcctgagcttctttggccccaggcactggcctgggccggggggtggggaacgtggttttcctgctatttctagtgggaattggggaacctctgaggcctacatccccgtcccacacccctcaatgagtagcatgaaggctggtcattgggaatgagccttggcagctctgctgacatcacaccaatcctcaggtggtgctggggctgcccttcctgctggagaaccccagcggctacctgtcccgctcctttgaccttggccgccagtttctgttccactggacagtgaactggcgcttcctcccagaggcgctcttcctgcatcgagccttccacctggccctgttgactgcccacctcaccctgctcctgctgtttgccctctgcaggtggcacaggtgagaaaaggcagtagtgccatgggcagagttgggggaaggagtgaagggcctaagccttaggggctgcttgggggaagtgtcagttaagctcatggggtgagtctagagtttgactcacaaaaggggcttgataactgtctgaatggcttttctccaggacaggggaaagtatcttgtcgctgctgagggatccctccaaaaggaaggttccaccccagccccttacacccaaccatatcctttaaattgtgggaaggtaagtcttgccctctctaggtgctgacagagtcctggtcaggtatcccttgacagctggtgacctgggcgaggaaaggggaccccaatcatagaagtcctattctgcaccactgtgctgagcacttcacatattgaaggatatttgattcttaattctaaatacgagctactcttatgagtacttctccctggtactatcataagagatttacatatgttctaatattgaaagctcacaagagaccccgagacagggaggtacacttacatttactattctcattttacagatggaaaaattaagacttcatgaggttaagtaacttaccaaggtcacacagccagtaagttaggggttcaaacccacaagaccttatggccctaggtattactctctccatattccatatttggttgaggagcaggtccagagaggttaataaacttgcccaaaggcatgcatcaaggaatggcagagccagagggctatgtgacctaaaaactattgcccctctgttttgggatagtcccccccacacacactcctgcccttggccttgaccaccgcatacagatcgtttctaccctcttcacctccaacttcattggcatctgcttcagccgctccctccactaccagttctacgtctggtatttccacacactgccctacctcctgtgggccatgcctgcacgctggctcacacacctgctcaggtaccagctgggacaacctgggggagtgggaagggatagggagttcctgttgggggtttatgtctagggcatgaggagctgcaggtctgcaggccttgcaactggatgaaacgtggaacctgtttctcatctccaggttgttggtgctggggctcatcgagctctcctggaacacatacccttccacatcctgcagctctgctgccctgcacatatgccatgccgtcatcctgctgcagctctggctgggcccgcagcctttccccaagagcacccaacacagcaagaaagcccactgaagtccacccctttccctcaggacctgagtctaccctcaggacctg

SEQ ID NO: 10657 - DNA, 1697 bp, Homo sapiens
atcgtccagaccctgaatcctccggctgtactgccaagtcatttcctagggccgcactcaaggtgtcagactcacgtgggctcatcactgcgtcctctcatattttcaatatgaatgacttttatcaggaaatctgaaaattagtgaaaggttcatttttctcagcatccggaaggctcgaagggcaggcaggaggggcgcgaacaggggctttgccctcctggagagacagcatgaacacagatgttcccagcgcaggcgaaggagaatgctggcttcagcggttgtgggggaggtaggcaggaatgttgcttttctggacattcgttctaaattagcgcctgtgtacccagggctgggtataaactgaggagtaagacattgtccctgctcctatggagcgtggagtgcatcagaggagacaaatgcagaaaaattacattttagtggagtaaatgaagactggctactcggatcggcgcttagcctggtgggacgccaggcacgggaagcggaacctaagtgtcgaagacacagagattgactggaaggcctacatggccgaggtagaaggcgtcatcaatggtacctatgactatacccaactgcagggtgacaccggaccacttgtgtacccagctggtttcgtgtacatctttatggggttgtactatgccaccagccgaggcactgacatccgcatggcccagaacatctttgctgtgctctacctggctaccttgctgcttgtcttcttgatctatcaccagacctgcaaggtacctcccttcgtctttttcttcatgtgctgcgcctcttaccgtgtccactccatctttgtgctgcggctcttcaatgacccagtggccatggtgctgctcttcctcagtatcaacctcctgctggcccagcgctggggctggggttgctgctttttcagcctggcagtctctgtgaagatgaatgtgctgctcttcgcccctgggttactgtttcttctcctcacacagtttggcttccgtggggccctccccaagctgggaatctgtgctggccttcaggtggtgctggggctgcccttcctgctggagaaccccagcggctacctgtcccgctcctttgaccttggccgccagtttctgttccactggacagtgaactggcgcttcctcccagaggcgctcttcctgcatcgagccttccacctggccctgttgactgcccacctcaccctgctcctgctgtttgccctctgcaggtggcacaggacaggggaaagtatcttgtcgctgctgagggatccctccaaaaggaaggttccaccccagccccttacacccaaccagatcgtttctaccctcttcacctccaacttcattggcatctgcttcagccgctccctccactaccagttctacgtctggtatttccacacactgccctacctcctgtgggccatgcctgcacgctggctcacacacctgctcaggttgttggtgctggggctcatcgagctctcctggaacacatacccttccacatcctgcagctctgctgccctgcacatatgccatgccgtcatcctgctgcagctctggctgggcccgcagcctttccccaagagcacccaacacagcaagaaagcccactgaagtccacccctttccctcaggacctgagtctaccctcaggacctg

SEQ ID NO: 10658 - DNA, 4192 bp, Homo sapiens
caccgttaagatggcggctgggctgcggaaacgcggccggtccggttccgcggcccaggcagagggactctgcaagcaatggctgcagcgcgcctggcaagagcggcgcctgctgctgcgggagccgcgctacacgctgctggtggccgcctgcctctgcctggcggaggtgggcatcaccttctgggtcattcacagggtggcatgtgagtgcgccgagggggaggggaggggagggagggagacctgaacccgcgacccaaactggatctcagacctggaactccaaaccagactctgtatccactcactcgtcaattgcgaacccatccatatcccttacctgagcgccaagcctgctctacagaaaaccggatcttaatctgcccgcatggcagaggtggataccctagagattggccttctgcactgaacttacagcctgcaaaccagcttagaagtcagatttgagccaaaattgttgtactgctgctgctgctgcttttctctgtggctttggacacctcaggtctcctcctggatctcagctttttccatgtgttcagttctgtgatctttgaacgtcccttctcaatgatggcatcttgtgaccacttgagtccattaggcattattggctactcctttccaggctgaaactatactctaggcttaaggcacttggctttcttgctaaagactcttaattcaacaaatatttatttagtgcttattatatgcctagcattatgctggttaccagagagaggtacagtggtgaataagagatgcatttctgccgggcgcggtggctcacgcctgtaatcccagcactttgggaggccgaggcgggcggatcacgaggtcaggagatcgaggccatcctggctaacacggtgaaaccccgtctctactgaaaaaaaaaaaaaaaaaagaatttagccgggcatggtggcgggcgcctgtagtcccagctactcgggaggctgaggcaggagaatggcgtgaacccgggaggcagagctttcagtgagccgagatcacgccactgcactccagcctgggcgacagagcaagactccgtctcaaaaaaaaaaaaagaaaaaggatgcatttctaactcgggcctggacagtaagttagcaggcaattataatgcatcataatcatggtagtagtaacacaggataccataaagggcataggaagtcacttaaaccaggttggaggagtcagcaaaggcttcatagagccacccttggaaggtaggaattagctatttaaggaaagaagaaaaaggtgaggggaaggagtgctgtggacagaggatcctctattaaaaatctccagctaggctgggcgcagcggcacacgcctgtaatcccagcactttggtaggcctaggcgggtggatctcctgaggtcaggaatttgagaccagcctggccaacatgatgaaatcctgtctctactaaaaatacaaaaattagctgggcgtggtggcatatgcctgtaatcccagctactcgggaggttgagacaggagaattgcttgaacccgggaggtggaggttgcagtgagccgagattgcgccactgtactccagcctgggtgacagagcaagctccgtgtcaaaaaaaaaaaaaattcagttagactgggcacggtggctcatgcctgtaatcccagcactttgggaggctgaggtgggcggatcacttgggggcaggagttaaagaccagcctggctgggcacggtggcttatgcctgtaattctagcactttgggagcccgaggcgggcagatcacctgaggtcaggagttcaacaccagcctggccaatatgttgacaccctgtctctactaaaatagaaaaattagctgggcatgatggcaagtgcctgtaatcccagctacttgggaggctgagatgggaaaatggctcgaaccggggagatggtggttgcagtgagctgagatcgcaccactgcactccagcctgggtggctgagcgagaccctgtctcaaaagaaaaacaaacaaacaaaccagcctggccaacacggtgaaaccccatctctactaaaaatacaaaacttaaaaaattagccaagcatggtggcacacacctgtagtcccagctactcgggagactgaggcaggagaatcacttgaacccgggaggcggaggttgcagtgagctgagatcgtaccactgcactccagtctgggtgacagagtgagactctgtcaaaaaaaaaaaaaaaagaagacagcctggttcctttgaggaactgaaatgatttttttagagctagagtgtagaaatcaagtgaagggagtagtaagagatgggaatgcagaaactgaggccagatcatgaaggaatttgaaagctttgttaagaagatagcatgataattaagaacttgggaccctgcaagcttcaatcccaactccaccatcctagctcaattatcttaagccagtcacttaacctaattaattcttaggctccccttcaaaaaatgggaataatacagagttttctttatcttaagggtcttggggaatcattgagaggttttaagcagaggcctgttatgatttgtattttaggaggagctctttggtgtacgaggtggaaaatatattgtagcagggtgaaagtagaagtcaggagcctaattagcaggctattgtatactcattggggctagagattactttaggctcaaatttgagtatgtagtagcagagaaggatgagatagagatatttacggtgaggaacaggcagaacttgttgacgaagggttgcaaatgagagaggagggagtatcaaagatgttactcaggttcgtgacctggtagctaagaggtcggtggtgccatttgcggaacccaggaaaaggagtagattggaatgggaagaaagatcacaaattcacttatagaaatgttgagtttgagatgcctgggctcacccagagaatgtcagataaagagttagattaagaggtagtaaagccctgggaattggctgaaagtctgtgttttgatggtctggaggcatggggagggtggcagacaagttctagactcagaagtaaccagatcatcttgtcttcttccagacacagagattgactggaaggcctacatggccgaggtagaaggcgtcatcaatggtacctatgactatacccaactgcagggtgacaccggaccacttgtgtgagtggggacaggaagttcagggaggatgtgaggggctggttaggtactagtctgtgtgacctgacccaggctcacattttctctcatcttccaggtacccagctggtttcgtgtacatctttatggggttgtactatgccaccagccgaggcactgacatccgcatggcccagaacatctttgctgtgctctacctggctaccttgctgcttgtcttcttgatctatcaccagacctgcaaggtgagtccatgctaccagggctagagggccccagcctgggagggctgggtggtggggatggctcaggcttgctgagctgaccttgtaccttactgtgttttccctttaggtacctcccttcgtctttttcttcatgtgctgcgcctcttaccgtgtccactccatctttgtgctgcggctcttcaatgacccagtggccatggtgctgctcttcctcagtatcaacctcctgctggcccagcgctggggctggggttgctgctttttcaggtcaacacctcttcctttctggtcccctctcgttttctgcatttccatctcttcccaatttcctgcagcagagggagtaaaggagtagccaagacagcatgggtcactcagggctccacaaagcgagtccaggatctatagaaagtttctgccctgccatcccccaacatacacacatgccctctttccatcctgtcttcctcccagacagcattccttgttggaattagtccttcacattctaaatactcagtatatgctcattcgcatctagtaggcatagagactatgtatctgcctcctgcctactccaggctcttccctccaacagttgtgagtgtaggtcccatcttggagtttgttggcgtggcggcgggggggaggttgctgtggtgatggtggggggtatgtctttgggtgttgtgtgcatggccctgga

SEQ ID NO: 10659 - DNA, 1017 bp, Homo sapiens
caccgttaagatggcggctgggctgcggaaacgcggccggtccggttccgcggcccaggcagagggactctgcaagcaatggctgcagcgcgcctggcaagagcggcgcctgctgctgcgggagccgcgctacacgctgctggtggccgcctgcctctgcctggcggagacacagagattgactggaaggcctacatggccgaggtagaaggcgtcatcaatggtacctatgactatacccaactgcagggtgacaccggaccacttgtgtacccagctggtttcgtgtacatctttatggggttgtactatgccaccagccgaggcactgacatccgcatggcccagaacatctttgctgtgctctacctggctaccttgctgcttgtcttcttgatctatcaccagacctgcaaggtacctcccttcgtctttttcttcatgtgctgcgcctcttaccgtgtccactccatctttgtgctgcggctcttcaatgacccagtggccatggtgctgctcttcctcagtatcaacctcctgctggcccagcgctggggctggggttgctgctttttcaggtcaacacctcttcctttctggtcccctctcgttttctgcatttccatctcttcccaatttcctgcagcagagggagtaaaggagtagccaagacagcatgggtcactcagggctccacaaagcgagtccaggatctatagaaagtttctgccctgccatcccccaacatacacacatgccctctttccatcctgtcttcctcccagacagcattccttgttggaattagtccttcacattctaaatactcagtatatgctcattcgcatctagtaggcatagagactatgtatctgcctcctgcctactccaggctcttccctccaacagttgtgagtgtaggtcccatcttggagtttgttggcgtggcggcgggggggaggttgctgtggtgatggtggggggtatgtctttgggtgttgtgtgcatggccctgga

SEQ ID NO: 10660 - DNA, 1468 bp, Homo sapiens
atgccctctttccatcctgtcttcctcccagacagcattccttgttggaattagtccttcacattctaaatactcagtatatgctcattcgcatctagtaggcatagagactatgtatctgcctcctgcctactccaggctcttccctccaacagttgtgagtgtaggtcccatcttggagtttgttggcgtggcggcgggggggaggttgctgtggtgatggtggggggtatgtctttgggtgttgtgtgcatggccctggagctgatctccacccttcctctcccctgctcaccccagcctggcagtctctgtgaagatgaatgtgctgctcttcgcccctgggttactgtttcttctcctcacacagtttggcttccgtggggccctccccaagctgggaatctgtgctggccttcaggtacccccatctcacccttcctctttctaatcaaggagaagccacttgtcttgattgaggggctctatccctgagactccctcaaagccaagagacagggttttggagttgattctgagctagggagccactatcgctaggctgtagtttccatagctgtaaaatagggtattaaatttgatggtctctgagagcctttttgctttttttaattttaagttttgagatgggctcttgctgggttgcccaggctggtctcaaactcctgggctcaagcaatcctcctgccttggcctcccaaagcgctaggattttgggcatgagccaccctgcctggcttctgagagccttccttgctctgcccagttatgacttggtgaatccacaccttaaagcattgttatgacctgcctcctgagcttctttggccccaggcactggcctgggccggggggtggggaacgtggttttcctgctatttctagtgggaattggggaacctctgaggcctacatccccgtcccacacccctcaatgagtagcatgaaggctggtcattgggaatgagccttggcagctctgctgacatcacaccaatcctcaggtggtgctggggctgcccttcctgctggagaaccccagcggctacctgtcccgctcctttgaccttggccgccagtttctgttccactggacagtgaactggcgcttcctcccagaggcgctcttcctgcatcgagccttccacctggccctgttgactgcccacctcaccctgctcctgctgtttgccctctgcaggtggcacaggtgagaaaaggcagtagtgccatgggcagagttgggggaaggagtgaagggcctaagccttaggggctgcttgggggaagtgtcagttaagctcatggggtgagtctagagtttgactcacaaaaggggcttgataactgtctgaatggcttttctccaggacaggggaaagtatcttgtcgctgctgagggatccctccaaaaggaaggttccaccccagccccttacacccaacc

SEQ ID NO: 10661 - DNA, 704 bp, Homo sapiens
atgccctctttccatcctgtcttcctcccagacagcattccttgttggaattagtccttcacattctaaatactcagtatatgctcattcgcatctagtaggcatagagactatgtatctgcctcctgcctactccaggctcttccctccaacagttgtgagtgtaggtcccatcttggagtttgttggcgtggcggcgggggggaggttgctgtggtgatggtggggggtatgtctttgggtgttgtgtgcatggccctggagctgatctccacccttcctctcccctgctcaccccagcctggcagtctctgtgaagatgaatgtgctgctcttcgcccctgggttactgtttcttctcctcacacagtttggcttccgtggggccctccccaagctgggaatctgtgctggccttcaggtggtgctggggctgcccttcctgctggagaaccccagcggctacctgtcccgctcctttgaccttggccgccagtttctgttccactggacagtgaactggcgcttcctcccagaggcgctcttcctgcatcgagccttccacctggccctgttgactgcccacctcaccctgctcctgctgtttgccctctgcaggtggcacaggacaggggaaagtatcttgtcgctgctgagggatccctccaaaaggaaggttccaccccagccccttacacccaacc

SEQ ID NO: 10662 - DNA, 1036 bp, Homo sapiens
gtggtgctggggctgcccttcctgctggagaaccccagcggctacctgtcccgctcctttgaccttggccgccagtttctgttccactggacagtgaactggcgcttcctcccagaggcgctcttcctgcatcgagccttccacctggccctgttgactgcccacctcaccctgctcctgctgtttgccctctgcaggtggcacaggtgagaaaaggcagtagtgccatgggcagagttgggggaaggagtgaagggcctaagccttaggggctgcttgggggaagtgtcagttaagctcatggggtgagtctagagtttgactcacaaaaggggcttgataactgtctgaatggcttttctccaggacaggggaaagtatcttgtcgctgctgagggatccctccaaaaggaaggttccaccccagccccttacacccaaccatatcctttaaattgtgggaaggtaagtcttgccctctctaggtgctgacagagtcctggtcaggtatcccttgacagctggtgacctgggcgaggaaaggggaccccaatcatagaagtcctattctgcaccactgtgctgagcacttcacatattgaaggatatttgattcttaattctaaatacgagctactcttatgagtacttctccctggtactatcataagagatttacatatgttctaatattgaaagctcacaagagaccccgagacagggaggtacacttacatttactattctcattttacagatggaaaaattaagacttcatgaggttaagtaacttaccaaggtcacacagccagtaagttaggggttcaaacccacaagaccttatggccctaggtattactctctccatattccatatttggttgaggagcaggtccagagaggttaataaacttgcccaaaggcatgcatcaaggaatggcagagccagagggctatgtgacctaaaaactattgcccctctgttttgggatagtcccccccacacacactcctgcccttggccttgaccaccgca

SEQ ID NO: 10663 - DNA, 347 bp, Homo sapiens
gtggtgctggggctgcccttcctgctggagaaccccagcggctacctgtcccgctcctttgaccttggccgccagtttctgttccactggacagtgaactggcgcttcctcccagaggcgctcttcctgcatcgagccttccacctggccctgttgactgcccacctcaccctgctcctgctgtttgccctctgcaggtggcacaggacaggggaaagtatcttgtcgctgctgagggatccctccaaaaggaaggttccaccccagccccttacacccaaccatatcctttaaattgtgggaagtcccccccacacacactcctgcccttggccttgaccaccgca

SEQ ID NO: 10664 - DNA, 1014 bp, Homo sapiens
ttttcttcatgtgctgcgcctcttaccgtgtccactccatctttgtgctgcggctcttcaatgacccagtggccatggtgctgctcttcctcagtatcaacctcctgctggcccagcgctggggctggggttgctgctttttcaggtcaacacctcttcctttctggtcccctctcgttttctgcatttccatctcttcccaatttcctgcagcagagggagtaaaggagtagccaagacagcatgggtcactcagggctccacaaagcgagtccaggatctatagaaagtttctgccctgccatcccccaacatacacacatgccctctttccatcctgtcttcctcccagacagcattccttgttggaattagtccttcacattctaaatactcagtatatgctcattcgcatctagtaggcatagagactatgtatctgcctcctgcctactccaggctcttccctccaacagttgtgagtgtaggtcccatcttggagtttgttggcgtggcggcgggggggaggttgctgtggtgatggtggggggtatgtctttgggtgttgtgtgcatggccctggagctgatctccacccttcctctcccctgctcaccccagcctggcagtctctgtgaagatgaatgtgctgctcttcgcccctgggttactgtttcttctcctcacacagtttggcttccgtggggccctccccaagctgggaatctgtgctggccttcaggtacccccatctcacccttcctctttctaatcaaggagaagccacttgtcttgattgaggggctctatccctgagactccctcaaagccaagagacagggttttggagttgattctgagctagggagccactatcgctaggctgtagtttccatagctgtaaaatagggtattaaatttgatggtctctgagagcctttttgctttttttaattttaagttttgagatgggctcttgctgggttgcccaggctggtctcaaactcctgggct

SEQ ID NO: 10665 - DNA, 538 bp, Homo sapiens
ttttcttcatgtgctgcgcctcttaccgtgtccactccatctttgtgctgcggctcttcaatgacccagtggccatggtgctgctcttcctcagtatcaacctcctgctggcccagcgctggggctggggttgctgctttttcagcctggcagtctctgtgaagatgaatgtgctgctcttcgcccctgggttactgtttcttctcctcacacagtttggcttccgtggggccctccccaagctgggaatctgtgctggccttcaggtacccccatctcacccttcctctttctaatcaaggagaagccacttgtcttgattgaggggctctatccctgagactccctcaaagccaagagacagggttttggagttgattctgagctagggagccactatcgctaggctgtagtttccatagctgtaaaatagggtattaaatttgatggtctctgagagcctttttgctttttttaattttaagttttgagatgggctcttgctgggttgcccaggctggtctcaaactcctgggct

SEQ ID NO: 10666 - DNA, 3863 bp, Homo sapiens
gctgcggaaacgcggccggtccggttccgcggcccaggcagagggactctgcaagcaatggctgcagcgcgcctggcaagagcggcgcctgctgctgcgggagccgcgctacacgctgctggtggccgcctgcctctgcctggcggaggtgggcatcaccttctgggtcattcacagggtggcatgtgagtgcgccgagggggaggggaggggagggagggagacctgaacccgcgacccaaactggatctcagacctggaactccaaaccagactctgtatccactcactcgtcaattgcgaacccatccatatcccttacctgagcgccaagcctgctctacagaaaaccggatcttaatctgcccgcatggcagaggtggataccctagagattggccttctgcactgaacttacagcctgcaaaccagcttagaagtcagatttgagccaaaattgttgtactgctgctgctgctgcttttctctgtggctttggacacctcaggtctcctcctggatctcagctttttccatgtgttcagttctgtgatctttgaacgtcccttctcaatgatggcatcttgtgaccacttgagtccattaggcattattggctactcctttccaggctgaaactatactctaggcttaaggcacttggctttcttgctaaagactcttaattcaacaaatatttatttagtgcttattatatgcctagcattatgctggttaccagagagaggtacagtggtgaataagagatgcatttctgccgggcgcggtggctcacgcctgtaatcccagcactttgggaggccgaggcgggcggatcacgaggtcaggagatcgaggccatcctggctaacacggtgaaaccccgtctctactgaaaaaaaaaaaaaaaaaagaatttagccgggcatggtggcgggcgcctgtagtcccagctactcgggaggctgaggcaggagaatggcgtgaacccgggaggcagagctttcagtgagccgagatcacgccactgcactccagcctgggcgacagagcaagactccgtctcaaaaaaaaaaaaagaaaaaggatgcatttctaactcgggcctggacagtaagttagcaggcaattataatgcatcataatcatggtagtagtaacacaggataccataaagggcataggaagtcacttaaaccaggttggaggagtcagcaaaggcttcatagagccacccttggaaggtaggaattagctatttaaggaaagaagaaaaaggtgaggggaaggagtgctgtggacagaggatcctctattaaaaatctccagctaggctgggcgcagcggcacacgcctgtaatcccagcactttggtaggcctaggcgggtggatctcctgaggtcaggaatttgagaccagcctggccaacatgatgaaatcctgtctctactaaaaatacaaaaattagctgggcgtggtggcatatgcctgtaatcccagctactcgggaggttgagacaggagaattgcttgaacccgggaggtggaggttgcagtgagccgagattgcgccactgtactccagcctgggtgacagagcaagctccgtgtcaaaaaaaaaaaaaattcagttagactgggcacggtggctcatgcctgtaatcccagcactttgggaggctgaggtgggcggatcacttgggggcaggagttaaagaccagcctggctgggcacggtggcttatgcctgtaattctagcactttgggagcccgaggcgggcagatcacctgaggtcaggagttcaacaccagcctggccaatatgttgacaccctgtctctactaaaatagaaaaattagctgggcatgatggcaagtgcctgtaatcccagctacttgggaggctgagatgggaaaatggctcgaaccggggagatggtggttgcagtgagctgagatcgcaccactgcactccagcctgggtggctgagcgagaccctgtctcaaaagaaaaacaaacaaacaaaccagcctggccaacacggtgaaaccccatctctactaaaaatacaaaacttaaaaaattagccaagcatggtggcacacacctgtagtcccagctactcgggagactgaggcaggagaatcacttgaacccgggaggcggaggttgcagtgagctgagatcgtaccactgcactccagtctgggtgacagagtgagactctgtcaaaaaaaaaaaaaaaagaagacagcctggttcctttgaggaactgaaatgatttttttagagctagagtgtagaaatcaagtgaagggagtagtaagagatgggaatgcagaaactgaggccagatcatgaaggaatttgaaagctttgttaagaagatagcatgataattaagaacttgggaccctgcaagcttcaatcccaactccaccatcctagctcaattatcttaagccagtcacttaacctaattaattcttaggctccccttcaaaaaatgggaataatacagagttttctttatcttaagggtcttggggaatcattgagaggttttaagcagaggcctgttatgatttgtattttaggaggagctctttggtgtacgaggtggaaaatatattgtagcagggtgaaagtagaagtcaggagcctaattagcaggctattgtatactcattggggctagagattactttaggctcaaatttgagtatgtagtagcagagaaggatgagatagagatatttacggtgaggaacaggcagaacttgttgacgaagggttgcaaatgagagaggagggagtatcaaagatgttactcaggttcgtgacctggtagctaagaggtcggtggtgccatttgcggaacccaggaaaaggagtagattggaatgggaagaaagatcacaaattcacttatagaaatgttgagtttgagatgcctgggctcacccagagaatgtcagataaagagttagattaagaggtagtaaagccctgggaattggctgaaagtctgtgttttgatggtctggaggcatggggagggtggcagacaagttctagactcagaagtaaccagatcatcttgtcttcttccagacacagagattgactggaaggcctacatggccgaggtagaaggcgtcatcaatggtacctatgactatacccaactgcagggtgacaccggaccacttgtgtgagtggggacaggaagttcagggaggatgtgaggggctggttaggtactagtctgtgtgacctgacccaggctcacattttctctcatcttccaggtacccagctggtttcgtgtacatctttatggggttgtactatgccaccagccgaggcactgacatccgcatggcccagaacatctttgctgtgctctacctggctaccttgctgcttgtcttcttgatctatcaccagacctgcaaggtgagtccatgctaccagggctagagggccccagcctgggagggctgggtggtggggatggctcaggcttgctgagctgaccttgtaccttactgtgttttccctttaggtacctcccttcgtctttttcttcatgtgctgcgcctcttaccgtgtccactccatctttgtgctgcggctcttcaatgacccagtggccatggtgctgctcttcctcagtatcaacctcctgctggcccagcgctggggctggggttgctgctttttcaggtcaacacctcttcctttctggtcccctctcgttttctgcatttccatctcttcccaatttcctgcagcagagggagtaaaggagtagccaagacagcatgggtcactcagggctccacaaagcgagtcca

SEQ ID NO: 10667 - DNA, 725 bp, Homo sapiens
gctgcggaaacgcggccggtccggttccgcggcccaggcagagggactctgcaagcaatggctgcagcgcgcctggcaagagcggcgcctgctgctgcgggagccgcgctacacgctgctggtggccgcctgcctctgcctggcggaggtgggcatcaccttctgggtcattcacagggtggcatacacagagattgactggaaggcctacatggccgaggtagaaggcgtcatcaatggtacctatgactatacccaactgcagggtgacaccggaccacttgtgtacccagctggtttcgtgtacatctttatggggttgtactatgccaccagccgaggcactgacatccgcatggcccagaacatctttgctgtgctctacctggctaccttgctgcttgtcttcttgatctatcaccagacctgcaaggtacctcccttcgtctttttcttcatgtgctgcgcctcttaccgtgtccactccatctttgtgctgcggctcttcaatgacccagtggccatggtgctgctcttcctcagtatcaacctcctgctggcccagcgctggggctggggttgctgctttttcaggtcaacacctcttcctttctggtcccctctcgttttctgcatttccatctcttcccaatttcctgcagcagagggagtaaaggagtagccaagacagcatgggtcactcagggctccacaaagcgagtcca

SEQ ID NO: 10668 - DNA, 1131 bp, Homo sapiens
aaaggaaggttccaccccagccccttacacccaaccatatcctttaaattgtgggaaggtaagtcttgccctctctaggtgctgacagagtcctggtcaggtatcccttgacagctggtgacctgggcgaggaaaggggaccccaatcatagaagtcctattctgcaccactgtgctgagcacttcacatattgaaggatatttgattcttaattctaaatacgagctactcttatgagtacttctccctggtactatcataagagatttacatatgttctaatattgaaagctcacaagagaccccgagacagggaggtacacttacatttactattctcattttacagatggaaaaattaagacttcatgaggttaagtaacttaccaaggtcacacagccagtaagttaggggttcaaacccacaagaccttatggccctaggtattactctctccatattccatatttggttgaggagcaggtccagagaggttaataaacttgcccaaaggcatgcatcaaggaatggcagagccagagggctatgtgacctaaaaactattgcccctctgttttgggatagtcccccccacacacactcctgcccttggccttgaccaccgcatacagatcgtttctaccctcttcacctccaacttcattggcatctgcttcagccgctccctccactaccagttctacgtctggtatttccacacactgccctacctcctgtgggccatgcctgcacgctggctcacacacctgctcaggtaccagctgggacaacctgggggagtgggaagggatagggagttcctgttgggggtttatgtctagggcatgaggagctgcaggtctgcaggccttgcaactggatgaaacgtggaacctgtttctcatctccaggttgttggtgctggggctcatcgagctctcctggaacacatacccttccacatcctgcagctctgctgccctgcacatatgccatgccgtcatcctgctgcagctctggctgggcccgcagcctttccccaagagcacccaacacagcaagaaagcccactgaagtccacccctttccctcaggacctgagtctaccctcaggacctggggttggttg

SEQ ID NO: 10669 - DNA, 995 bp, Homo sapiens
aaaggaaggttccaccccagccccttacacccaaccatatcctttaaattgtgggaaggtaagtcttgccctctctaggtgctgacagagtcctggtcaggtatcccttgacagctggtgacctgggcgaggaaaggggaccccaatcatagaagtcctattctgcaccactgtgctgagcacttcacatattgaaggatatttgattcttaattctaaatacgagctactcttatgagtacttctccctggtactatcataagagatttacatatgttctaatattgaaagctcacaagagaccccgagacagggaggtacacttacatttactattctcattttacagatggaaaaattaagacttcatgaggttaagtaacttaccaaggtcacacagccagtaagttaggggttcaaacccacaagaccttatggccctaggtattactctctccatattccatatttggttgaggagcaggtccagagaggttaataaacttgcccaaaggcatgcatcaaggaatggcagagccagagggctatgtgacctaaaaactattgcccctctgttttgggatagtcccccccacacacactcctgcccttggccttgaccaccgcatacagatcgtttctaccctcttcacctccaacttcattggcatctgcttcagccgctccctccactaccagttctacgtctggtatttccacacactgccctacctcctgtgggccatgcctgcacgctggctcacacacctgctcaggttgttggtgctggggctcatcgagctctcctggaacacatacccttccacatcctgcagctctgctgccctgcacatatgccatgccgtcatcctgctgcagctctggctgggcccgcagcctttccccaagagcacccaacacagcaagaaagcccactgaagtccacccctttccctcaggacctgagtctaccctcaggacctggggttggttg

SEQ ID NO: 10670 - DNA, 4185 bp, Homo sapiens
acacaagcggcgcaccgttaagatggcggctgggctgcggaaacgcggccggtccggttccgcggcccaggcagagggactctgcaagcaatggctgcagcgcgcctggcaagagcggcgcctgctgctgcgggagccgcgctacacgctgctggtggccgcctgcctctgcctggcggaggtgggcatcaccttctgggtcattcacagggtggcatgtgagtgcgccgagggggaggggaggggagggagggagacctgaacccgcgacccaaactggatctcagacctggaactccaaaccagactctgtatccactcactcgtcaattgcgaacccatccatatcccttacctgagcgccaagcctgctctacagaaaaccggatcttaatctgcccgcatggcagaggtggataccctagagattggccttctgcactgaacttacagcctgcaaaccagcttagaagtcagatttgagccaaaattgttgtactgctgctgctgctgcttttctctgtggctttggacacctcaggtctcctcctggatctcagctttttccatgtgttcagttctgtgatctttgaacgtcccttctcaatgatggcatcttgtgaccacttgagtccattaggcattattggctactcctttccaggctgaaactatactctaggcttaaggcacttggctttcttgctaaagactcttaattcaacaaatatttatttagtgcttattatatgcctagcattatgctggttaccagagagaggtacagtggtgaataagagatgcatttctgccgggcgcggtggctcacgcctgtaatcccagcactttgggaggccgaggcgggcggatcacgaggtcaggagatcgaggccatcctggctaacacggtgaaaccccgtctctactgaaaaaaaaaaaaaaaaaagaatttagccgggcatggtggcgggcgcctgtagtcccagctactcgggaggctgaggcaggagaatggcgtgaacccgggaggcagagctttcagtgagccgagatcacgccactgcactccagcctgggcgacagagcaagactccgtctcaaaaaaaaaaaaagaaaaaggatgcatttctaactcgggcctggacagtaagttagcaggcaattataatgcatcataatcatggtagtagtaacacaggataccataaagggcataggaagtcacttaaaccaggttggaggagtcagcaaaggcttcatagagccacccttggaaggtaggaattagctatttaaggaaagaagaaaaaggtgaggggaaggagtgctgtggacagaggatcctctattaaaaatctccagctaggctgggcgcagcggcacacgcctgtaatcccagcactttggtaggcctaggcgggtggatctcctgaggtcaggaatttgagaccagcctggccaacatgatgaaatcctgtctctactaaaaatacaaaaattagctgggcgtggtggcatatgcctgtaatcccagctactcgggaggttgagacaggagaattgcttgaacccgggaggtggaggttgcagtgagccgagattgcgccactgtactccagcctgggtgacagagcaagctccgtgtcaaaaaaaaaaaaaattcagttagactgggcacggtggctcatgcctgtaatcccagcactttgggaggctgaggtgggcggatcacttgggggcaggagttaaagaccagcctggctgggcacggtggcttatgcctgtaattctagcactttgggagcccgaggcgggcagatcacctgaggtcaggagttcaacaccagcctggccaatatgttgacaccctgtctctactaaaatagaaaaattagctgggcatgatggcaagtgcctgtaatcccagctacttgggaggctgagatgggaaaatggctcgaaccggggagatggtggttgcagtgagctgagatcgcaccactgcactccagcctgggtggctgagcgagaccctgtctcaaaagaaaaacaaacaaacaaaccagcctggccaacacggtgaaaccccatctctactaaaaatacaaaacttaaaaaattagccaagcatggtggcacacacctgtagtcccagctactcgggagactgaggcaggagaatcacttgaacccgggaggcggaggttgcagtgagctgagatcgtaccactgcactccagtctgggtgacagagtgagactctgtcaaaaaaaaaaaaaaaagaagacagcctggttcctttgaggaactgaaatgatttttttagagctagagtgtagaaatcaagtgaagggagtagtaagagatgggaatgcagaaactgaggccagatcatgaaggaatttgaaagctttgttaagaagatagcatgataattaagaacttgggaccctgcaagcttcaatcccaactccaccatcctagctcaattatcttaagccagtcacttaacctaattaattcttaggctccccttcaaaaaatgggaataatacagagttttctttatcttaagggtcttggggaatcattgagaggttttaagcagaggcctgttatgatttgtattttaggaggagctctttggtgtacgaggtggaaaatatattgtagcagggtgaaagtagaagtcaggagcctaattagcaggctattgtatactcattggggctagagattactttaggctcaaatttgagtatgtagtagcagagaaggatgagatagagatatttacggtgaggaacaggcagaacttgttgacgaagggttgcaaatgagagaggagggagtatcaaagatgttactcaggttcgtgacctggtagctaagaggtcggtggtgccatttgcggaacccaggaaaaggagtagattggaatgggaagaaagatcacaaattcacttatagaaatgttgagtttgagatgcctgggctcacccagagaatgtcagataaagagttagattaagaggtagtaaagccctgggaattggctgaaagtctgtgttttgatggtctggaggcatggggagggtggcagacaagttctagactcagaagtaaccagatcatcttgtcttcttccagacacagagattgactggaaggcctacatggccgaggtagaaggcgtcatcaatggtacctatgactatacccaactgcagggtgacaccggaccacttgtgtgagtggggacaggaagttcagggaggatgtgaggggctggttaggtactagtctgtgtgacctgacccaggctcacattttctctcatcttccaggtacccagctggtttcgtgtacatctttatggggttgtactatgccaccagccgaggcactgacatccgcatggcccagaacatctttgctgtgctctacctggctaccttgctgcttgtcttcttgatctatcaccagacctgcaaggtgagtccatgctaccagggctagagggccccagcctgggagggctgggtggtggggatggctcaggcttgctgagctgaccttgtaccttactgtgttttccctttaggtacctcccttcgtctttttcttcatgtgctgcgcctcttaccgtgtccactccatctttgtgctgcggctcttcaatgacccagtggccatggtgctgctcttcctcagtatcaacctcctgctggcccagcgctggggctggggttgctgctttttcaggtcaacacctcttcctttctggtcccctctcgttttctgcatttccatctcttcccaatttcctgcagcagagggagtaaaggagtagccaagacagcatgggtcactcagggctccacaaagcgagtccaggatctatagaaagtttctgccctgccatcccccaacatacacacatgccctctttccatcctgtcttcctcccagacagcattccttgttggaattagtccttcacattctaaatactcagtatatgctcattcgcatctagtaggcatagagactatgtatctgcctcctgcctactccaggctcttccctccaacagttgtgagtgtaggtcccatcttggagtttgttggcgtggcggcgggggggaggttgctgtggtgatggtggggggtatgtctttgggtg

SEQ ID NO: 10671 - DNA, 910 bp, Homo sapiens
acacaagcggcgcaccgttaagatggcggctgggctgcggaaacgcggccggtccggttccgcggcccaggcagagggactctgcaagcaatggctgcagcgcgcctggcaagagcggcgcctgctgctgcgggagccgcgctacacgctgctggtggccgcctgcctctgcctggcggaggtacccagctggtttcgtgtacatctttatggggttgtactatgccaccagccgaggcactgacatccgcatggcccagaacatctttgctgtgctctacctggctaccttgctgcttgtcttcttgatctatcaccagacctgcaaggtacctcccttcgtctttttcttcatgtgctgcgcctcttaccgtgtccactccatctttgtgctgcggctcttcaatgacccagtggccatggtgctgctcttcctcagtatcaacctcctgctggcccagcgctggggctggggttgctgctttttcaggtcaacacctcttcctttctggtcccctctcgttttctgcatttccatctcttcccaatttcctgcagcagagggagtaaaggagtagccaagacagcatgggtcactcagggctccacaaagcgagtccaggatctatagaaagtttctgccctgccatcccccaacatacacacatgccctctttccatcctgtcttcctcccagacagcattccttgttggaattagtccttcacattctaaatactcagtatatgctcattcgcatctagtaggcatagagactatgtatctgcctcctgcctactccaggctcttccctccaacagttgtgagtgtaggtcccatcttggagtttgttggcgtggcggcgggggggaggttgctgtggtgatggtggggggtatgtctttgggtg

SEQ ID NO: 10672 - DNA, 1658 bp, Homo sapiens
gagagccccgggagagtgaagggccggggaggacaaggcgccccgggcccaaagcgcgccggctcccgctcgggcggccgcggacatgtgcaggatgtccttcaagaaggaaactccacttgccaatgctgcattctgggcagccaggagaggaaacctggcgctgctgaagctgctgttgaacagcggccgggtggacgtggactgcagagacagccatggcaccacactcctgatggttgctgcctacgctggccacatagactgtgtgagggaactggttctgcaaggagcagacatcaatctccagagagagtcaggtacaactgccctattctttgccgcccagcaaggccataatgatgtcgtgagatttctctttggatttggagcatccactgaatttaggaccaaagacgggggcaccgccctgttggctgccagtcagtacgggcacatgcaggtggtggagaccttgctgaagcacggagcaaacatccatgaccaactttatgatggagccactgccctcttcctagctgcccaaggtggttacttggatgttattcgattactgctggcttcaggagcaaaagtcaaccagccaaggcaggacgggacagcgcccctgtggatcgcgtcccagatgggccacagcgaggtggtgcgggtgatgctgctgcgcggagccgaccgcgacgctgcgcggaacgatggcacaacagcattattgaaagcagccaacaaagggtataatgatgtcataaaagagttgcttaaattctcacccactcttggtattttgaaggccaatgaacttccggcagaactaaccaaaaatgaacgtatattgcgtctcctgagaagtaaagaaggtcccagaaagagctaacttagctccatatttgacagaaagatagaaagcttaaccacattgtccaaaaagaaattgcatttcaagcagtgttggaaattcttttatgaaaaaaaaagatgcccagaatgcccatcctgtgggtccctgacaaagaagagctacgctctgtgcacgaagtcaagaaccaaacagctcagggaccctcttgccccttcaccatggacttctcatggtgtcctgtaactcatctcccggggggcctggcatgttcacagattccacagaaactcattttcaacaatgctaacttggacctgtcagttaaactctaaggtggacagggttctcagtactaagcaaggagacagaatgctttgttcctttaaaagactgaaaagctgaccttcaatggattgaggcacttttgcttttgtgttaaatgtagatgtgctaaaatatatagatctatcatattttacctacatatgtatgtcattccagtataaaacattctcctctacccaagaaccatagccatgattgttataaatcaatgaagtgtaaacatacattattaaaaaaccacttctgacattccattatgtgctattcaaagatggactattgaactatagaaaagacagactgtgcatttgttcgttgatcctcatcttattcctgacatgtaaaaatcaattttacgtagagtcaacattgtaggtaggttaaaataccagtggcaaatttggaaattcagaaacttataaaccacgagaaatat

SEQ ID NO: 10673 - DNA, 14362 bp, Homo sapiens
cgggcccaaagcgcgccggctcccgctcgggcggccgcggacatgtgcaggatgtccttcaaggtgagcgaccgggactccggggtcagggctggggccgggctcgggcggccgggcccgcggggtcgggtggggtgggatggggtgggatggggtgggcgctgcccgctgcccgccgcctcctccttcctctctcctccagctgcgggcgaggcccgggaggaagcggcggggctgggtgcgccctgtgggtttgcggtttgcctgcctgccctgcctgagaggcttcgcactcatggctgtggatcggctgagtctgtgcccggcgacggggcggcggggactgtcgccgggtaacaggtcgggggcgggtaagaagcctggggtcagcgctgtcctgcagcagaaggagtccccgaccctgaccctctgggtcctcatgcaggagtaccagctgcacccacggatgcctcctccccggaggggtggccagcacccagggaggcttcagggtccaaaggtgtcttgtctcaaaagagttgattaaagtcattccatctaatccccacattttaggatgaaagaggttgatttgcctcgattgaaagggtttaataaaaatagcagttaaaatgtattaaacagttcaaatgtgcctgactctgaaccaaggacatggtgtgtatggtctcaaccctgggggagacctgtgggaggtgctcttcgtggctcttttttttttttttttcaaatgagaaaactaagatatagagaaattaactcacccacggttttgcagccaataagttatggtgttaagactgaaacccaagtgtgtctgactcctaagccactgtaatcccgttgccgacaatagctcatgtaagcagaggagtgacatggcgagatgtgcatgttgcaaagatctctggctaggtttggagaagagggttggagctggaagatgttgtcatctttttaagaaatggtactggaccagtgcataggtggtgagaatggaacgaagcagacgaatgtgaatgactttaaagttttttttcctgagacggagttttgctcttgttgcccaggctggagtgcaatggtgtgatctcagctcactgcaacttccgcctcccgggttcaagctatttctccttccttaccctccagagtagctgggattacaggcgtgcgccaccatgcccagctaattttttcgtatttttagtagagacggggttctgccatgttggcgaggctggtctcgaactcctgacctcaggtgatccaccctccttggcctcccaaagtgctggggttaaaggcgtgagccactacgcccggccgactttaaaagttttaaatcggcataattcagtagggaaggcaagagagataaagataaaacgtttggtttgggataaattttgaggatagatgggaatccaagcagagatgttgattagacagatatactctcctcgatcccaggaggcaagtctgggcagcagctagagatgagatttaggagtcagcagtgttaagtaggcacccatgggaatgaacatgattgcccagtggaaccatataaaggtggaaaataagaggactgaggacaaaatcttgaagaagatttgagaaagagcagccagagacgaatgagaaaactcagaagcatgtgctgtcacttacaccaagcatctctaatctttcaacaaagatgaagaggaccttgatgtttattaatgccacagggaaatcaaataaacaaagaattgaaaagtccattggatttagtgacggaataggcactggtgaccttgccaagagcactttcagtggtgttaggatcaggagccagattgcaatagcttgaaagagagtgggtagaatccacaagtgtggagaactctttcaagaaattctgcaagaaacagatttttgttagtttgtttgtttgtttggacaaagtcttgctcttgtcacccaggctagagtgcagtggcgcaatcttggctcactgcaacctctgcctctcgggttcaagcgattctcctggctcagcctcctgagtagctgggattacaggtgcctgacaccaagcccagctaattttttgtaattttagtagagacggggtttcgccatgttggccagcctggtctcgaactcctgacctcacgtgatcgcccgcctcagcctcccaaagtgctgggattagaggcatgagccacggcacccaacccagagattctttttaaaaggcagtggctgcagcaaggatctggaattgaccaagtgtttgtttgctttaaaatggtagagacttgagcatctttaaatgatgataggcacttcaacaataaaaagacaaataaagcctaattttaaagtggacatatgaatagacatttctcccaagaagtttacaaatggcccgtaagcacctgaaaagatgcttaacattattagccatggtcttggaaatgcaaatacaaaactgtaatgagataccacttcatacccgctaggatggctttaatcagcaagacaatgacgaatgttggcaaggatgtggagaaattgaatctgcatgcattgctggtaggagtatgaagtgatgcagtcatttttatttatttattttatttatttttttgagacagagtctcactctgtcagccaggctggagtgcaatggcatgatctcagctcactgcaacttctgcctcccgggctcaagcaattctcctgcctcagccccccgagtagctgggattacaggcatgtgccaccacgcccggctaatttttgcatttttagtagagacggggtttcaccatgttggccaggctggtcttgaactcctgacctcaggtaatctgcctgcctcgggctcccagagtgctgggattataggcgtgggccaccgcgcctggccgatgcagtcatttttaaaaccatgcttgtctttcttcaaaaagttttttttgtttgtttgttttttgtttttttttttgtcttttttgagatggagtctcactctgtcatcaggctggagtacagtggcacgatctcagctcaccgcaacctctgcctcccgggttcaagcaattctcctgcctcagcctcctgagtcactgagactacaggcatgcgccaccatgcccagctaatttttgtatttttagtagagaccgggtttcaccatgttggccaggatggtctcgatctcttgacctcgtgattcacctgcttcagacttccaaagtgctgggattacaggcataagccaccgcacccagcctcaaaaagttaaatatagagttaccacatgacccagcaatttcactactaggaatatacccaagagaaatggaaacgtgttcacacaaaaacttgaacataaagatccatagcaatagtattcataatagtcagaaagtggaaacaatccaaatgtccataaactgatgataaaaacaaaatgtgggccaggcacagtggctcatccctgtaatcccagcactttgggaagctgtggcggatcacctgaagtcgggagtttaagaccagcctggccaacgtggtgaaaccccgtctctactaaaaatacaaaaattagctggacgtcatggcaggtgcctgtaatcccagctactggggaggctgaggcaggaaaatcacttgaaccctagagacagaggttgcagtgagccaagatcataccactgcattccagcctgggtgacagagtgagactctgtctcaaaacaaacaaaaaaaaagtgttttatattataaataccatagatagggaggcttaaacaacagacatttatttctcacagttctggagctaggaagtcttgagatcaaggtggctggtgagggcacttttcctgacttacagatggccacctgtgcatgccccgtttcctcacatgaccaagagagaaagccctggtgtctctaattcttttaaggacattaattccatcatgggggctatacctacacaacctcttttaaacttaattgactcccgaagactgctcctcctaaaatcattacactgggcattaggacttgaacacatgaatttttggggggatgcaaacattcagtcctcagcccctgtcctcctggcatgtctgtcttgcgtgcaacatatattcattccatcccaacagtccccaaagttttagctagttccagcatcaactctaaaatccacagtctcatctaactatctaaatcagatattgggtaagactcaaggtatgattcatcccaagtgaaattcttctctagctgtgagcctgtgaaatcacacaagttttttgtttttgtttttgcttttgttttgagacagggtctcactctgtcgcctgcccaggctggcacaatcacgattcactacagccttgacctcctgggctcaagcgatcctcctgcctcagtctcccgagtagctgggactacaggcttgcaccaccatgcctggctaatattttttattttttgtagagataggggtctccctgtgttgcccaggctgatctcagactcctggactcaagcaatcctcctgctttggcctcccaaagtgttgggattacaggtgtgagccaccatgcctagtcctcaaacaagttttgtggttctaaaatacgacagtgggacaggcataggatatacatgtttccaccccaaaagggagaaattggaagaaaggaatgacaggtcacaagcaagtccaatacctagcaaggcaaatattattagaacttaaagtttgagaataatcctctttggttcagtgctttgccttctgaactcactgagtggtgggtcctgctttctggaccaactcgggcaggggattgggctcgcaagacattggtggttagggcttcagcatatgaatttggggaggaacacaagcatttagtccataacatggtaatctgtacaatggactatcattcagccataaaaaggaatgaagcactaatgcatgctacaacatagatgaaacttaaaaacatattcagtgaaggaaaccagacacagaatgccatatattgtatgattccatttatatgcaatgtccaaaatcggcaaatccatagagacagaaagtcgattagtggttgccaggggctggggaagaggaggggatggcgagtgattgttgatgggtagataatctggaatagatagtggtgatggttgtgcaaccttatgattgcaccaaaacccactggattgtatgctttgaaaggatgaattttatgtatgtagattatatctcaatttttttaagtatttttaaatcataatagggaatgaggagaaggcttggggatgattttgctgagtgactgaatttctcagggagttgagggcggtgagcctgagctgggctccattcgctgtggaattagctagaatggcagaaggaaacctctcccgttgggctaaagggaaaggaggtgaggttgagtgtggatgttttgtaaagtgaagcccaggatgaagtcaggatttggggtaggtagaaaggaggctggcaagccaggtgccaacgttttccatgaataaggaagaacgatcaggtggtgaacgataaggaggtgacaactgccaggtgaggtgaggtagaggttgggaaggtgggacgacctgagtcttgaaggagcagagatttgcacccctgatggaggggcagtggcctggaagccaggtgggcctattcactgcagtgctgatgtgggagaaggccttgcttccaccgggagcaggcactggggaggttgaggcagggagagagggagtgctctgcgctaggcaaaggatgaagaggagttgatttactgtgaaatggacttccagaaggcacagagggaaggtctgtccagagcagagtcccaggccagtctgagatttgcattagcaacattcttctatccacctcccatcctatcaaacatattaaaatgcacccacggccacaataataaaagagaccttttattgtaaaatttttgaaaggattttgtgacactgctttttaaatgatttagctgtaagttactcatttaatttaccttttgtccatttttctgcagttgtcatagttggtcagtaactcatgcagcgagcaaatcagacctacaaatgattttcatgtggcatcagtattttatgaataccaaatttagcagttaataaagttgacaggatgttatgttttgtagctatttaattgaatatttattaactttgatttgggaaacacagattaactttttcattttcataggctcctgaaagactcataggccctaggctctgggtctccaaagcctacgtgtaaaaaggccctggtttgttaggcgagtctgtggaagaataaatagagcattataagtcacaatttaggctcttcttgatgattcagaatcaatgtatgtagggctgcttgcatctgagctacatgactcctttgcgtctacttttgatggtttttccgtcaagctgttatcagtgacttctcactggtaccactttgcctccagcaaacttcctttaacaactggcaactcctaatctcttctgcttgagaacacagacacatgtttgttagaattatcttttttttttttttttttgagacggagtctcgctctgtcgcccaggctggagtgcagtggcgggatctcggctcactgcaagctccgcctcccgggttcacgccattctcctgcctcagcctcccgagtagctgggactacaggcgcccaccactacgcccggctaattttttgtatttttagtagagacggggtttcaccgttttagccgggatggtctcgatctcctgaccttgtgatccgcccgcctcggcctcccaaagtgctgggattacaggcgtgagccaccgcgcccggccagaattatcttttaaagtaaaacgaaactcagagaattattttttaaagtaaaaggaggccaggcacggtggctcacgcctgtaatcccagcactttgggaggctgaggcgggtagatcacctgaggtcaggagttcaagaccattctggccaatatggctaatacagtgaaaccccatctctactaaaaagtacgaaaattagccaggcgttgtggcaagtgcctgtaattccagctactcaggaggctaaggcaggagaatcgcttgaacccgggaggcagagcttgcagtgagtcgagatcacgccactgcactccagcctgggtgacagagtgagactccgtctcaaaaaataaaaaaaattaaaaaaaagaatttcatatttccttcagggtctgctgtcatatgatactataccccagccaggttggagtgggtatcttattctacaaagagtctgttttgtgaatcttatgaactatattttaatattaatgctggttaatcgttgcgcctaagttccaaagggagtgaagtgtaatgagatatatcagacctcccttcctgtcatggcctgaacttttcaggttttctttgggatcccctgggccaagaggggggttcactcagtcagtgggggggcttaaaattttatttttgatttacaggcttgatgtttgttaagcattctgaaaattgtaaatacttagcacaaagtgggacaatggatgtctcaaaaacatctttctgcatatagctttgcaatccatcactacatctttattttatgtcacctctaatatcatagaaattcattattgagtagagctaatattctcttgattgaattaataagtgtacgattgaagtccacattactctaaacttttttaaactaatagtttaaatttctaccccctcttagcttttaattagaattccagttctgtacaaataaattttcctctgtgtttcctctccccttccttcctgtacaatttctggaagtgtacagatgagcagtgtattagccaaaattctgacagtaaatggaagggggcaagtagggagagaagaaaatatgacaaatgtggaagcttgcactcaattttctacaaggtgtaaaatgtaagatctcagactctggacccaaacagactatcagacttttttttttttttttttttttttgagacagagtcttgctctgtcacccaggttggagtgcagtggcgccatcttggttcactgcaacctccacctcccaggttcaagcaattccttgccgcagcctcccgagtagctgggattacacgtgtggaccgtcacacccagctaatttttgtatttttagtagaaacagggtttcacgttgttggccagactggtctcgaactcctgagctcaagtgatctgcctacctcagcctcctaaagtgcttgggattacaggcgtgagccaccgtgtccagtccagacttggatttatttatttatttatttatttatttatttatttatttatttattttttgtggaggctggggaaacagagtctcgctctgtcaccaggctggagtgcagtggcatgatcttggctcactgcaacctccgcctcccggattcaagcaattctcctgcctcagcctctcaagtagctgggactacaggtgcgtgccaccgtgcccagctaatttttgtatttttagtagagatggagtttcaccatgttggctgggatggttttgatctctcgacctcatgatctgcccgcctgggcctcccaaagtgctgagattacaggcgtgagacaccgcacccagcccaaacttggacttaaatcccggctctgttatttggatgagccaagatccttactgcgtgaccttgactaactcattcctatgctcaatttcctcatcttaaaaataagaataataggccaggcatggtggctcatgcctgtaatctcagcactttgggaggctgaggcaagtggattacttgaggccaggagtatgagatcagtctggccaatgtggcaaaacgctagctctaccaaaaatacaaaaattagccaggcatggtcagtgtcaggcatggttgcagtgagcccagattgcgccactgcactccagcctgggcaacggatcgagactccatataaaagaggggaggggaggggagaagagggaagggaaggagaggggagaggaggggccttcctttaaaaagtaaaaaataaaagaaaaaatgggactaggccaggtgcggtggctcacgcctgtaatcctagcactttgggaggccaagatgggcggatcacgaggtcaggagttcgagatcagcctggccaatatggtgaaaacccatctctactaataatacaaaaattagccgggcgtagtggcaggtgcctgtaatcccagctactcaggaggctgaggcagaagaatcgcttgaacccaggagacggaggttacagtgagccgagatcatggcactgcactccagcctgggtgacagagtgagattatccatcttaaataaaaagaaaaaatgggaataattatctcagtcatacattacttaacaacaaggacacattctgagaaatgcacattaggttattctttcattgcgcaaacatcatagagtgcacttactacagacatagagagtgtagccgactgcacatctaggctctatggtgtagcctattgctcctgggtgacaaaactctatagcatgctcctgaatggaatactgtaggcaattgttacacagtggtgagcatttgcatatctaaacatatgtaaatgtagaaaagtacagtaaaaaaatggtatcataatcttacagggccactatcatttatgcagcctatcattatatattacatgactgtactacctcatggggctgctcctggaattaaatgagttaaagcagtaaattgtttagcacactgcctgatacagagcaagatctcaacttagttgtccttgctgttacttataaggttggaaccagcaagcctgagagaagctccttggttttattgtagagatcagaaaaatcaagaaagaggtgaaatagtaatagcatgcttggtaaagtgctttacagtttctgtgatgtattttcacgtgcactgtctcctttaaaggctagaggactggccccatctctcgccacaccatttatgattgtgtgcatatcatactgagaggagatttggaagttatccagggaatgtgatgtgtatagaccccaaacagaaggaacgttggggactttccatcttagctggagaggagcttgggatggaggataggaaggaggtcaccgggggtcactgctgccttactccttgctatccacagaagaattccacaggaggcagaacagtgtgatggggagttaaagggcagcctcaagcaagagactgcctgttgctgaagcctgacttgccatttctcactttcctcatctgtaaaatggggtcgtcccagtgcccacttcactgagcaaggatgaggatgaaataagctagtgtatgcagaagatacgccacgtggtccagagtaagcactttgcactgagtgagcattagctcaagattcctgacctccagtaaatgtgccggccatagggtgacaggagcacctgcccatttctttgctagacattgccacctagatgccccataggcacttgaaacccaccatgtccaaccctgaactcatcatttttttccaaagcctgtccttcgtacggtgtttccaatcttcaagaattggcaccaagatcagccaggcactggaaccagaaatcaggagtcaatccactttcctattccctcctctcctgcacatacaatcacagaccaaggctgtggagtttagctccttaaaatgtctctggtctgtctaatcttcccatacccactgttgctgcctcttagtaaattaagcccttgaaggaaaatgaaatatttatagcttttcacaaagcttggtttctagaaccttatagaaaaccaggatggccagcccagctggagaggaatccccaagaccatcctaaagggaggagaggccccgactagagatcttgttatgacaatagacacttgctgtttgcagatggtcttttgaaggtatttggggttaaagtgaaatgacagagtccctgaaaatgaattacagtctatcattcttgtgtgtttacctttcaggaaaagctagcagagctgttccctggtgcatattacattgtctgcctgattcaccctaccagacttcattttggccttgtgcaatctctttgttaaaaggctttgtttcatgattcattatacaggtcaaacctcccttgccatttctttgcctagttactgacagctggaacaaattagacccagcctggtgcctaagctgcaacactggtgtgaaaaccatggttgcagtttgccttgaaaactccaggatagcaaaatttacacggtcaggaaaggcaaattgttcatctgaaattggaggtgatttttttcccttctaaatgagccaggaaactattcaaagtatgtttgctgttagcttatcactctccaccctgccattctctcattcaggtatgtacaagggcgtacgcctgtgtatgtgctgaaggacttctgaaatgaaatcctcacacccacaaatactgctgccactgtcctttcattttagagggcttgttgagtagctgaaattgttggtattttcttttgagcttagaaaaagcactgtatttaatacgatatcaatatatttaaaaggcatattacgcaaaaggccttttgagtcgcgtagatgttttaaacccactcacaaaaaatgctttcattaaacaatgtgaatacttttataaaatttcctaagaccatcaaaattctttattagtaccaatactctggatttaattttgcctattgattctgacttcgtaaagaaaagtaaatagaggaaaggaaactggcacttaatcagcatttatggtgtgttgggtacaatattaggcaaaaatcagcatcatttaataccgtcaacttcaaggcaggtactgtgatctccatctaagcaagaggaaactgagattcccaagggccaacttacttgtgcagggctggggtgagctgtctggtcccaaagccagttcttccctctcgtcgactgttctctacaaactcatatcaattattttagagaagaagattgtactacagtcagctctgccacccatttagaagacctgttttccacttccatgctttccataggtatggctccaaaattaactttgtagctttaaaataacccagtaggcccagtgcagtggctcacgcctgtaatcccagcactttgggaggctgaggtgggtagattgcttgagcccaggagttcgagaccagcctaggccacacagcgagaacctctctacaaaaaataaaataattagccgggcatggtggcatgcgcctggggtctcagctactcaggatgctgaggtgggaggatggcttgagcctgagaggtcgaggctgcagtgagtcataactatgctactgcactccagcctgggcagcagagtgagtccctgtctcaaacaaacaaaacgatccaacagtggaatgaaggatccatatgaagacatgtaatggcattatttgccctaagttccttgttctcaagtcaaacctctggcaagttccagctgaagcaaagaaaattagatggaggggccgggcacggtggctcacacctgtaatcccagcactttgggaggccaaggcgggaggatcacgaggtcaagagtacaagaccatcctggccaacgtggtgaaactctgtctctactaaaaatacaaaaattagctgggcatggtggcgcacgcctgtagtcccagctactcagaaggctgaggcaggagaatcacttgaacccaggaaggggaggttgcagtgagccaagatcacaccactgcactccagcctggcgacagagtgagactccatctcaaaaacaaaacaaacaaacaaaaaaagaaaattaggtggaggaaaagtgaaacattcacacaggtagttggaatcagatagaaagcattgagggcttaggaaacgggcaggtaaactcttttgagaggtcagaattgggagaaattttgccccacttagaggtgaggaaagatttggagtgtttctgggaggaaatagcattcgagcagagccttggccttgaaggatggaggaaaattcatttcaagcaaaaaggaaactgggtgaacaaaaacacaacagaggcaggaaagtgagaacattagtgggaaataggttattaatagtgctggattatcaacaacactgctcttcatagccatgtggtggctcaggtgtctggaatccaacagagttcattctgttattacagttgtctattgctggaggatcaatctttcaaatgatgcaacacatctggatgttcttctttctgaatgttattatctatgtgcatagcagcagtcatgttaactgacatcaattttaagatcctgtttcattttgttcttgcagaaggaaactccacttgccaatgctgcattctgggcagccaggagaggaaacctggcgctgctgaagctgctgttgaacagcggccgggtggacgtggactgcagagacagcgtacggtggttcggtagatgcatgcccagcatgcaccattgccctctgtgggcacaggagcacctcaggaatacattcccctttacaatgcttatttactttttcatgtgtttgcttgctttatcctttttaaaacatccaaggtactgtggtgaacttaaaaacatgctgggggaagtcagaaagaaaaggaaacaatgaaatgcataaaacagaaggcaaccacaatagggaaagaggcacttcactgggaatcagaattggcagattacaagaagaaaagcctgtttagtgaaagaattcaagccaaccacttccatgaaaagatggagataatttagagcacaagtgggctgccatggatgtgggcgttatgtttcttctacaaggatgagaaaacaaaaattgaagcctcccccaggattttatcctttcattacctcttgaaaacataaatacactaattggcaatttaaaaagggaaacaaaaatagatactactgcccactggcagataccacttagagagcttttccatccccagctagaggcaatcgtttttctgtcctcagcaagacttctcatctctgggaccaagaggacctccaatgaggaaagggagcgagcaatgatgttttgattttaggatttgaataaaaatgtttcaaagga

SEQ ID NO: 10674 - DNA, 846 bp, Homo sapiens
cgggcccaaagcgcgccggctcccgctcgggcggccgcggacatgtgcaggatgtccttcaagaaggaaactccacttgccaatgctgcattctgggcagccaggagaggaaacctggcgctgctgaagctgctgttgaacagcggccgggtggacgtggactgcagagacagcgtacggtggttcggtagatgcatgcccagcatgcaccattgccctctgtgggcacaggagcacctcaggaatacattcccctttacaatgcttatttactttttcatgtgtttgcttgctttatcctttttaaaacatccaaggtactgtggtgaacttaaaaacatgctgggggaagtcagaaagaaaaggaaacaatgaaatgcataaaacagaaggcaaccacaatagggaaagaggcacttcactgggaatcagaattggcagattacaagaagaaaagcctgtttagtgaaagaattcaagccaaccacttccatgaaaagatggagataatttagagcacaagtgggctgccatggatgtgggcgttatgtttcttctacaaggatgagaaaacaaaaattgaagcctcccccaggattttatcctttcattacctcttgaaaacataaatacactaattggcaatttaaaaagggaaacaaaaatagatactactgcccactggcagataccacttagagagcttttccatccccagctagaggcaatcgtttttctgtcctcagcaagacttctcatctctgggaccaagaggacctccaatgaggaaagggagcgagcaatgatgttttgattttaggatttgaataaaaatgtttcaaagga

SEQ ID NO: 10675 - DNA, 583 bp, Homo sapiens
gcggcggctgctgccgggccgggcggcgggagcgcgcggcgtcggaggccgcccctctgcggaacgccgagagccccgggagagtgaagggccggggaggacaaggcgccccgggcccaaagcgcgccggctcccgctcgggcggccgcggacatgtgcaggatgtccttcaagaaggaaactccacttgccaatgctgcattctgggcagccaggagaggaaacctggcgctgctgaagctgctgttgaacagcggccgggtggacgtggactgcagagacagccatggcaccacactcctgatggttgctgcctacgctggccacatagactgtgtgagggaactggttctgcaaggagcagacatcaatctccagagagaggacgggggcaccgccctgttggctgccagtcagtacgggcacatgcaggtggtggagaccttgctgaagcacggagcaaacatccatgaccaactttatgatggagccactgccctcttcctagctgcccaaggtggttacttggatgttattcgattactgctggcttcaggagcaaaagtcaaccagccaaggcagg

SEQ ID NO: 10676 - DNA, 1183 bp, Homo sapiens
ttttcgctttcagacccctggtgttaaagacgttctgtgagcgggtggggccgggcgccccagtcacggcggccgccgcctcctcttcccgcaggacgggacagcgcccctgtggatcgcgtcccagatgggccacagcgaggtggtgcgggtgatgctgctgcgcggagccgaccgcgacgctgcgcggaacgtgagtgcccgagtcgcgcggccaaagagcgaagcctcccggcgcgcctgtgtggagaaaacgggtcttgactgagtctgcagcccacatgggtttcctcccaacctccttccttgagcaggaaaacaaagtcaaggtctgattcggtgctgctcggtctctctcctcctccacccgagatgaccttgggacgcactagagagggtggaatcttagccttaggcctgagggcggtagagacggggcctcccgcctgtcctgggggcctcccgcctgtcctgggggcctcccggctgtcctggggcgtgtcctagggggatcccctggctggtgctgcgcctcctgcaggccctgcctcttgcccctcctccctggagctgcagaccccttgcaccccgtcccctgttggcccgccgtcatccactggcctctgctggtgccacctaatactgcctttgtgtgctgcacagcaggcccttttccccataaggaaggcttgaagagaacctgaccacctatgctgtttgctttttgtgttttactgtggcctttgtataacccttgcttacgtaacccaccttcccctctccaagtctaagctccaaaaaagggaaatcaccagacgcgttcgccaccatttcactgccctctctctcactcttcttcttcccacaatctctgaagccagaaaagacccccaccccccgccccccaattcattcttccttctttctgattacagataaaccctaatggcaggccgaagtggtttcttggctacgggagaattatggactaaatcctccaaacacagcgactgatatgtgaaaatgggagaaaaaggaatttggaaactgtgttcttgagccaaaaaataacgacagaagctaaatattaatttttgaatttggcttttcattctttttagcagattttattttatttttttctgagacagagtctcactctgtcacccaggctggagtgcag

SEQ ID NO: 10677 - DNA, 577 bp, Homo sapiens
ttttcgctttcagacccctggtgttaaagacgttctgtgagcgggtggggccgggcgccccagtcacggcggccgccgcctcctcttcccgcaggacgggacagcgcccctgtggatcgcgtcccagatgggccacagcgaggtggtgcgggtgatgctgctgcgcggagccgaccgcgacgctgcgcggaacgtgagtgcccgagtcgcgcggccaaagagcgaagcctcccggcgcgcctgtgtggagaaaacgggtcttgactgagtctgcagcccacatgggtttcctcccaacctccttccttgagcaggaaaacaaagtcaagataaaccctaatggcaggccgaagtggtttcttggctacgggagaattatggactaaatcctccaaacacagcgactgatatgtgaaaatgggagaaaaaggaatttggaaactgtgttcttgagccaaaaaataacgacagaagctaaatattaatttttgaatttggcttttcattctttttagcagattttattttatttttttctgagacagagtctcactctgtcacccaggctggagtgcag

SEQ ID NO: 10678 - DNA, 28875 bp, Homo sapiens
aaggtggttacttggatgttattcgattactgctggcttcaggagcaaaagtcaaccagccaaggcaggtaatgtccactgttgacatttgcccgagcacatggcgcatggggcagggagggctgggtgtccgctggcagcacatacctgagataaccagtaagctcaaggcatcctttaaacccttctgcttctgtgatgaaaagttaatctttgattagggtatctcctgttctatgctctgagctggcctgaaagcctatgaaaccaagctgacatcacagttcagtactttcaaaacttaagtatttgatgtctgaggtcaagtacacaagtacacactctgccacctcctgtgcaaacaaattatggctgcactgatctaatgagtgcaggctggcctgggacataggtaaacagatgtgggccaagtagcctggcccctgctgataatgctgccttactacctgcccaccacttcttccaccaagccaaagaggagcccatgccgttggaatcattaggaggttctgcaccttcatctctcacaattgttatgctgttgagacttcatttaccaacagcaagctaacagctagcaattcaattaactgaaagtaaaagaacagaaatgtagtctgggagtggtggctcatgcctataatcccagcaccctgggaggccgaggcaggaggatcacttgaggccaggagtttgaggccagcctggccaacatgatgaaaccccgtctctactaaaaatacaaaaattagccaggcgcggtggcgcatgcctgtaatcccagctacttgggaggctgaggcaggagaatcacttgaacctgggaagcagaagttgcaatgagccgagatcgcgcctctgcactccagtcttggcaatagaacaagactctgtctcaaaaaaagagtaatgatttttaaaaagaagaaaaaagaacagaaatgcaagattatacaggcagcactttataaacagtgaagaaccttccaaatgtacagtattataattagcttctcttgtgtaggtactatttttgtccagattaactttttttttttttttttttgagacagcgtcttgctctgtcatccaggctggagtgtggtggcatgatctcgacccattgtaaccttcgcctcctgggttcttgtgcctcagcctcccaaatagctaggattacaggtgcatgccaccatgcccagctaatttttgtatttttagtagagatacattttggtagagagccatgttgcccaggctggtctcgaactcctggcctcaagtgatccacacaccttgggctcccaaagtgctggggttacaagtgtgagccaccatgcctggcaccagattaatttatttttaacaaaacatttcgaattaaggaaacattactataaaggtagtttcctaggaaaaagtcaagctgatttcatacccaggcacatctccactgtactatgacctgatacaggaatgcctctctgtgttcacataatgaatagctatgagaactttaaggttggtctgagctcttggacacaggtttctctggtctttagaagcccaagcacataaggagcctgagaaaaataaagagcctttgggcagagtggtttgaagtcaggaaagcaaagtggttttgaggtcaggaatcccaagttctcaatccatctctgccaataatttgagctgtgtggttttgaacaagtgaatcaacctctctgggcctgactttcatcattgaaaattaggaggctgagcagcatgagcctgatgatctcttcaaatgcccacattttaaataattgttttattcaacattcaatcaatatttcttgagtacttaccatgtgccagacattgtaatcaatgtaatgtatcaatgtaaggttatatttttagaattgtaaagttattcttaggtggccccaggaatactcctgggaaaggaagcagtttcaaaaaaacttttactttcgtcctgctagagttgactttcgaggactggagtttaatattttcgtattggtccttcttattttgttattgttgattgattctgaatcagatgattcattttactaaaattagtaaaaggaattggttatttttagattgcctaagtttgatttgggggccattattgaagataccactgtgaatttagaatgtgaggttatcaagattatcaagtctctctattagtacatccttccaaaataatttctggcactttgaattttattctttatatgcctaaagtactgcttgtaaaaaaccaagtcgatataagagattatatttcaaatgttgcatgagccatgcccacttaaacctaaaatgagtcatgccgtgatgttgaagccaagaagttaaagagtaaaccaacattgcagcagtagccacaacacgccatagctgttttttcttcctcaagagttaggataacctggtcaaagtggatgacctagtctttgagtgcagggatccaccctctggtcaaggagcaagtgctacaacttctaaagactgcatctaatgaaattgttttgaattattttgagttcagccctaaaagaattgttattcaggaaaagggtgtcttataaaataagaattgctttggggaaaaaaggcaatggaatttttcctttttacagagtacactcaccccattgtgccctcaaatcataataatttttattacctactgtgagcttataattagaggttgttatctatccaggtcagactagctcaagttccgtcttctctgaaagtgtaaactctgcatatttattatgttccaagaaaacagtgccatgcctgcacatggcctgcacatggcctacctatattctataggtagagcatttggaaaccaatgttttattctgaaatctcagctgacacattgagtcattattggaaaatccttgaatttacaaaatgaggacaggaatacctgcctggtttaatttcctaatacttttggctaaatctgatttgtaattgttgcactgacattctatgaagccctaccattttattacggtatcctgtaacaggatgttgacaaagttacattgaaattactcagctgacatttgatatgagcttcagggaatctgaacggtagtgggatgacttttctttgtaactctatcactgagaactaaatgaagacctttttagtactttgggatgaggaatcataatcccaaatctagtcatagccagacagtaggaagactatgttcttgatttgaaacttcaaaaaatattttccttccatattgtcctaagccaaaaggtcaagagtcacagagatcattgaaatatagatttcactctaacaattcattttcatttctttccacgtgtcctcaccaagttgagttgctatgagtcagacctttttaatcactagctgagtggctatttctatttttctattaaccaaatgcctcgacatatattttcccaactccactcacccaccttattaaaacaatactttaatagaatgcaaaggtctgatcctgttaacccagagctgaggttagtcagttaactcatctctatctagtctttttcatgtgctaaacagtatttctttgaaggctggaggaaaagtcatctaataaagtgccatctcctaacagaagccttgacttgtacacagagtagctggacccagaaattaaacgttctcccaggtcggaagcttagaggggtgaatccatcaatggcagtgggagaaggagccaaaagattagcgtagaatcctgggggtttggaaatgggaacagacagccataggaagtccttgctgcttggcaagggcagggactctgtcttgtttcgtttgcacatggtacacactcagaaaaagtgtatcgactgccagaagatccccatggctggtgcagagcaggtctggaagcctgcagcatttagtgatcagtgcctgagagttagaagaaggctccagatatagggcccagactcataagcataagccccaggaagactgtaagaggcagctagggagcagacccagattttttgggtggagagcagcttggaaattatggggatatagatatcttaaaatgaaacagaggccccattttgcttattaactgtgtgaccttagcaggttgcctactgtccctgagtctcagtattttaggactactgtgataattaaataaaataatccctgcaaaactcttaatgcagtagctgatacacacccagtgcaatgttaggtattgctgttattatcattcctattccaaccaggcctcattggaacagaaaacccatcagaaatcaaggctgcactttctctagtgagtcgtgtgttctctgtcatctcaaagtctcttcatatctctgtttctccccactcctttctttttttaccagttttgtctgcttacttatcttgtatgtggtccccaggtttatggatcagactgccaacctctgggaatagccatgtcattgtcacagctcatctttgtgcaccaggccacagtgactggctggcctgcctatcctcagtcccatcacccttgactggggaggatagagtcagaccatgggcaatgcagcatctggtaaaatctcttacagacccatttgctgggccaggcacacggtgcaagggacaatcataagaaataggctccagggcagggtagggtgggtaagaaaattatctcaatattgaactccctctgccacgggcaggattcctcacagctcttggactcccaacttcaaatagaattggtccccaagactttctgactggcctaaccctgtaggtagaagtaacccaagtgtgacggctggaaatcgtagaagcaaagagctagtgccgcttcagatactcattcccacagaagaggatggttttagttcttttttccaaatactctcaggagcctacataagaccatacaaggttagtctctaatacaggttgtgtcatatactccatctcatgctgtgatctggctgtaaaagtgatctcgaatgaaatgagggaataacagagttggaggaaactataaaactcactctatttagccatccatcggtactcgaatcctttctatgataatcagctactgttgaacacctctaggcatggagaactcactcctctctgatcagtttctttggtcttagccaacactcattaaacttttatacattgaccccaagtctccatgcagctttcacccatctgtcttctttctatcacttggtctgaaaaattggtctaaatccttttctacttgatatacacacacatagtaaaagacagctatcataaccccatgaatctcattcttcttcaggctaaatgttctattaccttttttttttttttttttttttttttttttttttgagatggagtctcactctgtcgcccaggctggagtgcagaggcatgatcttggctcactgcaacatctgcctcccgggctcaagtgattctcctgcctcagaatcctgagttgctgggactacaggcatgcaccaccacacccggctaacttttgtatttttagttgagacagagttttgccatattggccaggctagtctcaaactccaggcctcaagtgatttgccccacctcggcctcccaaagtgctgggattacaggtgtgaaccaccatgcctggccattacctttttaaaaaaagtgctgtagaggttataacttcacaatgatttctttgatttaatatcaaagtattaaaaatatcaaagtatatggaagtattcaaaagcctatttgaatatttttaaatgttttttcacattttggtacattccaaaactctacaaaaaggagctaaattgacttacttttcatcattttcaaaattatttttatatgtttaatttaaaaaaatatataaaatcgccagacgcggtggctaacacctgtaatcccagcactttgggaggccgaggcgggcagattacaagatcaggagatcgagaccaacctgcctaacacggtgaaaccccatctctactaaaaataaaaaaaaattagccgggcgtggtggtgggcacctgtagtcccagctactcgggaggctgaggcaggagaatggcgtgaacccgggaggcggagcttgcagtgagccaagattgtgccactgcactccagcctgggcgacagagcaagactccgtctcaaaaaaaaaaaacatatgaaatcattgttcttttttttatagagatgggggcctcactgtgttgctgaggctgatcttgaactcctgggctcaagccatcctcccgccttggccccccaaagtgctgggattacaggtgtgagccactgcaccccatcattttcatgatgaaaatgaaggctctaaccattataccagaaggaaaaaataagagaaaacagaaattaaggtgtacaaaagaggaaaacctctcctaattcataaactaaataatcaactgataggtaatctgatttgacaataatgctctaactcacatgcaactccctgggctccaaaatcagatttggagatgtaatgactagtaatgaaatacacaggcggcccccaaatctcattttcccactcattcctacctgctcacagtcagttatctcacagggtcgatggaagaatcaaattaaaaagcatatggaagtattttgtgaacaaaagtacaaattaaggggcgtattgtttctcatgataaatactactcagatgcaattaacatttcctaagcatctgtgagccagtgctcatgctcaccacctttgtatatgttttctcacttatctctgcgaagctaataatttttcctaagaggacactcactcaggctgagatgatttgcctaaggtcttacagccaggaagaactgattgctttttccacctcccatgactattccaattaagatgatatatttgatgagtgttatcattgatgttctaaattgataataataattttttggccaggcacagtggctcatgcttgtaatcccagcactgtgggagaccaaggcgggtggatcacttgaggtcaggagtttgagaccagcctggccaacatggtgaaaccccgtctctacttaaaatacaaaaattagccgggtgtggtggtgcatgcctgtagtctcagcctctcgggaggctgaggcaggaggatctctggaatctgggtggtggaggttgcagtgatctgagatggcaccactgcactccagcctgggcaacagagcaagactccatgataggtaggtaggtaggtagatagatagataatttttcacaatatagcaccttttagcactttcccacatattagtttcaattgttaatacaagtttactaataatgaccaagccattgaaaagcacattgaatagacagctggctgcctctccctgcccgccctctggtggagagagtgacaaagaacaaaacagacccagagcaggcacggagggagaagcgcattagtattggcaccagcttggacccacactcccctcctgccttccagggtcccacccgcacccctctggctacagcagctagatttcccaccctgcatgaaggagccatgcctgtccaagccactgtgactgtagctgcttttccttctccttcaaacgacccttcccctttctcacacctagcaaaatcctggtccttcttcaagacctggatcagatagcactctatccaggacactgagccctcattccccatgcagcagccctcccacctgtttgattttgtgcatttttgtccatactttatgatggcactgcagtcgtatggaaacctccatgtctcttctccaggacttatttttagcactctgcttgagacttagaaggctgggctcacacctgtaatctcagcactttgggaggctgaggtgggaggattgctggaggccaagagttcaagaacaacttaggcaacaaagcaaggccccatctctacaaaaagaaaaaaagaaaaaaaaattagctgggcatggtggtgcacacctgtagtctcagctactaggaaggctgagataggagggtcatttgagcccaggatgttgaggctacagtgagccttgatcatgccactgtactccagtctaggtaacagagtcctgtctcaaataataattatcattattggttgcttgaattattgattaattaaatcctgaattgggaaaatcaaataaagaatatggaagtgcttttaaactaaagtacaaattaaagtacaaattgctcatgataatatttagattcaagaatatttccaccaagaggaccctggaaaaattatgaagtaagttaaagtgtcttccacttccctctatcctttgtttcagcacctcttccactgtctctcccaagacaggtcccaacatcctgtgactgctcttcagcacccccagatcctcctgggctcccaagtcaccagcttccccgacccagctcagatgtcttcatcctctctccctttcctgggacagcagtgggcaacaatcttgtgcctgcttctgctagtaggctaaggttgaaattacacactgcagcagaaaatgtaactttatattctataactgaatcattttgctcttcagccccccttcccccgatgggtaattcagtcttatctggctaaaacagtctcttggggcatattaccataattacctcagaggttacctttagcccattctggatcctgctccctcctgcctttctctccgaagggacctaagagtcagactatcatcctggcattgagatgggggtggagagcctcatgcgtggcccttgtgctggtccacaagcgtcctgcactcttacaccccagggttgcagctggtctcgccattctctgctggcctggccattgtatctactcaggaagtcagggcactgtggccttgccttcccgacaccaggctcactccagccgactgtttctctgtcacttctgatttcccataggcagacgggactcctggatgcctaggtgctaggtggatgtgggccatggggactgggggaccactgactctgaaactcccacggccatttctctcctatctcccgggcaccagcagagagcagaactctaaagggcttgtaactttcctggtttctcacaagaagagaaaatcctttcccatctggaattccccataactgacctgatgtttcttccacaacctaggttacctctcccccacaacacacgcgagattcaacgcagagggggaagaaaacgtggacactctcacgtgacctccgccttccccctccctctctagctccttcacacattggaaggctttcccagtttccatcccatctgctgggaaccaccctactgtcaaatccttccccatcccttgcatgttttacttttttctcctctgaagcaatatatctccacctcatggcccagtgtgcacagagatagcaatattggggaaatactcccaaatatacgcagaggaaatattccccaaaatgctgtcctgccgtaactagtttatgtgcatcacttcctagaagacacaacaacagattccacctaaaattaagccccctaagaaatgaggtggctttggagggttctggacaccagactagaagagtaggagaaatgacttgagttctctgacccgcagaccccacctcaaagaaaactgcctgcgttctatgggaatgaagggtgtattttgtgaacattaaggtgtgacccactgggaaagcaaagaaatggacagtcttgggggaataggccggcttctctctgggtttgtggaatttggttctgctgtggtgtatgtatacaggtcagctgctcccccaagccttcaaagcaaggttcccacgcatctttccatgaagtctgtaccaccctttttggtaaaagatccagccacaaaatggatgattttataagccaaaatttgaatactggcaattattcaagtagcccaggctcagccacgtgccgtctgcgtccgtgggctacacacaccccctcttttctcactgcctcctgggcggtgtggatcagctgcagagtgtgatctgcggtcagggagtgccttcccggagttttcgctttcagacccctggtgttaaagacgttctgtgagcgggtggggccgggcgccccagtcacggcggccgccgcctcctcttcccgcaggacgggacagcgcccctgtggatcgcgtcccagatgggccacagcgaggtggtgcgggtgatgctgctgcgcggagccgaccgcgacgctgcgcggaacgtgagtgcccgagtcgcgcggccaaagagcgaagcctcccggcgcgcctgtgtggagaaaacgggtcttgactgagtctgcagcccacatgggtttcctcccaacctccttccttgagcaggaaaacaaagtcaaggtctgattcggtgctgctcggtctctctcctcctccacccgagatgaccttgggacgcactagagagggtggaatcttagccttaggcctgagggcggtagagacggggcctcccgcctgtcctgggggcctcccgcctgtcctgggggcctcccggctgtcctggggcgtgtcctagggggatcccctggctggtgctgcgcctcctgcaggccctgcctcttgcccctcctccctggagctgcagaccccttgcaccccgtcccctgttggcccgccgtcatccactggcctctgctggtgccacctaatactgcctttgtgtgctgcacagcaggcccttttccccataaggaaggcttgaagagaacctgaccacctatgctgtttgctttttgtgttttactgtggcctttgtataacccttgcttacgtaacccaccttcccctctccaagtctaagctccaaaaaagggaaatcaccagacgcgttcgccaccatttcactgccctctctctcactcttcttcttcccacaatctctgaagccagaaaagacccccaccccccgccccccaattcattcttccttctttctgattacagataaaccctaatggcaggccgaagtggtttcttggctacgggagaattatggactaaatcctccaaacacagcgactgatatgtgaaaatgggagaaaaaggaatttggaaactgtgttcttgagccaaaaaataacgacagaagctaaatattaatttttgaatttggcttttcattctttttagcagattttattttatttttttctgagacagagtctcactctgtcacccaggctggagtgcagtggcacggtctcagctcactgtaacttccgcctctgggttcaagtgattctcgtgcctcagcctcccgagtagctgggactacaggcacgggctaccacacccggctattgtatttttggtagagacggggtttcaagtgaccctcctgccttggccttccaaagtgctagaattacaggcgtgagccactgcacctggccttttagcagattttaatctatcacctctgcccctaagccccactacccacacacgggcggatgcctagagcagactagggcaaggctgtataaatttttttagaaacagtaaatacagctcaacaatgatctaaattattaaagacagttaaccatttctgctaagttatgaacagccgagaatgcctctttggtccaaccatggcctaaaaatatgctcttgaaattccccttgtcccctgcccagtgttctcaggaactgtagaagtatgaattcccaaatggcagagttctaacataatctaagtcactgtttatctgatactctttcatgcagaatttactgcttaatattctctaaaatgctcctagattaagagacattgctgatctgtgcttaatttacacgtcattagtttctgacaacggtactttccagttcccaactgactgctttcaagcaacacagatatatgttaataatcaacttttattttcctctttctgttaaggatggcacaacagcattattgaaagcagccaacaaagggtataatgatgtcataaaagagttgcttaaattctcacccactcttggtattttgaaggtaagacctaaagataaattttactaatctgtaagagagaggttagaaagtaagtcctcacttggggactgtgtcgaatttgggtgcagttagcctggttagttggattcttgaaagaacacacctgcagcttcttgatgctggagatcccaggggctctggtagaagtggggaggtggtagaaagagtgaaccacagtctgtcattacctagttttgcagaaaaaaaaaaatcgacagtagtaatgaaatagctaattggaaagtatgccattttgacaccatttggaggatttgtgaaatcaaggaagaagaacagacacttatgtctgttctcttcattttcttaagcaaagaaccactctgttttgttcccttaagtgaaataaaataagcctcaaacacctggaagcctcagaaaatatgtcagtatggatacctgggtcacctaaaaaacagagccaaaactctttttttaagttttgatctttttgttttgttttgttttgcttttttgagatggagtctccctttgtagcccagactggagtgcaatggcacgatctcggctcactgcaacctctgcctcccaggttcaagtgattctcctgtctcagcctcccaagtaggtgggattacaggcacgctgccaccacacccagctttttgtatttttagtagagacggggtttcaccatattggccaggctggtcttgaactcctgacctcaagtgatccacttgcctcagcctcccaaagtgctgggattactggcatgagccaccctatctggcctaaattttgatcatttttgattaaaatatttctaacctatattatatatcaggagtcagcaaactttttctgtaaagtcttaataaatattagtatttctgtttactaatataattatattattgattatattaattttattatattatattatttattatattaatagtaatgcttactaacattttagtaaatattactaaatagtaaatagtaataaatattactaattactaatatatttactacagtaaagatatatttattaatatataaatattactataggaaatatatactacagaatgtatttactatacactatatatatagtatatatagtatatatatatatatactgtatatatagtgtatatatatatatactatatatatatagtataaatttacattttttcagagacagggtttcactctgttgcccaagcttgagtacagtgatgcaatcatagctcacagtaatcttgaattcttgcgctcaagtaatcctcctgcctcggctgggactacagccacacaccactgcacccatctaatttttaaatttgttgtagagatagggtctcactatattgtccaagctggtctcaaactcccagccttaagcaatcctcctgccttgaccaggaggcatattagtatatggcatatatttactatatatagtaaattatatactgtaaatacatactatataatatatagtacatatagtatggatgtattatatacatacagtatgtatagagtatacatacatacagtatgtgtagagtatacatacatacatacggtatgtgtagagtatgcatacatacatacggtatgtgtagagtatgcatacatacatacggtatgtgtagagtatgcatacatacatacggtatgtgtagagtatgcatacatacatacggtatgtgtagagtatgcatacatacatagtatatatacatacatatagtatgtatatattatatactatataatatatacatactatatagtatatactatataatataaatatatactatatatactatagagtaaatatttatgtctagtaatatttactgaaatgttagtgaatattactgttaccagatagcaaatattttaggctgtgtgggccatacaagtctctcccaactgccccaactctgctgtggtaatccaaaagtaaccatagaaaatacaacaaaaaggcccagtgcggtggctcacacctgtaatcccagcactttgggaggctgaggcaggtggatcgcttgaatccaagagttccaaaccagcctgggcaacatagctagactccatctccacaaaaaatgtttttaaaattaactggtcatgatggcatgcacctgtagtcccagctacttgggaggctgaggtgggaggatggcttgagcctgggaaatgaagctgtgatcgagccactgcactgcagcctaggtgacagagaagctcctgtctcaaaaaaaaaatcttaattcctataaaactttatttatgaacattgttatttgtggaatttcatattttcacatattacaaaatatttttcgtcttttaatctttttaaaatcatttaaaaatgtaaaaacagtctgagtgcagtgatttatccctataatccagcactttgggaggctgaggcaggaagactgcttgaggccaggagttagagaccagcctggagaatatagtaagaccctatctctacaaaagtttaaaaattagatggatgccatggtgtgtggctgtagtcccagctgaggcaggaggattgcttgagcccaggagttcaaggttactgtgagctgtgattgtatctttgcacttctgccagggcaacggagtgaaaccctgcctctgcaaaaatttttaaaagtagaagccgttcttagcttgcaggatttgatttgcaggctgtggtttgctgacccctgagatataatgctcctgttttattacatacaggacaccaaatctgttctaaatggacacagcggcttagctttaggactgtcctctcagagtctatcaatgtatataaaacctacttgcccttgaatgaccccagacactttttggatattttgtgtctgctctttatatttttagattccattcttgctgacagttaatacagaactgctgttgtcaatgtgttggcctctctcccctgccctaatgagctcatgagctactttcatctgccatgagctttttttttttttttttggagacagggtctcgctatgttgcccaggctggtcttgacctttgaactcctgggctcaagtgattctctcatcctcctgcctcagcctcctaaagcgctgggattacaggtgtgagccactgtgtctggcctgccatgagctttagaagccagaaagctgcacttgttaaaattgtttgtaaagtaagaataaaccatctatgaaaatgaattctatgaacaaaaggaataagctttagaaagcttggactttgcaaaatatagtcttgtttcaaacagctcttttttggctttttaaaaactcctggtctggtgtggtggctcacacctgtaatcctagctctttgggaggccaaggtgggcgaatcacctgagattaggagttcaagaccagcttggccaatgtggtgaaaccccgtctctactaaaaatacaaaaataagccaagagtggtggtgtacacctgtaatcccagctactcaggagtttgaggcaggagaacctgggaggcagaggttgcaatgagccgagatcacgccactgcactccagcccaggtgacaagagcaaaactccatctccagaaaaaagaaaaaaaagaggccaaaaagctgcacttgttaaaattgtttgtaaaggccgggcacactggctcacgcttgtaatcccagcactttgggaggcaaaggcgggtggatcacctgaggtcaggagttcaagaccagcctggccaacatgatgaaaccctgtctctacaaaaatacaaaaattagctgggcgtgggggctcatgcctgtaatcccagcactttggaaggccaaggcaggaggatcacgaggtcaggaaatcaagaccatcctggctaacacggtgaaaccctgtctctactaaaaatacaaaaaattagccgggtgtgtggcgggcgcctgtagtgccagctacttggaagactgaggcaggagaatggcgtgaacccgggaggcagagcttgcagtgagccgagatcacaccactgcactcaagcctgggtgacaaagcaagactccgtatcaaaaaaaaaaaaaaaattgtaaagtaaaaataaaccatctatgaaagtgaattctatgaataaaaggaacaagctttagaaagcttgaactttgcaaaatctaatcttgtttcaaatagctcttttttggctttttaaaaactcctggtcaggcatggtggctcacacctgtaatcccagccctttgggaggctgaggtgggcaaaacacctgagctcaggagttggcgaccagcccaggcaacatggcgaaaccctgtctctacaaaaaatacaaaaattagcagagtggctgttacacacctgtagtcccagctactcaggaggctgaggcacgagaatcgtttgagccctggaggcagaggttgcagtgaactgagattgcgccattgcactccagcctgggagacagagcgagacactgtctccaaaaaaaaaaaaaaaaaaaaaaaaattctgacccgtgttgcatgtaggtgaagttgatagattggctaagatttagacaagtaaattgttacaagagtagtgaattatcatacatacttaaaagcaaccatagaaaaatgctactttgtgggaatttttctctgggtatgatattttactcttttacaaaatcagagtggtttttattatgagcaactaattaggaaactaagtttgcattaggtactatttatggacatatgtaccctctagaaccatgtcttatgactgcccactgttcttagttttgttatagtctcctcccctcctctccgtggtccagctacatgctgcatttagctggttccttattttgataaatatttgcagtaaatgtcataaaacattaacaactgacctatgaggcccttctgtgctcaaaaatgctccaactcaaagctccggggcattgcctcaccccacatacccttcctcttaagccctgtagctccacaatcacagtcctgcccacctgagtgctcagagtgtctgtagctggtctgacaggtcagcccgttggctaaacagctcttcctctaacctcgctggaagtggctcagcaaaactacagactgtacgtgttgtccttacgtgttgtccttgaagaacaaaaatgttgggcacggcgttgttgtttcttctgcagcaagttccaaagtatgtaaaacagactgagtgaccatgaagtcatgtgtcccctcagccctattccttatttcacttgtaagagaacattagcaatatttgtactgaccattggttatgtatccaaggacactatactaggggctgatgtgactttgaaaagtacaaggcaagataaggaaggttacgggtatgaggttacagtcttatcacccagatggtttatgatgaaagccatgctgaatgccaatggctgtgagctcactcctgacacacactgtcattttctcttagaatgggacatcagcgctccatgcagcagtgctcagtggaaacattaaaacagttgcgctgctcctagaagcaggggcagacccatccctgagaaacaaggtacccactaagcaatcttttaactcgtttgggcccattgatgtgtcctcctaggccaggaaggataaacatctccctggctccagtcaccatcttcattctttgcatagtaagggcattcaaggttgctgttagtaggtgattagtgagcagtacagttggacccaggaaattctactgttaataaaaaccctgactcatatcaatggtttttttttttcttttttaacaaacccttgtgtcaagggctgactttcaatagatttttgcagcgagggaggtgctctgctatgtacgaaaccctgacccagaagccggtcatttacaaatggtttagcaccaggttccccatggacgtgcgttgtgtgatgggtgagggcgctatcaatggttttctttttttctttgagagggagtctcgctctgtcacccagactggagtgcagtggcgtgatcttggctcactgcaacctccacctcccagcttcaagcaattcttctgcctcagcctcctgagtagctgggattaccggcgcagaccaccatgcccggctaatttttttgtgttttagtagagacggggtttcaccatgttagccaggctggtcttgaactcctgacctcaagtgatccacccacctcggcctcccaaagtgctgggattacacacatgaggcaccacgcccggccagtggttatcaatgaacagtggtgcactctcctggtggaggcgaggaagaaagggagagcagttactatgggagtattgttctgtcatctaagatgtaccctaaaaatgccaaaattctggtagtttatcaccattcccataagttcgatgttcatatcttgaaaattgcttgtgctatatttggttgcttttgtattgttaacaggagtacatgccactgttacaaaacaaacccacttttttctagtcctaaattcttcatttacaattaggccaaacttcgcggtgggtgggtacacaataagaatttttttaaatgattgtcattttacttcctcctcttcaacatctgcttaagctggcacatgtatagattgcagcagaggagagtagcctaggaaaggtcttgagagaatgcatgcgccaggcgcaaaggcccactcctgtaaacccagcactttgggaggctgaggcaggtagattgcttgagcccaggagttcaagaccagcctgggcaacatggcgaagcctgtctccacaaaaaatacaaaaattagccaggtgtggtggtgtgcacctgtagtcccaactactgaggaggctgaggtgggaggattacctgaacccagccaaggaggtcaagggtgcagtgagccatggtcacgccactgcaatccaccctgaacgacggagtagagagaaaatgcactaaactacaacctttatttacttatttattatttatttaaatgtaaatttttttctttttatagagatgtgttcttgctgtgttgcccaggctggtcttgaactcctggtctcaagcaatcctcccaccttggcctaccaaagtgctggtattataggcataagccaccacacctggcctaaactacaaacttttctgttgctattgttgtttttgagacagagtctcactctgttgacaggctggagtgcagtggcacgatctcagctcactgcaacctccacctcccaggttcaagcaattctcctgcctcagcctgcccaatagctggaactacaggtgtgcaccatcatgcccagctaatttttttgtatttttagtagagacagggttttgccacgttgaccaggatggtctccatctcttgaccttgtgatccgcccccctcggcctcccaaagtgctgggattacaggcgtgagccactgcgcccagccataaactacaaacttttggaggagaaagtggtattggtgtttacgaatagaggaggatatgaaaagcaacttttactttatacttaacatactctgaatttttctaagcatatcttactgtgttaaatttttttttaataataaaaacaaaaacatataacatttcatgacattttgaaaagaaaccttaagaagtgccagttaaacaacatgccaggggtcacttttttcatttgactcagcatgtagaagtattacttccccattcccattgaattgcttgtctataacatttctgcttatctctccttagatacttggatttgttttccattagctggcctggctgtgtgataagccagttgaaatcacaattgcctttctttagatcttatctttagaccttgtgcacagacttcctaaagagaccagtctttgttggtgagctatccagtcctgaattaaggcaaggaggaaacattaatacctttacataggaactgaaaaatgcaattccttgtgtgtctcctagaataatggaataactaccaacaataatggttatgagtaatttcaagtgggcaaaatgctggactttggaccctcctgaatccaagcaagtgtaaccgcccaatgggttcaccttgcctgctgcctagacagaaccgatgtatcaggacaggggacttgcagtggagaaagagtaattcacgcagagccagctgtgcgggagataggagttttattattactcaaatcagtatctccgagcatttggggatcagagtttttaaagataatttggcggataggggcttgggaagtagggagtgctgattggtcagattggagatggaatcatagggggtcaaagttaggttttcttaatgttttctgtttctaggtgcgatggcagaactgattgggccagattactggtctgggtggtgtcgctgatccatcaagtgcaaggtctgcaaaatatttcaagcactaatcttaggtcttacaatagtgatgttacccccggagcaaatcggggcagttcaaactcttcgagccagaagctgcatgacccctaaattgaatttttttttttttgaaacagaatttctctcttgttgcccaagctggagtgcaatggtgcgatctcagctcactgcaacctccgcctcccaggttcaaacgattctcctgcctcagccttccgagtagctgggattacaggggcatgccaggctaattttttgtacttttagtagaaacagggtttcaccaactttcactttgagaaacagggtttcccaaagtgctgggattacaggcgtgagccaccgcgcccggccctaaattgtaatttctaatcttgtagctaatttgttagtcctacaaaggcagactggtccccaggcaagaagggggtcttttcgggaaagggctgttatcaattttgtttcagagtcaaaccatgagctgaattccttcccaaagttagtctgacctatgcccagcaatgaacaagcacagcttaaaggttagaagcaagatggagttggttaggtctgatttctttcactgtcttaatttcctcagttataattttgcaaaggcggtttcacagggaggaaatattagtacctgtatatagaaactgaaaaatgcaattccttgtgcatctcctagaataatggaataatcaccagcaataatggttataagtattttccagtgggcagaatgctagactttggaccctcccttaaaaatgacttgaaaacatgtgtgggcactcctgttggaccttcatactgcagaagccctcagacacctgggaggagccgccagggaagtccccagcttcctaccagccactccatagaagccagtcttgctaatagcagctccataggcaagggtgttgggattcctgcagaaggagcattcttggctttcattctttcattcaacaaacactagataccatgcactgtgctatgtgctgggaatgccatagtgaataagattcacagttgctgctttcatgaagctcagagtttagtggggaataaagacaattaaagcaattgcaatatggagtgacagctgtaagcaggggagtaaagaatggtttggaggcttccaggagaaagtgacttctcagctagtacagaacactcttctgctccaggagttccaagacttctgctctggggcttcgagacagatgcctgaggagaaggccaaccagtggccccaacagccattcctcacactatagccattcctcagactgtagccatacccctgggtgcaggggtcttatgttcccaacacccttgactgagcacatcttctcccaggagcagtggggagatttagtggtttaatactgtagtatcatgaatatgggcctatgctcctgctccataatgaacgagatagcctttaggggctagcctggggcactcgccatcacatcaatctgtacaatctcagcaacctgagaatctagtggggactaacggggagggaagagcaattaaaccaggattttagaacagcatggaagacagaatggtgatgtgaatgaccaaaacttgacaacatgatttgaaagtataaagctttttttaatagcagaggatatggacattcatggagatggtcacacaaggcaacacgctggcaggctggtagacagaggtagagcttcttaagctcccttctccttgactgtagaggttcctctaactacctgccagtctgcttaccatggaccagccactgatgtagacagctcagttattcctgagtgtttgctctgagactggatgaagcttaggtctgtttaccaggagcatttctctgcaggcccaggtgttaggcctgtacaatatctgttcctgcaggaactaagctaacagaacttgaccccatagaggagcctctggtctgtagtagcatagcataataatttcctctgtgattgaatccagcatcggcatccagggtcccatgtggtgagaaggggtgcagccacaggacatgctgcacagcagaccacttgtgacaaacttacaattcctaacaagtgaggttccagccagcagatagaggtcagggggcaggatccagctagaagatggggactgcagaagtttcacctaggatcaagtttccagataaagcaactggggttccaggcttggctgctggagaagaaaatatggtgagacaggtaacatctacaaccaagcctccatccccgatactgcctgccgctttaccctttaatggcctcccctgaaattcccagaacatccttctttctttttagagacagagtctctgtcacccaggctggagtgcagtgttgccatcatagctaactgtaaccttgaactcctgtgcttaagtgatactcctgcctcagcctcctgagtagctgaactataggcatgagccaccatgcctggccacaagaaagtccttctgattcctctatacaaacatttctcaaagtgggatccttggacccctgaagatcttcatgacccatacagggggtctaagaagtcaaaacaaggttgggtgtagtggctcatgcctgtaatcccagcactttgggaggcagaggtgggaggatcacttgagcctggaagttcaagaccaacctgggcaatatagcaagaccccctctctacaaaagaaataaaaatctatttacaattttaaaaaagaattcaaaaccatattcttgataataaaaagatgttagccagttgaggtagttcatgcctgtaatcccagcagtatggaaggttgaggcagcaggatcgcttgaagccaaaagttcaagaccagcatgggccatacagcaagacctcatctctttaagaaattaaaaaacaaaaaacatagctgggcatggtggtgtgtgcctgtagtcctaactactagggtggctgaggtggaaagatcacttgaacccaggagttcaaggctgcagtgagctacatgattgtgccactgcactccagccttagcaacagagagaaaacctgtcccctataaaagcaaacaagatcttatctgcctttttcactgtgctgacatttgctctaatggtacaaaagcaaaagcaatggtgggtgaaactgttggggccttagtacacctcaaagcaggaacactaaactgtactggcaaaatattttacaagcctttgtaaattattttacaaattttgtaaattactctacaaaaataccagttgtacttaagaatgtctctgatgaagcagtaaaaatatgtcaattttattaaattttggctcttcctatacatctttttaaaattttgtgtaattggctgggtgcggtggctcatgcctgtaatctcagcactttgggaggccgaggcaggtggatcatgtgaggtcaggagttcgagactagcctggccaacatggtgaaaccccgtctctactaaaaatacaaaaattagccaggcatggtcgcgcatgcctgtaatcccagctactcagggggttgaggcaggagaattgcttgaacccgggaggcggaggttgcagtgagccgagacctcaccactgcactccagcctgggtgacggagcgagactctgtctcaaaaaataatgacaataataataataataaaattctgtgtgatggcggggcaaagtggccaacacctataatctcagcacttcaggaggcctaggtgggaagactgcttgaggccaggagtttaagaccagcctgggcaacatagcaagaccctatctctccagaaaaaaaataagccagggatagtggcacacacctgtagtcccagcttgagcccagagagtttgaggctgtcatgagctatgattgcaccactgcatgccagcctgggtgacacagtgagaccatctgtctaaaaaaataaataaataaaacagaattctgggccgggcatggtggctaacacctgtaatcccagcactttgggaggttaaggcgagtggatcacctgaggtcaggagttcaaaagcagcctgtccaacatggcgaaaccccatctctactaaaaatataaaaattagccaggcacagtggtgggcgcctgtaatcccaactactcaggaggctgaagcaggagaatcacttgaacccgggagacagaggctgtagtgagcagagattgtgccattgcactccagcctgggcgacagaataagactctgtttcaaaataaataaataaaataaaataaaattctgtgtgatgaaatggaaaacatgcctacagcacttctgctgtgtactgaagtatgatgattatctcaagaaaaagcacctggccaggaacggtggctcacgcctgtaattccagcactttgggaggctgaggcaggtggatcatgaggtcaagaaatcgagaccatcctggccaacatggtgaaaccccatctctactacaaatacaaaaattagccaggtgtggtggcacgttcctgtagtcccagctactcgggaggctgaggcaggagaatcgcttgaaccggggaggcggaggttgcagtgagctgagattgcgccactgcagtccagcatggcaacagattgagactccatctcaaaaggaaaaaaaaaagcacctgttgggcggtgagcaggcaaaactgcccccaaaagtctgaagaagctgagaagccaagaaagaagctgacatccagatgatctcagcagaaaagaagaaaaaaataaaaacaggctgacatatccagtttctcagaaagtaacagggacaggagtcatagtctcaggacaccaccccccagacccagggcctaagggaaggaatatacaggacaagtgaagtcaacctctcagggaaaggcaagaacactacgtgactgcctaagggcaggacttatgggcaaggtcgttttgacctatggtcaggattttcagtaggaaacacaaaaaagtagataaaataggaatcttagaggcattcccaaaactagggttaatcacatggcagcctgagtgcggtggctcacacctgtaatcccagcagtttgggaggccgaggcaggcgcatcacttgaggtcaggagttcgagaccagcctggccaacacgatgaaacctcatctctactaaaatacaaaaattagctgggcatggtggtgtgcacctataatcccagctactggggaggctgaggcaggagaatcacttgaactcgggaggtagaggttgcagtgagccgagatggcaccactgcactccagcctgggcaacagagtgagactccgtcttaaaaaaaaaaaaaagaagtaaacatggcagattagcatccaagatggagttgcattagcctccacagtccctgtgcagttgtttgaattgcaaagtgaacctgccacttttttcatagatcactatttttacttgaaagaacaaggtatctaccactatgaccttaacagcttcccaaaacttaaaggcttttctgatggatcagtttttttgtttgtttgtttgtgagatggagtctctctcactatcactcaggctggagtgcagtggcgtgatctcagctcactgcaacctccgcctcccaggttcaagggattctcctgcctcagcctcctgagtagctgggattacaggcatgtgccaccacgcccagctaatttttgtatttttagtggagacaggtttttgccatattggccaggctggtcttaaacttgtgacctcaggtgatccacttgccttggcctcccaaagtgctgggattacaggcgtgagccaccacgcccagccagaatgtgagtttttgatattgcacaatgaaatgtgccaacattctacaaactcagtgaactgatattttccaaatgagcagtgcatgttacaaaccatgcataggtaaaagatccaactataaatagataaacctgtgggttttaaagttcattggtatggtttcaaatcccacattgcatttaacctttaagaaactaccatttgttgagtattgatgtggcatcagagaataatatccacagcaatccaaaaagactgttaaaatactccttccttttccagctacatatctgtgtgaagcttaattttctttatatccttctaccaaaacagcatatcacaatagacaggatacagatggagatatgagaatccaattgtattctgttaagctacacatgaaagaaatatgtaaagctgttgagcagtgctactcttctgagaatttttacttgtttttgaaaatttaatttttcataactatattaacttggatttattatttttagtgaattaataaatatatttttaaaattttctcagttttaatttcttttttttttctttttgaaaatattttctttctaaataatagagatgaggtttcactatgttgcccaggctggtctccaactcctgagctcaagtggtcctctcacctcagcctctcaaagtgctagcattacaggtgtgagccactgcgcatagccctcagctttcatttttaataagttaaaaacaaaatttgttagactcttcagtaatttttgagagtataaagggtcctgaaaccaacaggtttgagagccacttccacatcacacctgttgtcaatggtagggactggttcactagatgcctaatggatgtatctcagcagcaatgtgaaaagaaaggccttcgagtgatactgagtaaggtggaaggtgttagccaccaatgctcttctttcccgggtgtctcttatgctctggaggtttcctatctctgccttctcatcaaaagatatctggcccgggcgcggtggctcacacctgtaatcccagcaccttgggaggcggaggcgggcggatcacttgaggtcaggagttcaagaccagcctggctaaatggcgaaaccccatctctactaaaaatacaaaattcagccgagcatggtggcacatgcctgtagtcccagccactcgggaggctgaggcaggagaattgcttgaacccaggaggcagagattgcagtgagccgaggtcacaccactgcactccagcctgggtgacaaagtgagactccatctcaaaaaacaaaaaaaaagacacctgtgctgagtcctgactcagtcccaagtccttagtgggcagactacctcatgtcatacattaataaatataaggtaggctgggcacggtggctgatgcctgtaatcccaacactttggaagctgaggcagaaggatcacttaaaccgaggagttcaagaccagctggggcaacatggcaaaccccatctctggaaattagccgagcatagtggtgcacatctgtggtcccagctactcgggaggctgaggtgggaggatcatttgagctggggaggtcaacgctgcagtgagccatgattgcaacactgcactccagcctgggtgacagagcaagaccctgtctcaaaaaataataataataaaatacatataaggtataacatttaatttgaccggtacttattgagcacattttagacatgctgggcattgtgctggagataaggatacaatgattaattagatctggacccttccccctaagagattacagtctagtaagggatctggctggaaaatgtctctaagaatgagataaggatataacaagtaatatttatacatttaaagaagatttgtaatacctttatataaaagagtgagtccagtgtggatttttttcattagtgaaggagaaagagtgggtcaaatgcccctctttggagtccctaaaaccacaccagctatggggattcactaatgcccatcttctcttctttcaggccaatgaacttccggcagaactaaccaaaaatgaacgtatattgcgtctcctgagaagtaaagaaggtcccagaaagagctaacttagctccatatttgacagaaagatagaaagcttaaccacattgtccaaaaagaaattgcatttcaagcagtgttggaaattcttttatgaaaaaaaaagatgcccagaatgcccatcctgtgggtccctgacaaagaagagctacgctctgtgcacgaagtcaagaaccaaacagctc

SEQ ID NO: 10679 - DNA, 694 bp, Homo sapiens
aaggtggttacttggatgttattcgattactgctggcttcaggagcaaaagtcaaccagccaaggcaggacgggacagcgcccctgtggatcgcgtcccagatgggccacagcgaggtggtgcgggtgatgctgctgcgcggagccgaccgcgacgctgcgcggaacgatggcacaacagcattattgaaagcagccaacaaagggtataatgatgtcataaaagagttgcttaaattctcacccactcttggtattttgaagaatgggacatcagcgctccatgcagcagtgctcagtggaaacattaaaacagttgcgctgctcctagaagcaggggcagacccatccctgagaaacaaggtgcgatggcagaactgattgggccagattactggtctgggtggtgtcgctgatccatcaagtgcaaggccaatgaacttccggcagaactaaccaaaaatgaacgtatattgcgtctcctgagaagtaaagaaggtcccagaaagagctaacttagctccatatttgacagaaagatagaaagcttaaccacattgtccaaaaagaaattgcatttcaagcagtgttggaaattcttttatgaaaaaaaaagatgcccagaatgcccatcctgtgggtccctgacaaagaagagctacgctctgtgcacgaagtcaagaaccaaacagctc

SEQ ID NO: 10680 - DNA, 3597 bp, Homo sapiens
tggtcatggacccccactgttcctagatcccagtactgtgctgttctttgtagatgccctacacccaggcctcagcttaatagtctctttattacactttcttccaattatcccaatctgaatgtaccatctgttccttgccagaactcgggctgctgtcaagtcttgggcatctgtgaactggccatcttggtcttatttgggttttacggggctggttcctacatcacagtgggaaaactgtagggcagaaacaccagttgtcaccgtggccaacacggagaaacccgcctctactaaaaatacaaaaattagctgggcgtggtggcaggcgcctgtaatcccagctactcaggaggctgaggcaagagaatcacttgaacctgggaggcgggggttgcagtgagctgagatcgtgccatcccactccagcctgggaggcgagacttcgactcaaaaaaaaaaaataccatagagcaccactaagaagccattagctttttgttacttcgttacttcgttactttaccgatactttttacataaagccaacaagactttcacaaaactagcatggccattgacagaagtcaacaaaagccagatgacagcctaacattgaattatcgtaatgttattttaatatctaacacttactgaacgaatatctaccattactatgttaaccatattgcctgacttatctcattcagtaatttaatcaggtggatacttttattattcccccatatttcagatgaagagaatgagacttaagggttacatgatgtgcccaagatcatactgtcagtgactactcagcaatactgccttcctacaaaatcccgtagatgaaaataacacgaagcctccaaaattcacttaattaccctatacctaatgagcctcccctgtgtgcagagtcacctgtctctctcatcatccacttctgagcagcaggttgctgaatatgcagaggtggtagctaagattacaatttcaagtgcttgaaaacaactgtaagtcaaactgcaaatgcccacttcaattagaagggtccatatcacatggtacacctcaggtccttgaatcttaaagctgggacagactttggtgatcatcccatccaaccgctcattttaaaaatgaaataaatgagtccaagtaattgtaagcaacttgcccaggttacactgttggtcagtgacagctacctgggtttagcccccacagctcctgactctcaactctgtagtctctcatttcacctggtgccatacatctttacctgaatcattttgaagatgaagacttttaaatatggaaaatcagatggtaccatttaatttttcttttgcattaatagcaatgttttggctcaggaatcatttaataggaatcataaaatgagagcaatatatcatcgctgccttaaaatgcagtaactatggttcatttggactgtgcttctgaaggtaatggaagtaagtgaatttttacatcgaaaattccaacctcagcaatttgtcactttgctttttcccatctaggctgcatgatgagattattcatgaccacttttatcactgcagggaattttgcccttggatgtgttctgagtggagctgacatctctgcagcatcttctctaggacccttctctctgacatagcagtggcctaactcttcatctgtctctcctccatccagcatggcaccacactcctgatggttgctgcctacgctggccacatagactgtgtgagggaactggttctgcaaggagcagacatcaatctccagagagaggacgggggcaccgccctgttggctgccagtcagtacgggcacatgcaggtggtggagaccttgctgaagcacggagcaaacatccatgaccaactttatgatggagccactgccctcttcctagctgcccaaggtggttacttggatgttattcgattactgctggcttcaggagcaaaagtcaaccagccaaggacgggacagcgcccctgtggatcgcgtcccagatgggccacagcgaggtggtgcgggtgatgctgctgcgcggagccgaccgcgacgctgcgcggaacgatggcacaacagcattattgaaagcagccaacaaagggtataatgatgtcataaaagagttgcttaaattctcacccactcttggtattttgaagaatgggacatcagcgctccatgcagcagtgctcagtggaaacattaaaacagttgcgctgctcctagaagcaggggcagacccatccctgagaaacaaggccaatgaacttccggcagaactaaccaaaaatgaacgtatattgcgtctcctgagaagtaaagaaggtcccagaaagagctaacttagctccatatttgacagaaagatagaaagcttaaccacattgtccaaaaagaaattgcatttcaagcagtgttggaaattcttttatgaaaaaaaaagatgcccagaatgcccatcctgtgggtccctgacaaagaagagctacgctctgtgcacgaagtcaagaaccaaacagctcagggaccctcttgccccttcaccatggacttctcatggtgtcctgtaactcatctcccggggggcctggcatgttcacagattccacagaaactcattttcaacaatgctaacttggacctgtcagttaaactctaaggtggacagggttctcagtactaagcaaggagacagaatgctttgttcctttaaaagactgaaaagctgaccttcaatggattgaggcacttttgcttttgtgttaaatgtagatgtgctaaaatatatagatctatcatattttacctacatatgtatgtcattccagtataaaacattctcctctacccaagaaccatagccatgattgttataaatcaatgaagtgtaaacatacattattaaaaaaccacttctgacattccattatgtgctattcaaagatggactattgaactatagaaaagacagactgtgcatttgttcgttgatcctcatcttattcctgacatgtaaaaatcaattttacgtagagtcaacattgtaggtaggttaaaataccagtggcaaatttggaaattcagaaacttataaaccacgagaaatatataggcttgtctctttggtcttttattttggctctattgttgggaatctatttcctattctataagtaagtatacctaacatgctgtggaatcttgagtttccaacaccgtgctgcttgatagaatgactttgaggtccttggataaaatgtgatatatgcaagtacagtatgttgctattactattgcaggaatataaataataaaagactgttattagcacttagtaagtcttcatctatgcatgtttttgagttgactgattccaagaatgaaatatgaggtttattgaattattcctttgaaagggatcaaaacttatattcaatgcactttataattaatggtgtctaaatgcctcagtcagtgcctaactgcacatacaaaaataaaaccttctttctgtaatctaccaaaataaacgcaatggtatttctgctatttaaacac

SEQ ID NO: 10681 - DNA, 18548 bp, Homo sapiens
gcgtccgtgggctacacacaccccctcttttctcactgcctcctgggcggtgtggatcagctgcagagtgtgatctgcggtcagggagtgccttcccggagttttcgctttcagacccctggtgttaaagacgttctgtgagcgggtggggccgggcgccccagtcacggcggccgccgcctcctcttcccgcaggacgggacagcgcccctgtggatcgcgtcccagatgggccacagcgaggtggtgcgggtgatgctgctgcgcggagccgaccgcgacgctgcgcggaacgtgagtgcccgagtcgcgcggccaaagagcgaagcctcccggcgcgcctgtgtggagaaaacgggtcttgactgagtctgcagcccacatgggtttcctcccaacctccttccttgagcaggaaaacaaagtcaaggtctgattcggtgctgctcggtctctctcctcctccacccgagatgaccttgggacgcactagagagggtggaatcttagccttaggcctgagggcggtagagacggggcctcccgcctgtcctgggggcctcccgcctgtcctgggggcctcccggctgtcctggggcgtgtcctagggggatcccctggctggtgctgcgcctcctgcaggccctgcctcttgcccctcctccctggagctgcagaccccttgcaccccgtcccctgttggcccgccgtcatccactggcctctgctggtgccacctaatactgcctttgtgtgctgcacagcaggcccttttccccataaggaaggcttgaagagaacctgaccacctatgctgtttgctttttgtgttttactgtggcctttgtataacccttgcttacgtaacccaccttcccctctccaagtctaagctccaaaaaagggaaatcaccagacgcgttcgccaccatttcactgccctctctctcactcttcttcttcccacaatctctgaagccagaaaagacccccaccccccgccccccaattcattcttccttctttctgattacagataaaccctaatggcaggccgaagtggtttcttggctacgggagaattatggactaaatcctccaaacacagcgactgatatgtgaaaatgggagaaaaaggaatttggaaactgtgttcttgagccaaaaaataacgacagaagctaaatattaatttttgaatttggcttttcattctttttagcagattttattttatttttttctgagacagagtctcactctgtcacccaggctggagtgcagtggcacggtctcagctcactgtaacttccgcctctgggttcaagtgattctcgtgcctcagcctcccgagtagctgggactacaggcacgggctaccacacccggctattgtatttttggtagagacggggtttcaagtgaccctcctgccttggccttccaaagtgctagaattacaggcgtgagccactgcacctggccttttagcagattttaatctatcacctctgcccctaagccccactacccacacacgggcggatgcctagagcagactagggcaaggctgtataaatttttttagaaacagtaaatacagctcaacaatgatctaaattattaaagacagttaaccatttctgctaagttatgaacagccgagaatgcctctttggtccaaccatggcctaaaaatatgctcttgaaattccccttgtcccctgcccagtgttctcaggaactgtagaagtatgaattcccaaatggcagagttctaacataatctaagtcactgtttatctgatactctttcatgcagaatttactgcttaatattctctaaaatgctcctagattaagagacattgctgatctgtgcttaatttacacgtcattagtttctgacaacggtactttccagttcccaactgactgctttcaagcaacacagatatatgttaataatcaacttttattttcctctttctgttaaggatggcacaacagcattattgaaagcagccaacaaagggtataatgatgtcataaaagagttgcttaaattctcacccactcttggtattttgaaggtaagacctaaagataaattttactaatctgtaagagagaggttagaaagtaagtcctcacttggggactgtgtcgaatttgggtgcagttagcctggttagttggattcttgaaagaacacacctgcagcttcttgatgctggagatcccaggggctctggtagaagtggggaggtggtagaaagagtgaaccacagtctgtcattacctagttttgcagaaaaaaaaaaatcgacagtagtaatgaaatagctaattggaaagtatgccattttgacaccatttggaggatttgtgaaatcaaggaagaagaacagacacttatgtctgttctcttcattttcttaagcaaagaaccactctgttttgttcccttaagtgaaataaaataagcctcaaacacctggaagcctcagaaaatatgtcagtatggatacctgggtcacctaaaaaacagagccaaaactctttttttaagttttgatctttttgttttgttttgttttgcttttttgagatggagtctccctttgtagcccagactggagtgcaatggcacgatctcggctcactgcaacctctgcctcccaggttcaagtgattctcctgtctcagcctcccaagtaggtgggattacaggcacgctgccaccacacccagctttttgtatttttagtagagacggggtttcaccatattggccaggctggtcttgaactcctgacctcaagtgatccacttgcctcagcctcccaaagtgctgggattactggcatgagccaccctatctggcctaaattttgatcatttttgattaaaatatttctaacctatattatatatcaggagtcagcaaactttttctgtaaagtcttaataaatattagtatttctgtttactaatataattatattattgattatattaattttattatattatattatttattatattaatagtaatgcttactaacattttagtaaatattactaaatagtaaatagtaataaatattactaattactaatatatttactacagtaaagatatatttattaatatataaatattactataggaaatatatactacagaatgtatttactatacactatatatatagtatatatagtatatatatatatatactgtatatatagtgtatatatatatatactatatatatatagtataaatttacattttttcagagacagggtttcactctgttgcccaagcttgagtacagtgatgcaatcatagctcacagtaatcttgaattcttgcgctcaagtaatcctcctgcctcggctgggactacagccacacaccactgcacccatctaatttttaaatttgttgtagagatagggtctcactatattgtccaagctggtctcaaactcccagccttaagcaatcctcctgccttgaccaggaggcatattagtatatggcatatatttactatatatagtaaattatatactgtaaatacatactatataatatatagtacatatagtatggatgtattatatacatacagtatgtatagagtatacatacatacagtatgtgtagagtatacatacatacatacggtatgtgtagagtatgcatacatacatacggtatgtgtagagtatgcatacatacatacggtatgtgtagagtatgcatacatacatacggtatgtgtagagtatgcatacatacatacggtatgtgtagagtatgcatacatacatagtatatatacatacatatagtatgtatatattatatactatataatatatacatactatatagtatatactatataatataaatatatactatatatactatagagtaaatatttatgtctagtaatatttactgaaatgttagtgaatattactgttaccagatagcaaatattttaggctgtgtgggccatacaagtctctcccaactgccccaactctgctgtggtaatccaaaagtaaccatagaaaatacaacaaaaaggcccagtgcggtggctcacacctgtaatcccagcactttgggaggctgaggcaggtggatcgcttgaatccaagagttccaaaccagcctgggcaacatagctagactccatctccacaaaaaatgtttttaaaattaactggtcatgatggcatgcacctgtagtcccagctacttgggaggctgaggtgggaggatggcttgagcctgggaaatgaagctgtgatcgagccactgcactgcagcctaggtgacagagaagctcctgtctcaaaaaaaaaatcttaattcctataaaactttatttatgaacattgttatttgtggaatttcatattttcacatattacaaaatatttttcgtcttttaatctttttaaaatcatttaaaaatgtaaaaacagtctgagtgcagtgatttatccctataatccagcactttgggaggctgaggcaggaagactgcttgaggccaggagttagagaccagcctggagaatatagtaagaccctatctctacaaaagtttaaaaattagatggatgccatggtgtgtggctgtagtcccagctgaggcaggaggattgcttgagcccaggagttcaaggttactgtgagctgtgattgtatctttgcacttctgccagggcaacggagtgaaaccctgcctctgcaaaaatttttaaaagtagaagccgttcttagcttgcaggatttgatttgcaggctgtggtttgctgacccctgagatataatgctcctgttttattacatacaggacaccaaatctgttctaaatggacacagcggcttagctttaggactgtcctctcagagtctatcaatgtatataaaacctacttgcccttgaatgaccccagacactttttggatattttgtgtctgctctttatatttttagattccattcttgctgacagttaatacagaactgctgttgtcaatgtgttggcctctctcccctgccctaatgagctcatgagctactttcatctgccatgagctttttttttttttttttggagacagggtctcgctatgttgcccaggctggtcttgacctttgaactcctgggctcaagtgattctctcatcctcctgcctcagcctcctaaagcgctgggattacaggtgtgagccactgtgtctggcctgccatgagctttagaagccagaaagctgcacttgttaaaattgtttgtaaagtaagaataaaccatctatgaaaatgaattctatgaacaaaaggaataagctttagaaagcttggactttgcaaaatatagtcttgtttcaaacagctcttttttggctttttaaaaactcctggtctggtgtggtggctcacacctgtaatcctagctctttgggaggccaaggtgggcgaatcacctgagattaggagttcaagaccagcttggccaatgtggtgaaaccccgtctctactaaaaatacaaaaataagccaagagtggtggtgtacacctgtaatcccagctactcaggagtttgaggcaggagaacctgggaggcagaggttgcaatgagccgagatcacgccactgcactccagcccaggtgacaagagcaaaactccatctccagaaaaaagaaaaaaaagaggccaaaaagctgcacttgttaaaattgtttgtaaaggccgggcacactggctcacgcttgtaatcccagcactttgggaggcaaaggcgggtggatcacctgaggtcaggagttcaagaccagcctggccaacatgatgaaaccctgtctctacaaaaatacaaaaattagctgggcgtgggggctcatgcctgtaatcccagcactttggaaggccaaggcaggaggatcacgaggtcaggaaatcaagaccatcctggctaacacggtgaaaccctgtctctactaaaaatacaaaaaattagccgggtgtgtggcgggcgcctgtagtgccagctacttggaagactgaggcaggagaatggcgtgaacccgggaggcagagcttgcagtgagccgagatcacaccactgcactcaagcctgggtgacaaagcaagactccgtatcaaaaaaaaaaaaaaaattgtaaagtaaaaataaaccatctatgaaagtgaattctatgaataaaaggaacaagctttagaaagcttgaactttgcaaaatctaatcttgtttcaaatagctcttttttggctttttaaaaactcctggtcaggcatggtggctcacacctgtaatcccagccctttgggaggctgaggtgggcaaaacacctgagctcaggagttggcgaccagcccaggcaacatggcgaaaccctgtctctacaaaaaatacaaaaattagcagagtggctgttacacacctgtagtcccagctactcaggaggctgaggcacgagaatcgtttgagccctggaggcagaggttgcagtgaactgagattgcgccattgcactccagcctgggagacagagcgagacactgtctccaaaaaaaaaaaaaaaaaaaaaaaaattctgacccgtgttgcatgtaggtgaagttgatagattggctaagatttagacaagtaaattgttacaagagtagtgaattatcatacatacttaaaagcaaccatagaaaaatgctactttgtgggaatttttctctgggtatgatattttactcttttacaaaatcagagtggtttttattatgagcaactaattaggaaactaagtttgcattaggtactatttatggacatatgtaccctctagaaccatgtcttatgactgcccactgttcttagttttgttatagtctcctcccctcctctccgtggtccagctacatgctgcatttagctggttccttattttgataaatatttgcagtaaatgtcataaaacattaacaactgacctatgaggcccttctgtgctcaaaaatgctccaactcaaagctccggggcattgcctcaccccacatacccttcctcttaagccctgtagctccacaatcacagtcctgcccacctgagtgctcagagtgtctgtagctggtctgacaggtcagcccgttggctaaacagctcttcctctaacctcgctggaagtggctcagcaaaactacagactgtacgtgttgtccttacgtgttgtccttgaagaacaaaaatgttgggcacggcgttgttgtttcttctgcagcaagttccaaagtatgtaaaacagactgagtgaccatgaagtcatgtgtcccctcagccctattccttatttcacttgtaagagaacattagcaatatttgtactgaccattggttatgtatccaaggacactatactaggggctgatgtgactttgaaaagtacaaggcaagataaggaaggttacgggtatgaggttacagtcttatcacccagatggtttatgatgaaagccatgctgaatgccaatggctgtgagctcactcctgacacacactgtcattttctcttagaatgggacatcagcgctccatgcagcagtgctcagtggaaacattaaaacagttgcgctgctcctagaagcaggggcagacccatccctgagaaacaaggtacccactaagcaatcttttaactcgtttgggcccattgatgtgtcctcctaggccaggaaggataaacatctccctggctccagtcaccatcttcattctttgcatagtaagggcattcaaggttgctgttagtaggtgattagtgagcagtacagttggacccaggaaattctactgttaataaaaaccctgactcatatcaatggtttttttttttcttttttaacaaacccttgtgtcaagggctgactttcaatagatttttgcagcgagggaggtgctctgctatgtacgaaaccctgacccagaagccggtcatttacaaatggtttagcaccaggttccccatggacgtgcgttgtgtgatgggtgagggcgctatcaatggttttctttttttctttgagagggagtctcgctctgtcacccagactggagtgcagtggcgtgatcttggctcactgcaacctccacctcccagcttcaagcaattcttctgcctcagcctcctgagtagctgggattaccggcgcagaccaccatgcccggctaatttttttgtgttttagtagagacggggtttcaccatgttagccaggctggtcttgaactcctgacctcaagtgatccacccacctcggcctcccaaagtgctgggattacacacatgaggcaccacgcccggccagtggttatcaatgaacagtggtgcactctcctggtggaggcgaggaagaaagggagagcagttactatgggagtattgttctgtcatctaagatgtaccctaaaaatgccaaaattctggtagtttatcaccattcccataagttcgatgttcatatcttgaaaattgcttgtgctatatttggttgcttttgtattgttaacaggagtacatgccactgttacaaaacaaacccacttttttctagtcctaaattcttcatttacaattaggccaaacttcgcggtgggtgggtacacaataagaatttttttaaatgattgtcattttacttcctcctcttcaacatctgcttaagctggcacatgtatagattgcagcagaggagagtagcctaggaaaggtcttgagagaatgcatgcgccaggcgcaaaggcccactcctgtaaacccagcactttgggaggctgaggcaggtagattgcttgagcccaggagttcaagaccagcctgggcaacatggcgaagcctgtctccacaaaaaatacaaaaattagccaggtgtggtggtgtgcacctgtagtcccaactactgaggaggctgaggtgggaggattacctgaacccagccaaggaggtcaagggtgcagtgagccatggtcacgccactgcaatccaccctgaacgacggagtagagagaaaatgcactaaactacaacctttatttacttatttattatttatttaaatgtaaatttttttctttttatagagatgtgttcttgctgtgttgcccaggctggtcttgaactcctggtctcaagcaatcctcccaccttggcctaccaaagtgctggtattataggcataagccaccacacctggcctaaactacaaacttttctgttgctattgttgtttttgagacagagtctcactctgttgacaggctggagtgcagtggcacgatctcagctcactgcaacctccacctcccaggttcaagcaattctcctgcctcagcctgcccaatagctggaactacaggtgtgcaccatcatgcccagctaatttttttgtatttttagtagagacagggttttgccacgttgaccaggatggtctccatctcttgaccttgtgatccgcccccctcggcctcccaaagtgctgggattacaggcgtgagccactgcgcccagccataaactacaaacttttggaggagaaagtggtattggtgtttacgaatagaggaggatatgaaaagcaacttttactttatacttaacatactctgaatttttctaagcatatcttactgtgttaaatttttttttaataataaaaacaaaaacatataacatttcatgacattttgaaaagaaaccttaagaagtgccagttaaacaacatgccaggggtcacttttttcatttgactcagcatgtagaagtattacttccccattcccattgaattgcttgtctataacatttctgcttatctctccttagatacttggatttgttttccattagctggcctggctgtgtgataagccagttgaaatcacaattgcctttctttagatcttatctttagaccttgtgcacagacttcctaaagagaccagtctttgttggtgagctatccagtcctgaattaaggcaaggaggaaacattaatacctttacataggaactgaaaaatgcaattccttgtgtgtctcctagaataatggaataactaccaacaataatggttatgagtaatttcaagtgggcaaaatgctggactttggaccctcctgaatccaagcaagtgtaaccgcccaatgggttcaccttgcctgctgcctagacagaaccgatgtatcaggacaggggacttgcagtggagaaagagtaattcacgcagagccagctgtgcgggagataggagttttattattactcaaatcagtatctccgagcatttggggatcagagtttttaaagataatttggcggataggggcttgggaagtagggagtgctgattggtcagattggagatggaatcatagggggtcaaagttaggttttcttaatgttttctgtttctaggtgcgatggcagaactgattgggccagattactggtctgggtggtgtcgctgatccatcaagtgcaaggtctgcaaaatatttcaagcactaatcttaggtcttacaatagtgatgttacccccggagcaaatcggggcagttcaaactcttcgagccagaagctgcatgacccctaaattgaatttttttttttttgaaacagaatttctctcttgttgcccaagctggagtgcaatggtgcgatctcagctcactgcaacctccgcctcccaggttcaaacgattctcctgcctcagccttccgagtagctgggattacaggggcatgccaggctaattttttgtacttttagtagaaacagggtttcaccaactttcactttgagaaacagggtttcccaaagtgctgggattacaggcgtgagccaccgcgcccggccctaaattgtaatttctaatcttgtagctaatttgttagtcctacaaaggcagactggtccccaggcaagaagggggtcttttcgggaaagggctgttatcaattttgtttcagagtcaaaccatgagctgaattccttcccaaagttagtctgacctatgcccagcaatgaacaagcacagcttaaaggttagaagcaagatggagttggttaggtctgatttctttcactgtcttaatttcctcagttataattttgcaaaggcggtttcacagggaggaaatattagtacctgtatatagaaactgaaaaatgcaattccttgtgcatctcctagaataatggaataatcaccagcaataatggttataagtattttccagtgggcagaatgctagactttggaccctcccttaaaaatgacttgaaaacatgtgtgggcactcctgttggaccttcatactgcagaagccctcagacacctgggaggagccgccagggaagtccccagcttcctaccagccactccatagaagccagtcttgctaatagcagctccataggcaagggtgttgggattcctgcagaaggagcattcttggctttcattctttcattcaacaaacactagataccatgcactgtgctatgtgctgggaatgccatagtgaataagattcacagttgctgctttcatgaagctcagagtttagtggggaataaagacaattaaagcaattgcaatatggagtgacagctgtaagcaggggagtaaagaatggtttggaggcttccaggagaaagtgacttctcagctagtacagaacactcttctgctccaggagttccaagacttctgctctggggcttcgagacagatgcctgaggagaaggccaaccagtggccccaacagccattcctcacactatagccattcctcagactgtagccatacccctgggtgcaggggtcttatgttcccaacacccttgactgagcacatcttctcccaggagcagtggggagatttagtggtttaatactgtagtatcatgaatatgggcctatgctcctgctccataatgaacgagatagcctttaggggctagcctggggcactcgccatcacatcaatctgtacaatctcagcaacctgagaatctagtggggactaacggggagggaagagcaattaaaccaggattttagaacagcatggaagacagaatggtgatgtgaatgaccaaaacttgacaacatgatttgaaagtataaagctttttttaatagcagaggatatggacattcatggagatggtcacacaaggcaacacgctggcaggctggtagacagaggtagagcttcttaagctcccttctccttgactgtagaggttcctctaactacctgccagtctgcttaccatggaccagccactgatgtagacagctcagttattcctgagtgtttgctctgagactggatgaagcttaggtctgtttaccaggagcatttctctgcaggcccaggtgttaggcctgtacaatatctgttcctgcaggaactaagctaacagaacttgaccccatagaggagcctctggtctgtagtagcatagcataataatttcctctgtgattgaatccagcatcggcatccagggtcccatgtggtgagaaggggtgcagccacaggacatgctgcacagcagaccacttgtgacaaacttacaattcctaacaagtgaggttccagccagcagatagaggtcagggggcaggatccagctagaagatggggactgcagaagtttcacctaggatcaagtttccagataaagcaactggggttccaggcttggctgctggagaagaaaatatggtgagacaggtaacatctacaaccaagcctccatccccgatactgcctgccgctttaccctttaatggcctcccctgaaattcccagaacatccttctttctttttagagacagagtctctgtcacccaggctggagtgcagtgttgccatcatagctaactgtaaccttgaactcctgtgcttaagtgatactcctgcctcagcctcctgagtagctgaactataggcatgagccaccatgcctggccacaagaaagtccttctgattcctctatacaaacatttctcaaagtgggatccttggacccctgaagatcttcatgacccatacagggggtctaagaagtcaaaacaaggttgggtgtagtggctcatgcctgtaatcccagcactttgggaggcagaggtgggaggatcacttgagcctggaagttcaagaccaacctgggcaatatagcaagaccccctctctacaaaagaaataaaaatctatttacaattttaaaaaagaattcaaaaccatattcttgataataaaaagatgttagccagttgaggtagttcatgcctgtaatcccagcagtatggaaggttgaggcagcaggatcgcttgaagccaaaagttcaagaccagcatgggccatacagcaagacctcatctctttaagaaattaaaaaacaaaaaacatagctgggcatggtggtgtgtgcctgtagtcctaactactagggtggctgaggtggaaagatcacttgaacccaggagttcaaggctgcagtgagctacatgattgtgccactgcactccagccttagcaacagagagaaaacctgtcccctataaaagcaaacaagatcttatctgcctttttcactgtgctgacatttgctctaatggtacaaaagcaaaagcaatggtgggtgaaactgttggggccttagtacacctcaaagcaggaacactaaactgtactggcaaaatattttacaagcctttgtaaattattttacaaattttgtaaattactctacaaaaataccagttgtacttaagaatgtctctgatgaagcagtaaaaatatgtcaattttattaaattttggctcttcctatacatctttttaaaattttgtgtaattggctgggtgcggtggctcatgcctgtaatctcagcactttgggaggccgaggcaggtggatcatgtgaggtcaggagttcgagactagcctggccaacatggtgaaaccccgtctctactaaaaatacaaaaattagccaggcatggtcgcgcatgcctgtaatcccagctactcagggggttgaggcaggagaattgcttgaacccgggaggcggaggttgcagtgagccgagacctcaccactgcactccagcctgggtgacggagcgagactctgtctcaaaaaataatgacaataataataataataaaattctgtgtgatggcggggcaaagtggccaacacctataatctcagcacttcaggaggcctaggtgggaagactgcttgaggccaggagtttaagaccagcctgggcaacatagcaagaccctatctctccagaaaaaaaataagccagggatagtggcacacacctgtagtcccagcttgagcccagagagtttgaggctgtcatgagctatgattgcaccactgcatgccagcctgggtgacacagtgagaccatctgtctaaaaaaataaataaataaaacagaattctgggccgggcatggtggctaacacctgtaatcccagcactttgggaggttaaggcgagtggatcacctgaggtcaggagttcaaaagcagcctgtccaacatggcgaaaccccatctctactaaaaatataaaaattagccaggcacagtggtgggcgcctgtaatcccaactactcaggaggctgaagcaggagaatcacttgaacccgggagacagaggctgtagtgagcagagattgtgccattgcactccagcctgggcgacagaataagactctgtttcaaaataaataaataaaataaaataaaattctgtgtgatgaaatggaaaacatgcctacagcacttctgctgtgtactgaagtatgatgattatctcaagaaaaagcacctggccaggaacggtggctcacgcctgtaattccagcactttgggaggctgaggcaggtggatcatgaggtcaagaaatcgagaccatcctggccaacatggtgaaaccccatctctactacaaatacaaaaattagccaggtgtggtggcacgttcctgtagtcccagctactcgggaggctgaggcaggagaatcgcttgaaccggggaggcggaggttgcagtgagctgagattgcgccactgcagtccagcatggcaacagattgagactccatctcaaaaggaaaaaaaaaagcacctgttgggcggtgagcaggcaaaactgcccccaaaagtctgaagaagctgagaagccaagaaagaagctgacatccagatgatctcagcagaaaagaagaaaaaaataaaaacaggctgacatatccagtttctcagaaagtaacagggacaggagtcatagtctcaggacaccaccccccagacccagggcctaagggaaggaatatacaggacaagtgaagtcaacctctcagggaaaggcaagaacactacgtgactgcctaagggcaggacttatgggcaaggtcgttttgacctatggtcaggattttcagtaggaaacacaaaaaagtagataaaataggaatcttagaggcattcccaaaactagggttaatcacatggcagcctgagtgcggtggctcacacctgtaatcccagcagtttgggaggccgaggcaggcgcatcacttgaggtcaggagttcgagaccagcctggccaacacgatgaaacctcatctctactaaaatacaaaaattagctgggcatggtggtgtgcacctataatcccagctactggggaggctgaggcaggagaatcacttgaactcgggaggtagaggttgcagtgagccgagatggcaccactgcactccagcctgggcaacagagtgagactccgtcttaaaaaaaaaaaaaagaagtaaacatggcagattagcatccaagatggagttgcattagcctccacagtccctgtgcagttgtttgaattgcaaagtgaacctgccacttttttcatagatcactatttttacttgaaagaacaaggtatctaccactatgaccttaacagcttcccaaaacttaaaggcttttctgatggatcagtttttttgtttgtttgtttgtgagatggagtctctctcactatcactcaggctggagtgcagtggcgtgatctcagctcactgcaacctccgcctcccaggttcaagggattctcctgcctcagcctcctgagtagctgggattacaggcatgtgccaccacgcccagctaatttttgtatttttagtggagacaggtttttgccatattggccaggctggtcttaaacttgtgacctcaggtgatccacttgccttggcctcccaaagtgctgggattacaggcgtgagccaccacgcccagccagaatgtgagtttttgatattgcacaatgaaatgtgccaacattctacaaactcagtgaactgatattttccaaatgagcagtgcatgttacaaaccatgcataggtaaaagatccaactataaatagataaacctgtgggttttaaagttcattggtatggtttcaaatcccacattgcatttaacctttaagaaactaccatttgttgagtattgatgtggcatcagagaataatatccacagcaatccaaaaagactgttaaaatactccttccttttccagctacatatctgtgtgaagcttaattttctttatatccttctaccaaaacagcatatcacaatagacaggatacagatggagatatgagaatccaattgtattctgttaagctacacatgaaagaaatatgtaaagctgttgagcagtgctactcttctgagaatttttacttgtttttgaaaatttaatttttcataactatattaacttggatttattatttttagtgaattaataaatatatttttaaaattttctcagttttaatttcttttttttttctttttgaaaatattttctttctaaataatagagatgaggtttcactatgttgcccaggctggtctccaactcctgagctcaagtggtcctctcacctcagcctctcaaagtgctagcattacaggtgtgagccactgcgcatagccctcagctttcatttttaataagttaaaaacaaaatttgttagactcttcagtaatttttgagagtataaagggtcctgaaaccaacaggtttgagagccacttccacatcacacctgttgtcaatggtagggactggttcactagatgcctaatggatgtatctcagcagcaatgtgaaaagaaaggccttcgagtgatactgagtaaggtggaaggtgttagccaccaatgctcttctttcccgggtgtctcttatgctctggaggtttcctatctctgccttctcatcaaaagatatctggcccgggcgcggtggctcacacctgtaatcccagcaccttgggaggcggaggcgggcggatcacttgaggtcaggagttcaagaccagcctggctaaatggcgaaaccccatctctactaaaaatacaaaattcagccgagcatggtggcacatgcctgtagtcccagccactcgggaggctgaggcaggagaattgcttgaacccaggaggcagagattgcagtgagccgaggtcacaccactgcactccagcctgggtgacaaagtgagactccatctcaaaaaacaaaaaaaaagacacctgtgctgagtcctgactcagtcccaagtccttagtgggcagactacctcatgtcatacattaataaatataaggtaggctgggcacggtggctgatgcctgtaatcccaacactttggaagctgaggcagaaggatcacttaaaccgaggagttcaagaccagctggggcaacatggcaaaccccatctctggaaattagccgagcatagtggtgcacatctgtggtcccagctactcgggaggctgaggtgggaggatcatttgagctggggaggtcaacgctgcagtgagccatgattgcaacactgcactccagcctgggtgacagagcaagaccctgtctcaaaaaataataataataaaatacatataaggtataacatttaatttgaccggtacttattgagcacattttagacatgctgggcattgtgctggagataaggatacaatgattaattagatctggacccttccccctaagagattacagtctagtaagggatctggctggaaaatgtctctaagaatgagataaggatataacaagtaatatttatacatttaaagaagatttgtaatacctttatataaaagagtgagtccagtgtggatttttttcattagtgaaggagaaagagtgggtcaaatgcccctctttggagtccctaaaaccacaccagctatggggattcactaatgcccatcttctcttctttcaggccaatgaacttccggcagaactaaccaaaaat

SEQ ID NO: 10682 - DNA, 559 bp, Homo sapiens
gcgtccgtgggctacacacaccccctcttttctcactgcctcctgggcggtgtggatcagctgcagagtgtgatctgcggtcagggagtgccttcccggagttttcgctttcagacccctggtgttaaagacgttctgtgagcgggtggggccgggcgccccagtcacggcggccgccgcctcctcttcccgcaggacgggacagcgcccctgtggatcgcgtcccagatgggccacagcgaggtggtgcgggtgatgctgctgcgcggagccgaccgcgacgctgcgcggaacgtgagtgcccgagtcgcgcggccaaagagcgaagcctcccggcgcgcctgtgtggagaaaacgggtcttgactgagtctgcagcccacatgggtttcctcccaacctccttccttgagcaggaaaacaaagtcaaggatggcacaacagcattattgaaagcagccaacaaagggtataatgatgtcataaaagagttgcttaaattctcacccactcttggtattttgaaggccaatgaacttccggcagaactaaccaaaaat

SEQ ID NO: 10683 - DNA, 3387 bp, Homo sapiens
gcgccgccccttcggcccggccctgtgtgcggcggctgctgccgggccgggcggcgggagcgcgcggcgtcggaggccgcccctctgcggaacgccgagagccccgggagagtgaagggccggggaggacaaggcgccccgggcccaaagcgcgccggctcccgctcgggcggccgcggacatgtgcaggatgtccttcaagaaggaaactccacttgccaatgctgcattctgggcagccaggagaggaaacctggcgctgctgaagctgctgttgaacagcggccgggtggacgtggactgcagagacagccatggcaccacactcctgatggttgctgcctacgctggccacatagactgtgtgagggaactggttctgcaaggagcagacatcaatctccagagagagtcaggtacaactgccctattctttgccgcccagcaaggccataatgatgtcgtgagatttctctttggatttggagcatccactgaatttaggaccaaagacgggggcaccgccctgttggctgccagtcagtacgggcacatgcaggtggtggagaccttgctgaagcacggagcaaacatccatgaccaactttatgatggagccactgccctcttcctagctgcccaaggtggttacttggatgttattcgattactgctggcttcaggagcaaaagtcaaccagccaaggcaggacgggacagcgcccctgtggatcgcgtcccagatgggccacagcgaggtggtgcgggtgatgctgctgcgcggagccgaccgcgacgctgcgcggaacgatggcacaacagcattattgaaagcagccaacaaagggtataatgatgtcataaaagagttgcttaaattctcacccactcttggtattttgaagaatgggacatcagcgctccatgcagcagtgctcagtggaaacattaaaacagttgcgctgctcctagaagcaggggcagacccatccctgagaaacaaggccaatgaacttccggcagaactaaccaaaaatgaacgtatattgcgtctcctgagaagtaaagaaggtcccagaaagagctaacttagctccatatttgacagaaagatagaaagcttaaccacattgtccaaaaagaaattgcatttcaagcagtgttggaaattcttttatgaaaaaaaaagatgcccagaatgcccatcctgtgggtccctgacaaagaagagctacgctctgtgcacgaagtcaagaaccaaacagctcagggaccctcttgccccttcaccatggacttctcatggtgtcctgtaactcatctcccggggggcctggcatgttcacagattccacagaaactcattttcaacaatgctaacttggacctgtcagttaaactctaaggtggacagggttctcagtactaagcaaggagacagaatgctttgttcctttaaaagactgaaaagctgaccttcaatggattgaggcacttttgcttttgtgttaaatgtagatgtgctaaaatatatagatctatcatattttacctacatatgtatgtcattccagtataaaacattctcctctacccaagaaccatagccatgattgttataaatcaatgaagtgtaaacatacattattaaaaaaccacttctgacattccattatgtgctattcaaagatggactattgaactatagaaaagacagactgtgcatttgttcgttgatcctcatcttattcctgacatgtaaaaatcaattttacgtagagtcaacattgtaggtaggttaaaataccagtggcaaatttggaaattcagaaacttataaaccacgagaaatatataggcttgtctctttggtcttttattttggctctattgttgggaatctatttcctattctataagtaagtatacctaacatgctgtggaatcttgagtttccaacaccgtgctgcttgatagaatgactttgaggtccttggataaaatgtgatatatgcaagtacagtatgttgctattactattgcaggaatataaataataaaagactgttattagcacttagtaagtcttcatctatgcatgtttttgagttgactgattccaagaatgaaatatgaggtttattgaattattcctttgaaagggatcaaaacttatattcaatgcactttataattaatggtgtctaaatgcctcagtcagtgcctaactgcacatacaaaaataaaaccttctttctgtaatctaccaaaataaacgcaatggtatttctgctatttaaacacatctttagcttatttcttcatgttctgctctggttttcagtcagtgtctatgtaaagacacttttagaggaaaatgttgtaatcccaaaagaatttttgtttaaccaactttcagagttactaaaaggattatctttaattcagtaaataatagaatataatcttcaaaattagaagatattctcttaaaatttataacaattaatgcaacaaaaatcagcatattttgataaatgtctcaagcaaatgagcaactcacaggccccacaggtgcctacagcctgaccagctatacaaaaagcctgcaacctgattctaggataaaatattagaaagctctctgttgctaaaacatccagatataaacattttggtggctaaaatcaatgccatttcctcattgacattcttttattcagcaaatttgtacaaatatacattttctcctgtgcgaatttcaaaaagctatattcattttgaagaggaaaataatatggcattaaatgctttgtattttccccttagttagcccttatggcaaaaatagttgctaatcactgatacaaagcaaaacgttatgggtactgataacaaagttccaaaagccaaaatgggatgaatcacaaacttactgtttttcactaaaacatgtaattggcctattacatcaatagttttaagtgggtaatgttcttgaacaatattagagccataaaattgaagccagtagcttgaacaatatggaggccttcttactgtagggaagaggtgtctagcttagaaggatcacatttgatctagatgagattacccatagcagggaaaatgaatcatcacctaccaaagactgtacggaaaggtgtgttattttcaaaattgcattttagtttgcacacatgtaaatgattattctatgttaatctaattgacaattcagttagctccgcatcctaagacttaaaactagcaattcctatgcaaatcatctgcttaactgaactacaaacgtttttcattaattcattctttgatgacatattccatgttatataataattcaaaataaagttaatatactacccca

SEQ ID NO: 10684 - DNA, 2772 bp, Homo sapiens
acttccggggcgggtgccgggggcggtgccccggcgagggagcgtggcggcgagctgtttggggggggttggcgacggcagcccgagggcggcgcaaggcctgaggcccagcacaggtgggttccgcggcggcccggccccagcacttgccggcacctgcagcccgcctagacccggcgctcgggcgtcccgcgctgcacttgctcgccgcgtgactggaggaccgagcccccacattttctttatgtggttgtggtgggggcacagtaatgccctgtgcgccgtagcgttcctgtggggatgtggccggggggcgtcgggaagcgtcactgctgccaggtgcagtggctcacgcctatatttccaggactttgagaggctgaggcgggcggatcacctgagtgatgtccgagctcagcgatgaagccagcgagccggaactcctgaaccgcagcttgtccatgtggcacgggctcgggacacaggtcagcggggaggagctggatgtccccctggatcttcacacagctgcttccattggccagtatgaagtggtgaaggagtgtgtgcagcggagagagttagatttgaataagaagaatggtggtggctggaccccgctgatgtatgcctcctacattggccacgacacaatcgtgcacctgctgcttgaggcgggggtgagtgtgaatgtgccgaccccagaagggcagactccactgatgctggcctccagctgtggcaacgagagcatcgcctactttcttctccagcaaggtgcagagctagaaatgaaagacatccagggctggacagccctcttccactgtaccagcgccgggcaccagcacatggtcaggttcctcttggacagtggagccaatgccaacgtgagggagccgatatgtggatttactcccttgatggaagcagctgctgctggccatgagataatcgtgcagtattttctgaatcacggagtcaaggtggacgcgagagaccacagtggagccacagcccggatgctggccaagcagtacggacacatgaagatcgtggccttgatggacacttactcgccctctctgcccaagagcctctatcggagcccagaaaagtacgaagatctgagctcttctgacgagtcctgccctgctcctcagagacagaggccttgccggaagaagggtgtcagcatccacgagggaccgcgagccctggccaggatcacaggcattggcctgggcggcagagccccacggcctcgctatgagcaggctcctccccgtggctatgtcaccttcaacagcagtggcgagaaccccctggaagaagagggcctctgctgccgggatgtcacctcccccatcaatgagcgggatgtggagagcagcagcagcagcagcagtcgggaggaacatgctttctgtgccaacctggggcccgtccagagcagcagcagcagcgagggcctggccagagcccaggggctcagcagcgaagcttctgtggagagcaacgaggactcggatcatgcctgtaaaagctcagctcgcaaacaagctaaaagttacatgaagaccaagaatcctgacagccagtggcctccccgcgctgcaactgacagggaaggctttctcgctgagtccagcccccagactcagagggccccctactcaggaccccaggaccttgccgcactgctggagcagatcgggtgtctgaagtacctgcaggtgtttgaggagcaggacgtggacctccgcatctttctgaccctcactgagagcgacctgaaggaaattggcatcacgctgtttgggcccaagaggaagatgacgtccgccattgcccgctggcacagcagtgcccgcccacccggggatgccctggagctggcctacgccgaccggctggaggctgagatgcaggagctcgccatccagctgcacaagcgctgcgaggaggtagaggccacgcggggccaggtgtgtcaggagcaggagctgcgcgccgtggtggagagctgcctgctggagcaggaccgcgcccgcgaggacctccaggcccggctgcgggagacgtgggccctggcccgggatgctgccctcgtcctggaccagctgcgagcctgtcaagctgagctgtcatctcgagtgaggcaggaccagccccctggtgcagccactctgggcctagccgtccccccagctgactccaagggctggcaagcgtccctgcaggccatgagcctccccgagctctcgggagccctggaggaccgtgtccgtgagatggggcaagcactgtgcttagtgacccagagcctggagaagctgcaggtgctgaacgggaagaagtggcgggagacctagcctgcgggccgaatctgacgttgggtgattggtccaccctgaagctgtgtgccagggagtgaggaggacagtgagcaggtagctgccatgtgcagcccaggcccagtgggggccagaggatcaggccccgggagcagccggcagacagaggcaagacgggggctgcggccctggctcggcagctcgggccagcactgaggcgggacgagggcctcacccagaacctcgtggtgaggcccagagttcatgggctgccctggcccataccaggcagggccctggggggaaagtgtatccatatacacgcacaggtgccaactgaggtgggaccttaggaatgaggactggggcacctggaaaatgccattttttggaaaataaaatttaagaacagcta

SEQ ID NO: 10685 - DNA, 2265 bp, Homo sapiens
gctagtgcagtggtgtagcaggggcaggaccagcctgtttcatgccctggaacaaccagccaggaaagatctaacccttgggccttcctcctcagtgatgtccgagctcagcgatgaagccagcgagccggaactcctgaaccgcagcttgtccatgtggcacgggctcgggacacaggtcagcggggaggagctggatgtccccctggatcttcacacagctgcttccattggccagtatgaagtggtgaaggagtgtgtgcagcgcaaggtgcagagctagaaatgaaagacatccagggctggacagccctcttccactgtaccagcgccgggcaccagcacatggtcaggttcctcttggacagtggagccaatgccaacgtgagggagccgatatgtggatttactcccttgatggaagcagctgctgctggccatgagataatcgtgcagtattttctgaatcacggagtcaaggtggacgcgagagaccacagtggagccacagcccggatgctggccaagcagtacggacacatgaagatcgtggccttgatggacacttactcgccctctctgcccaagagcctctatcggagcccagaaaagtacgaagatctgagctcttctgacgagtcctgccctgctcctcagagacagaggccttgccggaagaagggtgtcagcatccacgagggaccgcgagccctggccaggatcacaggcattggcctgggcggcagagccccacggcctcgctatgagcaggctcctccccgtggctatgtcaccttcaacagcagtggcgagaaccccctggaagaagagggcctctgctgccgggatgtcacctcccccatcaatgagcgggatgtggagagcagcagcagcagcagcagtcgggaggaacatgctttctgtgccaacctggggcccgtccagagcagcagcagcagcgagggcctggccagagcccaggggctcagcagcgaagcttctgtggagagcaacgaggactcggatcatgcctgtaaaagctcagctcgcaaacaagctaaaagttacatgaagaccaagaatcctgacagccagtggcctccccgcgctgcaactgacagggaaggctttctcgctgagtccagcccccagactcagagggccccctactcaggaccccaggaccttgccgcactgctggagcagatcgggtgtctgaagtacctgcaggtgtttgaggagcaggacgtggacctccgcatctttctgaccctcactgagagcgacctgaaggaaattggcatcacgctgtttgggcccaagaggaagatgacgtccgccattgcccgctggcacagcagtgcccgcccacccggggatgccctggagctggcctacgccgaccggctggaggctgagatgcaggagctcgccatccagctgcacaagcgctgcgaggaggtagaggccacgcggggccaggtgtgtcaggagcaggagctgcgcgccgtggtggagagctgcctgctggagcaggaccgcgcccgcgaggacctccaggcccggctgcgggagacgtgggccctggcccgggatgctgccctcgtcctggaccagctgcgagcctgtcaagctgagctgtcatctcgagtgaggcaggaccagccccctggtgcagccactctgggcctagccgtccccccagctgactccaagggctggcaagcgtccctgcaggccatgagcctccccgagctctcgggagccctggaggaccgtgtccgtgagatggggcaagcactgtgcttagtgacccagagcctggagaagctgcaggtgctgaacgggaagaagtggcgggagacctagcctgcgggccgaatctgacgttgggtgattggtccaccctgaagctgtgtgccagggagtgaggaggacagtgagcaggtagctgccatgtgcagcccaggcccagtgggggccagaggatcaggccccgggagcagccggcagacagaggcaagacgggggctgcggccctggctcggcagctcgggccagcactgaggcgggacgagggcctcacccagaacctcgtggtgaggcccagagttcatgggctgccctggcccataccaggcagggccctggggggaaagtgtatccatatacacgcacaggtgccaactgaggtgggaccttaggaatgaggactggggcacctggaaaatgccattttttggaaaataaaatttaagaacagct

SEQ ID NO: 10686 - DNA, 2272 bp, Homo sapiens
ctgaccggaaggtccgggtgcgggacgtgtgcattccacggcgcccgggagctgtcccggtgccgacccgcgagcttcccggcgtgctccgcgccctcccgcaactacttccggggcgggtgccgggggcggtgccccggcgagggagcgtggcggcgagctgtttggggggggttggcgacggcagcccgagggcggcgcaaggcctgaggcccagcacagtgatgtccgagctcagcgatgaagccagcgagccggaactcctgaaccgcagcttgtccatgtggcacgggctcgggacacaggtcagcggggaggagctggatgtccccctggatcttcacacagctgcttccattggccagtatgaagtggtgaaggagtgtgtgcagcgggagccgatatgtggatttactcccttgatggaagcagctgctgctggccatgagataatcgtgcagtattttctgaatcacggagtcaaggtggacgcgagagaccacagtggagccacagcccggatgctggccaagcagtacggacacatgaagatcgtggccttgatggacacttactcgccctctctgcccaagagcctctatcggagcccagaaaagtacgaagatctgagctcttctgacgagtcctgccctgctcctcagagacagaggccttgccggaagaagggtgtcagcatccacgagggaccgcgagccctggccaggatcacaggcattggcctgggcggcagagccccacggcctcgctatgagcaggctcctccccgtggctatgtcaccttcaacagcagtggcgagaaccccctggaagaagagggcctctgctgccgggatgtcacctcccccatcaatgagcgggatgtggagagcagcagcagcagcagcagtcgggaggaacatgctttctgtgccaacctggggcccgtccagagcagcagcagcagcgagggcctggccagagcccaggggctcagcagcgaagcttctgtggagagcaacgaggactcggatcatgcctgtaaaagctcagctcgcaaacaagctaaaagttacatgaagaccaagaatcctgacagccagtggcctccccgcgctgcaactgacagggaaggctttctcgctgagtccagcccccagactcagagggccccctactcaggaccccaggaccttgccgcactgctggagcagatcgggtgtctgaagtacctgcaggtgtttgaggagcaggacgtggacctccgcatctttctgaccctcactgagagcgacctgaaggaaattggcatcacgctgtttgggcccaagaggaagatgacgtccgccattgcccgctggcacagcagtgcccgcccacccggggatgccctggagctggcctacgccgaccggctggaggctgagatgcaggagctcgccatccagctgcacaagcgctgcgaggaggtagaggccacgcggggccaggtgtgtcaggagcaggagctgcgcgccgtggtggagagctgcctgctggagcaggaccgcgcccgcgaggacctccaggcccggctgcgggagacgtgggccctggcccgggatgctgccctcgtcctggaccagctgcgagcctgtcaagctgagctgtcatctcgagtgaggcaggaccagccccctggtgcagccactctgggcctagccgtccccccagctgactccaagggctggcaagcgtccctgcaggccatgagcctccccgagctctcgggagccctggaggaccgtgtccgtgagatggggcaagcactgtgcttagtgacccagagcctggagaagctgcaggtgctgaacgggaagaagtggcgggagacctagcctgcgggccgaatctgacgttgggtgattggtccaccctgaagctgtgtgccagggagtgaggaggacagtgagcaggtagctgccatgtgcagcccaggcccagtgggggccagaggatcaggccccgggagcagccggcagacagaggcaagacgggggctgcggccctggctcggcagctcgggccagcactgaggcgggacgagggcctcacccagaacctcgtggtgaggcccagagttcatgggctgccctggcccataccaggcagggccctggggggaaagtgtatccatatacacgcacaggtgccaactgaggtgggaccttaggaatgaggactggggcacctggaaaatgccattttttggaaaataaaatttaagaacagctag

SEQ ID NO: 10687 - DNA, 1946 bp, Homo sapiens
gcggtgccccggcgagggagcgtggcggcgagctgtttggggggggttggcgacggcagcccgagggcggcgcaaggcctgaggcccagcacaggagagagttagatttgaataagaagaatggtggtggctggaccccgctgatgtatgcctcctacattggccacgacacaatcgtgcacctgctgcttgaggcgggggtgagtgtgaatgtgccgaccccagaagggcagactccactgatgctggcctccagctgtggcaacgagagcatcgcctactttcttctccagcaaggtgcagagctagaaatgaaagacatccagggctggacagccctcttccactgtaccagcgccgggcaccagcacatggtcaggttcctcttggacagtggagccaatgccaacgtgagggagccgatatgtggatttactcccttgatggaagcagctgctgctggccatgagataatcgtgcagtattttctgaatcacggagtcaaggtggacgcgagagaccacagtggagccacagcccggatgctggccaagcagtacggacacatgaagatcgtggccttgatggacacttactcgccctctctgcccaagagcctctatcggagcccagaaaagtacgaagatctgagctcttctgacgagtcctgccctgctcctcagagacagaggccttgccggaagaagggtgtcagcatccacgagggaccgcgagccctggccaggatcacaggcattggcctgggcggcagagccccacggcctcgctatgagcaggctcctccccgtggctatgtcaccttcaacagcagtggcgagaaccccctggaagaagagggcctctgctgccgggatgtcacctcccccatcaatgagcgggatgtggagagcagcagcagcagcagcagtcgggaggaacatgctttctgtgccaacctggggcccgtccagagcagcagcagcagcgagggcctggccagagcccaggggctcagcagcgaagcttctgtggagagcaacgaggactcggatcatgcctgtaaaagctcagctcgcaaacaagctaaaagttacatgaagaccaagaatcctgacagccagtggcctccccgcgctgcaactgacagggaaggctttctcgctgagtccagcccccagactcagagggccccctactcaggaccccaggaccttgccgcactgctggagcagatcgggtgtctgaagtacctgcaggtgtttgaggagcaggacgtggacctccgcatctttctgaccctcactgagagcgacctgaaggaaattggcatcacgctgtttgggcccaagaggaagatgacgtccgccattgcccgctggcacagcagtgcccgcccacccggggatgccctggagctggcctacgccgaccggctggaggctgagatgcaggagctcgccatccagctgcacaagcgctgcgaggaggtagaggccacgcggggccaggtgtgtcaggagcaggagctgcgcgccgtggtggagagctgcctgctggagcaggaccgcgcccgcgaggacctccaggcccggctgcgggagacgtgggccctggcccgggatgctgccctcgtcctggaccagctgcgagcctgtcaagctgagctgtcatctcgagtgaggcaggaccagccccctggtgcagccactctgggcctagccgtccccccagctgactccaagggctggcaagcgtccctgcaggccatgagcctccccgagctctcgggagccctggaggaccgtgtccgtgagatggggcaagcactgtgcttagtgacccagagcctggagaagctgcaggtgctgaacgggaagaagtggcgggagacctagcctgcgggccgaatctgacgttgggtgattggtccaccctgaagctgtgtg

SEQ ID NO: 10688 - DNA, 29258 bp, Homo sapiens
gctgaccggaaggtccgggtgcgggacgtgtgcattccacggcgcccgggagctgtcccggtgccgacccgcgagcttcccggcgtgctccgcgccctcccgcaactacttccggggcgggtgccgggggcggtgccccggcgagggagcgtggcggcgagctgtttggggggggttggcgacggcagcccgagggcggcgcaaggcctgaggcccagcacaggtgggttccgcggcggcccggccccagcacttgccggcacctgcagcccgcctagacccggcgctcgggcgtcccgcgctgcacttgctcgccgcgtgactggaggaccgagcccccacattttctttatgtggttgtggtgggggcacagtaatgccctgtgcgccgtagcgttcctgtggggatgtggccggggggcgtcgggaagcgtcactgctgtgagttacgggtttgtcggccagggacccgccccggggccagtgagctacctttgcgatgcggttccacggggcgagagggggtgcctgggtgctttcacagacctcctctgtgggcgtgacagttaccaccagcatcacatttgttaagatttttaaaaattttttaatttttgtgggtacgtagtaggtgtatatatttatggcgtatatgagagattttgatacaggcatgcagttcgtaataatcacatgtaaaatgggggtctccatcccttcaagcatttatcctttgtgttacaaacaatatgattatactctttgaattatttttaaatgtgcagccgggcgcggtggctcactcacgcctgtaatcctagcactttgggaggcaaaggcgggcggatcacctgaagtcaaggatttgagaccagcctggccaacatggggacacttcgtctctactaaacatacgaaaactaggctggcatggtggctcatacctgtaatctcagctactcgggaagctgaggcaggagaatcgcttgaacccaggaggcggaggttgcattgagccgagatcacgccgctgcactctagcctgggtaacagagtgagattatgtctcaaaaaaaataataataaataaataaaatgtgcaattagattatattgactatagtcaccctgttgtgcggtcaaatactagatctttttttttttttttttttttttgagacggagtctcgctttgtcgcccaggctggagtgcagtggcttgatcaaatactagatcttattcattctgttttttttgtatccattaagcatccccaccctccactacccttcccagccttggttacactagaagtaaccatccttctactttctatgtccatgagttcagttgttttgatttttagataaccacaaataattgagaacatgcaatatttatctttctgtgcctggcttatttcactaaacataacgatctccgcttccatccatgtttttgcaaatgataggatctcattctttttttatggctgaatagtactccattgtgtctaagtaccacattttctttaggattcactgtaaaggtaacagatacttagcattttcagaatggacagaaccaaaaagttgaatgaaaactaaaacgtcttatctctaatgctactttacaccacaccactcgggatgggacattttagttttcactttagtgttttttttttgtttttttttttgagacagaatttcgctctgttgcccaggctggagtgcagtggcttgagctcggctcactgcaatcgcctcccaggctcaagcgattctcttgcctcagcctcctgagtactgagactacaggcgcccaccaccacacccagctaatttttgtaattttagtaaagatgggagttcaccattttggccagggtggtctcgaactcctggcctcaagtggtccgtcacgcttggtctggttctcattgtccttcagacctctggggatgtcagatatgcaagtctccagtaaatagagaacacggcctcaccctgcaggaggcctttggcgtggaagagacatgcccagtgaaggcttgagggaggtatggaagggactctgaactgaccctcagctcgtttggtttcttatccaggcttcgttggccagggctgttagggtgggattctcacctgcaaagtgagggaagggcactgcacgatcttgggctctgctagctgaagaggtggtggctccaggaaggagggctttgcttgccccaccgcacctacacacactcttcaccaagggtctgtgaagtgttcgtctcccacattggtggcttgtttctttagccatcttggctgtcacctggggcttggaagcattctttaatagaaactgaggtcctcatcgcatctattaactaccatagcacctgtaggtcatcacaacctgacaaggcctttgttttcgcctttgctccctttcctacccttgtttcctggcactcttgtacctaaggattctactaggaagctgatgaccttgccttgatttggggattcctggtgtgccgttacccatgtaggcccatctcggggaaagtgttacctcaccagttcaccggcctgttatatttccccccatagctctctcttcaaaggatgcctaagtggattcctattcagttgacggttgctgcgtgccaccagtcacatcctggtttgtctgttggggaattgctttctatttttttcagaaaaatttatttttacttttttgaaattttcaatttcataaccattccagaaaaattaatttatatttaaaatttacaggccaggtgcagtggctcacgcctatatttccaggactttgagaggctgaggcgggcggatcacctgaggtgaggagttcgagaccagcctggccaacatggtgaaacccccgtctctactaaaaatacaaaaattagcctaacatgatggcgcacacctgtaatctcagctattcaggtggctgaggctcaagaagcccttaaacccaggaggcagaggttccagtgagctgaaatcatgccactgcactccagcctgggcaacagagcgagactgtctcaaaaaaataaataaaatttacatacagtaaaattcattttggtgttcagttctgtggtttcataaaggcatggagtcacagatccaccgtcacagtcatacaggtctatcgtcccccaaattccctctctgccccaacctccaaccctttaattttgccttttccagaatgtcatgtaagtgaaattatactgtaggcaggcttcttccatttagcgtaaatcatttgaaattcattcacgtgttgcatgtcaactgttggatccttgtgtttaatgctgagtagcatccattatatggatgtgccaccgtttgtttatccattcttttatgtatcataatagcagcctttttagatatgtccccgttagacagtgaggcactagggattggagttgctaagtagcagagctgcttttttgttgttttttttttttgttttgtttttggagacaaagtcttgctctgtttcccaggctggagtgcaatggcgtgatcttggctcaccgcaacctccgcctcctcagttcaagtgatgctcctacctcagcctcccgagtagctggccttcatgcccagctaatttttgtatttttagtagagacaggatttcaccatgttggccaggctggtcttgaactcttgacctcaagtgatctgcccaccttggcctcccaaagtgctgggattacaggtgtgagccaccgcaccgggtccaagctgaattttgatcaaaccccaaatccagggttcttccccaccacatcaaggaactgattgggttaaacaacccaattagcatttcttcactgcccatccaagaggttgtcaggttcctagagttggtggagaattctcttttacctggtgcctgcggttggaaggaggagcaggtactccacagttaatgcctcaccatatgtgctcctctttactggtgtgatagcaggctcaccagatttagcatggttgggactgcccaaagcatacattatttcagcaaataaatttgtctgagttactcccggggttgactgcactgggttatcagtctgctagtgcagtggtgtagcaggggcaggaccagcctgtttcatgccctggaacaaccagccaggaaagatctaacccttgggccttcctcctcagtgatgtccgagctcagcgatgaagccagcgagccggaactcctgaaccgcagcttgtccatgtggcacgggctcgggacacaggtcagcggggaggagctggatgtccccctggatcttcacacagctgcttccattggccagtatgaagtggtgaaggagtgtgtgcagcggtaagagatctcggggaacttcctctcacattttgagcagcgcagtgatggcttcgatcccacgtgatggggctttgcacacagttgtggatgtttaatgcgtgtagaataggttaacctgcttatctcaggcagctgtcagtaagtattgatgctgagccctgacaaagaggccgtttttattcctaggaagaaaaagagggagtaaactttgatcagaagcttataaacagtcattctttaaccagactaattttattcactaattgcagaaatgcccaaacaaacaagcaaaataaaaataaagacagaaagtgatggcctggtgcggtggctcacacttgtaattccagcactttgggaggctgagatgggcgggtcacttgaggtcaggagtttgagaccattctggataacatgatgaaaccccatctctactaaaaatataaaagttagctgggtgtggtggcatgtacctgtaatcccagctactcaggaggctgaggcaggagaatcgcttgaacccgggaggtggaggttacagtgagctgagattgcgccactgcactctagcctgggcaacagagtgagactctgtctcaaaaacaaaaaaaagaaaaaagaaagtgatccctggccttcttttcccggagggttcattcgatccctgtgatccctgttcccctctagcttctgccatggaggaggagagaggctgggctttcagtgcctctggggaatgacctcccgacgtcactgcccacctgccctttgctaatctgtgtacaatagttagagacaatataaagcccctggcagggtccatggctgcgtcttgcccatagtaggatgtgatcatcttgtttttggaaaagggtcgtctcctcacttccacccccttatgttccacacacagcctaactctgtctcctggttctcatttgatattgtggtgcagcgacctctcttcctctctctgcgtgcctcttccagttcccagtgagccaaagcaaagcattgctgaagccccaggtctccggttcccaagttgtggccctcacttagacatacccagcccatggagtgctggtgcaccttggtacagggtggtctgttgcgctccctccacaggaggctctaggcataggcagctgggtatgcagtcagtacggcccctcaaagggtcacgtttggaattctcaggctcttaagtctttgggtgtcctgttaagatgcagagtccataaccgctccatagaggagcagggggaggcgtttgtgttgtgatgggattttgacactagctgaggtggaggcttgctgatagtaagcacaggatggggcctgaggggagctgggggcatcagaaggaaggggtggggctgaacgaggagtggtaagagagccccagggagatgctctgctgttgtgtaaaggaagatagtgttaggacgagctgggtgcattcgagccctgctgcagaggcatctccatgcagcccccctggccaggggctgccactgaaccctggtatcaggaccttctggaatggctgcccaggtgtgcatcccagagtcactgagggctgccaggcaatggaaggtagttgcctgctgtggtctaatatgtgaatcccggctgggcgcggtggctcacgcctgtaatccagcactttgggaggctaaggcgggtggatcacgaggtcaggagatcgagaccatcctggctaacacggtgaaaccccatctctactaaaaatacaaaaaactagctgggcgtagtggcgggcgcctgtagtcccagctacttgggaggctgaggcaggagaatggcgtgaacttgggaggcggagcttgcagtgagccgagatcgcgccactgcactccagcctgggcgacagagcgagactctgtctcaaaaaaacaacaaaaaagtgaatcccgtaaaagggacagatcctggggttcagtcaccagttgttatcccctctgcaggcaagaactggggaagggaaagaaggcctgtgggcgttaaccatgtaggatcccaggtaaccatgcaagtgggtattattttaaatgtgactcccttgtcccaaccccagagtcgcagctaggaagcccacagttttttcccatgggaaaatgcattgccagaattttaacagcaatcagtgagaaagatgggattctttggtcacagatttttcaagaatgtttctttaaggtgaggtgacaaaggatgaatcagtggcggtgggacttgtccacggtggagtcccttctttcctcactgctcctctccacccagcagtgggctagtagatgccaggcctgtggtggtcagggtttttcaactgtggctgtgttgacaatccaggctggatcattctttgctgtgggggctgtcctggacactgtgggatgtttagcggcagccttggcctccagcagcccttccctgcccagttgtgagaaccaaaaatgccttcacacattgccacatattccctggttgagtgccatctgcctatctggtggtgtgaaagagcatagctggccttgggctaggaggatgcgaaatcagagcaaggagacgaaggctcagggcctcacaaggcagtgtacgagcaactgtcagcatttttctgcctgcctgcctccaatccccacaacgtccagggtggcagataacttctgcttcctgtcaactcatcccgcctggcctagcctcgccaccagctttggtgaaccccacatgcgaggcggctggccatgtctagcatatcttgcgtttgtttaggagagagttagatttgaataagaagaatggtggtggctggaccccgctgatgtatgcctcctacattggccacgacacaatcgtgcacctgctgcttgaggcgggggtgagtgtgaatgtgccgaccccagaagggcagactccactgatgctggcctccagctgtggcaacgagagcatcgcctactttcttctccaggtgagctacgagggaactcaggcccagaaacctgaggggctccgtggccaccctgacagagatgcgaaccactgcaggccacggtgttcgtgtgtgctcgtgtaatcacttctgattcttgcagcatggccgcctggagggcgcccgccccacgcagaggagatgaggccgtaacgcacgttctgtgttctcttgaagcaaggtgcagagctagaaatgaaagacatccagggctggacagccctcttccactgtaccagcgccgggcaccagcacatggtcaggttcctcttggacagtggagccaatgccaacgtgaggtgattgccacatctttagtggccacaggagtggcctaggtgtcatctgactctaaggagggtggctctggaggcagctaaccagagtttagggccaccctgcttcggcacgagaggctcaagatgaggggtaggaccagagtccttccaggcacaggccttttcgtacatctgtgagatgcatctcttcaagccctctcagcttccttttctttatctgaaacccacctgggtcatacagttgtaagaattacatgttttattgtatgccaggggcctaacatactgaatggcatttaaatgtcatacattacatgcaaattccttccattttcttgctttttgtatggatgaggtgaggtgatgctttgaaacagtcatgaggccgggcgtggtggctcacgcctgtgatcccagctctttgggaggccgaggtaggcagatcacgaggtcaggagatcgagaccatcctggctaacatggtgaaaccccatctctactaaaaatacgaaaaaattagctgggcatggtgacgggcgcctgtagtcccagctactcgggaggctgaggcaagagaatggtgtgaacccgggaggtggagcttgcagtgagccgagattgcaccactgcactccagcctgggtgacagagcaagactccatctcaaaaaaaaaaaaacaaaaacaacagtcatgagttttggccgggctcagtggctcacacctgtaatcctagcactctgggaggccaaggcgggcagatcatgaggtcaggagttcgagaccagtctggccaacatggtgaaaccccgtctctactaaaaatacaaaaattagctgggcgtggtggcaggtgcctgtaatcccagctactcgggagtctgaggcgggagaatcacttgaaaccagaaggcagaggttgcagtgaactgagagatcgtgccactgcactccagcctgagcaacaagagcaaaactctgtctcaaaaacaaacaaaaaaccagtcatgagttttataagttggaagtgggattgttgtctaaagcttgtcatgataataatcacctttgaacaaacgcagcgggtaccaatgcagcacccaccctggctgtcattcattctaagacacctgataattttgtatgccactaagaaagaaaaaatatgctactaattaacattcaactcgcctgttgatttaaagatgttttctgacttgagagatgttaaaatatgaacactgtgtgtcttaagatggatgaaaaccagcatttcccatgcatggttcctgacttccaaaccagcatgagacaaggagggatttggaagccctctgaagacagtgccgagttagcataaccaagcatgaaaagcaagcttcaggagctaagcgtggcaaagatagcttagatcattagtacttgaacttttcagagtgggttcatggaggacgttgaacttgaagccaggatttggatgaatggatgggagatgctggctttctgtgaggaattagaacagctttttgaatatgattgaggtggagatttcagaggtagccagtgggaatagccaacaggtgggacgacaggcagacatctgtctttaggacaaagaccagccctggggacagacaccagaagagtaaatggagctgatgtgttatattcactgttctcatgtcacctgttaattctggaaagggacagtgttctacgcttagggatcggtgactcgtgcactgctcagggtttatcttcagcagggagtttttgcctggcggaacttgtctcttccaatcatctgactgtggcccacatcttgcagggagccgatatgtggatttactcccttgatggaagcagctgctgctggccatgagataatcgtgcagtattttctgaatcacgtaagtgaccctgattattagcatgtaatgtagtcacggcaaatgaggaatcatattactgaagtataagctattacagaattttcctttgcacagaaataactttcattcatttattcaacacattttcattatctattgacgcccggtgttgagtggtgcttaggcattaaggatacagtggtgagtagaaatagacacctattcctgtaataattttgaaaatactatctgaaaattatggaaaaatattttaaaagtaaatagcactcataatcctgtcacttagaaaaattatatagaataagaaggcagagatcctcctctctttttcaacctccctgatgcccacttggtttgagaaagagctgccctaggacttttcctctgctgtggaaagatgtgtctgtaggcaagtgtgtgcacattgctttgtgttttgaacaaagtgggattctacgtatagtctgtaacttagagacatcttatagacatcttatctttgtacagtattccgtgtacaatctgcctcagttaatttaatgagtttcttattagtagaaacttagtttttaacattttgcaattataaacagtgttccgggaatatccttttacacatagctttaatacatttgcagttatttctgtatgttgtatttctgttttattttattaatttatttttttgagacatggtgttgccctgtatcccaggctggagttcagtggcgagatcgtggctcactgcagcttcagcctcctgggctcaagcgatcctcctgcctcagcccccaagtagctgggactacaggtgcatgctaccatgccccggctaattatttaattttttttttttggtagagttgggggtctcagtatgttgtgcaggctagtcttgaattcctgagctcaagcgatcacctcagcctcccaaagtgctgggatcacaggtgcaagcctgtccacacagaaccttgtacataaatattcatagcagtattattcataattgccaaaaagtagaaaaacccacaagtccatctactgaggaattgataaacaaaatatatatctgtatagcaggatattattcggccctacaaagtaatgcagtactgctgcatgctgcggcaggggtgaaccctgatgcgttaggctgggctgggtgcggtggcgcacgccggtaatcccaacactttgggaggctgaggccagagggtcgcttcagccctggagttggaggttgcagtgagctatgattgcgccgccacactccattctgggtcacagagtggatcctgcctcaaaaagaaaaagaaaaggaaaacattcggctcagtgaaagaagccagacacaacaggccacacactaggtgatttcactcataggaaatgtccagaataagcaaatacatagacagaaaatagatgagtggtttcctgggtcttggggaatgggaagattggggtgataaaaatgtgctaaaattgtttgtggtgatggttgaacaactgtgaatatacgagaagccgttgaattgtacattgtaagtgggtgacttgttggtatgtggattatatctttataaggctgttaaacccaatggggggaagtgcaggcggtcctgatgaattcccactaccaaggttgtctgttgtcctgcccaccagtcatagacaaaggtgtccattttctcttgtcctcaccagtcctgatgtcagtcaaccttttgtcaatctggcgggtgaattgtagcgtctcattttagtttgtccttgttagagtagttgaaatttttttctttttttttttttttggagacagaagtcttgtgctgtgtcgcccaggctggaaggctggagtgcagtggcgtgatctcggctcactgcaacctctacctcccaagttcaagcagttcttctgcctcagcctcccgagtagctgggactgcaggcacccgcccgcacacctggctaattttttgtattttagtagagatgaggtttcaccatgttgcccaggctgctcttgaactcctgaactcaggcaatccacccaccttagcctcccaaagtgctaggattacaggcataagccactgcgcccagccagttgaacatttttaaattgatttcttagccatttgtatttcttttttttttttttttttgagactgagtctcactcagtcgcccaggctggagtacagtggcatgatctcagctcactgcaacctccacctcccaggtttaagagattgtcctgcctcagcctcccgagtagctgggactaaaaatacaaaaaatcccggctaattttttgtatttttagtagagacaaggtttcaccgtgttagccaggatggtctcgatctcctgacctcatgatctgcccgccctggcctcccaaagtgctgggattacaggtgtgagccactgtgcccggctggccatttgtatttctcttacgagctgtctatgtttattgcccaattttctattggatagtttgtttttttctcacttattggtgggaatttcttaaatagtgaaaaattcacatggtatctctttttaacaaagaattttgggacacaacatgcacatggtacacatgcagaccagaaggtgggtgcaccgcaggcctgtcccccaccctgcctgcgtctccttggcaccctccccacgggcgactctgggaatacacccacacatgctcatggtcctgccccatgtgcagctgctcccatcttgcattttttaaaaaacttaatcatgaagatttttctatattggtgtataaagagacggggccaggtgcattgtctcgctcctgtaatcccagcactttgagaggccaaggcagacagatcacttgaggtcaggagtttgagaccagcttggccaaggtggtgaaacccgcctctaccaaaaatacaaaaatacaaaatacaggtggctgacgctgtaatcccagctacttgggaggctgagacaggagaatcacttgaacctgggaggcagaggttgcgatgagccaagatgttgccactgcactccagcctgggtgacagagtgagactatctctaaataaataaataaataaataaataaataaatcaataaatcaataaagagatggggtcttgctctgtccctcaggctggagtggagtggtgcagtctcagctcactgcagccttgacctcctggtctcaagtgatcctcctgcctcagcctcccaagtagctgggattacaggtgcgtgccaccacgcccagccaatttttgtattttttttgtagagatggggttttgccacgttgcccaggctggtcttgaactcctgagctcaggcagttcgcctgcctcggtctcccaaagtgctgggattacaggcacgagccaacgcacccagcccctctcttttttttttttttttgagatggcgtcttgctctgttgcccaggctagagtgcagtggcacgatctcggctcactgcaacctcagacttccgggttcacaccattctcctgcctcagcctcccgagtagctgggaccacaggcgcccgccaccatgcccagctaatttttcatatttttagtagagacggggtttcaccgcgttagccaggatggtctcgatctcctgacctcgtgatccgcccaccttggcctcccaaagtgctgggattacaggcgtgagccaccgtgcctggcctctcttttttttttttttttttatggtggcatggtattccctgtagggatgaatcagagtttttttgtttgtttgtttgtttgttttgagatggagtctcgctctgtagccctggctggagtgcagtggcgcaatctcggctcattgcaacctctgcctcccaggttcaagcgattctcctgcctcagcctcctgagtagctgggattacaggcgtgtgccaccacgcccagctaattttgtatttttagtagacagggtttcggcatgttggtcaggatggtcttgaactcctgacctcaagtgatctaccactttggcctcccaaagtgctgagattacaggcatgagccactgcgcctggcctaccgttgacatttcttacacgtctttttaagcacatatgggaatttcttcaggagcttaggatgtgttcttcaaagtagagtctttgttgtgtgaggtgggttcagtcggtagtgggtagtgtaaacttgctttgttccatagtggtcctggttcacacccctccccttagggtgttagacttcttttttttttttgagatggagtctctctctgtcacccaggctggagtgcagtggcgcgatctcggctcactgcaacctctgcctcccaggttcaagcgattttcctgcctcagcctcccgagtagctgggactgtaggcactcgccaccatgcccagctaatttttgtatttttagtagagacagggtttcaccatgttggccaggatggtctcaatctcttgaccttgtgacccgcccgccttggtcttccaaagtgctgggattacaggcgtgagccaccgtgcctggccttttttttttttttttttttggggtggggtcttgctctgtccccaaggctggagtacagtggtgtgatctcagctcagtgcaacttctgactcccaggctcaagcaattcgcctggctcagcctcccgagtagctgggattccaggtgtgtgccaccatatccagctaatttttgtatttttagtggagacagggtttcaccatgttggccaggctggtctcgaactcctgacctcatgatctgtctgcctcagcctcccaaagtgctgggattacaggcgtgagccactgtgcctggccaggatgttagactttttggctccctggccatttgggtttctttttctgcaaataattatttttgtattttttatttattttttttatatagggtcttgctttgtcaccacactagagtgcagtggcctgatcatgggtcattgtagtctcaacctcctgggctgaagtaatccttctgcctcagcctcctcagtagctgggactacaggcacgcactaccacgcctggctgttttttttttgtagagacaaaaatctcactatgttgcccaggctggtcttgaactcctggcctcaagcaatcttcccaccttggcctcccaaagtgctggagttacagacctgagccaccatgcccggccagataattctttgacagataatcctgctgacatgaactagacttccttaagacacatcatagaatcaatagcccagaaccataaagagcctctacttgtaagtttagagtcattttaagtaaggtagaactggagatcataagagatatgtactcttataatttttgattgtatgtttgtttctttttgagacagagtctcactctgtttgcccatgctggagcacagtggcgcgatcatagtttgttgcagcctcaacctcccaggttcaagggatccttgcaactcagcctcctgagtagctgagaccacaagcgcatgctatcacactagctgatttgatttttttgtagagttggggtctcactaagttgcttaggctggtctcaaactcctggctgcaagtggtcctcccaccttggcctcccaaagcgctgggattacaggcaggaaccacggtgcttggccaacaatttgcatgcctttaccacattccccaaatgttaacatttcacctcattttcttatcagtctctttatgtataacatgcatatgttttctgaatcatttaaatgtaaattgtgacataatgccccttttcccctaaatatgtatttcctgagagtaagaatttcattatgtatttcctaaaagcaaaaatgttctctttcccagtcacacaaaattatcagactcaggaactcaacactgagttcttcctccagcacttgacaagaatcaaagtgttggttagtgactgctttgggggatggggcaggactggcagcaggtggcccgatggcctgggtggtttgcctgccagcgatgctggtgggcaagccctgcctggaagctcctctctcccacgtttttcctgccgcccagtagttagaccacctggagccagaggagggggcccacccggtttcccagcctgtccctccagagctgggctccatttctggaggtagagaatggggcaagtctgggcatcttgtgctctttgctaggggaggaaagggctgtggctgctttccttgtcccccatttcccttctgccagtggggccaagccccagcagctcagtcaggagaagaggatatggatctgtctgggcctctctctttaagagaaagttgattcgtgccttccggatagtcttgttccagggtttctaaactttctgatcccaccttcatgttaaaatgagttttgatcatgtgtctctttagtaatatggacattataaaataggaaaaaaaagtctcttaaagcctaagtagttaaaaatttattttcacatcaggcatagtggctcatgccagtaatcccagcacttttagaggccaaagtgggaagatcgcttgaggctggagttggagaccagtctgggcaatacagtgagaccttgtctctaaattaaaaaaaaaaaaaaaaaaaaaattggccaggcatggtggctcatgcctgtaatcccagcactttgggatgccaaggcaggtggatcacctgaggtcaggagttcaagaccagcctggccaacatggtgaaaccccattagcggggcgtggtggcgtgcccctgtagtcccagctacttgggaggctgaggcgggagaatcacttgaacccggaaggcagaggttgcagtgagccgagattgcgccattgcactccagcctgggtgacagagtgagactccgtctcaaaaaaaaaaagccagttgtggtgtgtgtttgtaatcccagggaggctgagaagggaggatcacttgagctggggaggtcagggttgcaatgagccagtgtaatccagcgtgggccacagagtgagattctgcctcaaaaacaaaaccaaaaatatataacgagttaaaatcctacagtaaagaggctactgttttattctggttaaaccttagggttccttctatcaaacttaaactagaattttttttttttcttgagatggagtcgccctctgtcgcccaggctggagtgcagcagcttactgcaatctctgcctcccgtgttgaagcgattctcctgcctcagcctcccgagtagctgggattacaggtgtgtgccaccactcccagctaacttttgtgtttttagtagatacaggctggtctcaaactcctgaccaggctggttgttggccaggctggtctcaaactcctgacctcaagtgatccgcccacctcagcctccaaaagtgctgggattacaggtgtgagcctctgtgcccagccaagaaattattttttatttttgagatagagtcttgcttcgtctgttgcccaggctggtgtgcagtggcgtgatcttggctcattgcaacttccacctcctggactcaggcaattctccttcctcagcttcctgagtagctgggagtacagacgtgtgccaccacgcccggctaatttttgtatttttagtagagatggggttttaccacgttttcccacattggccaggctggtcttgaactcctgacctcaggtgatccacccgtctcggcctaccaaagtgctgggattacaggcttgagccaccgtgcccagcttataaattattgttattatttattattatttttttgagatggaatctcagtctgtcgtcgaggctgtagtgcagtggcgcgatctcagctcactgcaacctccgcctcctggattcaaggatttctcctccctcagcctcctgagtagctgggatacaggcacgcaccaccacacctggctaatttttgtattttttagtagagacggggtttcaccacattgcccaggctggtctcgaactcatgacctatgatccacccaccttggtcccccaaagtgctgggattacaggcgtgagccactgtgcccggcctataaattattttttaaggcacaaagtctcataggtaatttttaatcagagtcaaaagtaggatggggggcactctagaaagtaaaactccttatactttgtgaaaacacagttttttgtcctgtatccctgcccagagaccacctctgcctcccccaccaactacatatgggggtcaaggttgaggccccctggtctaacgggagagacagttgccgtatgggtggtagcaaaactccttaagggttgtgatttttttttttttttttttttttgagttggagtctccgtgtgtcgcccaggctggagtccagtggtgcgatcttggctcactgcaacctccacctcctgggttcaagcgattctcctgcctcagccccccggagtagctgggactgcaggtgcccaccaccacgcccggctaatttctttttgtatttgtagtagagatgaggattcaccctgttggccaggctggtatggaactcctgaccttgtgctccgtccacctcggcctcccaaagtgctgggattacaggcatgagccacggcgcctggctgtgccttttttctcttaatgatgttttgtgcaccctagtccgtgtcaccgcaggtactcccacccaccacgtaaatgggcgggaggcgctctgttttctggatatgctctcacgtagctcattaatctcttattttaagttccttctgattctcactatgctgaatgccacagtgaaaattctaaattgtagtgtatgtcctgcattatttccttaggcgccgctgcacttcagcctgggtaacagagcaagatcctattaaaaaaaaaaaagcaaacatgcttatggtagtacattttaaaaacatagaagattggaaaattggaaaaatccccatcaaaaatagtaaataacttaaaaatagcaacattttgggtatgttaccttccaatattgttttctgtgtaatttttttggtctcattttgccggagttgtaatgtatatgtagttttgtatcatgatccttttttatttttttgagacaaggtctcgctctattgcccaggctggagtacagtggtgcgatctcagctcgctgcagcgtcaagctctgggacttaagtgatcctcctgcctcagcctcctgagtagctgggactacaggcatgtgccgccacaccctgctaattttttattaaagatgctccccctttccggggtcccgcctcctcctctgagctttggctctggcttccctgcctcccccagctgcctggtctgacaggagagaaggacagttacagtgtacagtgacaccaaaaacatgctgtattgattatagtttatttttttttcttgtagaggtgggttcatgctgtgttgcccaggttgttgtccaactcctgagccgagcgatccacctgccttggcctgtcaaatgctgggattacaggcatgagccacctcacttggccatgatcctttttcaacttgatcatacagctgtttgtaaatatcaccatctatggcaataacagaactgactgcttatccccctgagcattcaagttttctctaggtaggttttcattattgtgaatatgctgtgccaaacatcctttttttttttttttttttttttttgagacagagtctcactctgtcttcaggctggagtgcagtggcatgatctcagctcactgcagcctccgcttcccgggttcaagcaattctcctgcctcagcctcccgagtagctgagactataggcgttcaccaccacgcccggctaatttttgtatttttagtagagacggggtttcaccatgttggccaggatggtctcaatctcctgacctcgtgatctgcccacctcggcctcccaaagtgctgggattacaggcatgagccaccgcacccggcctgtgccaaacatctttgtgcactaaagccttttctgtatttagggttatttccttagggtcatggaagtggaattgttgcgctgcaagacctgtaaatacattatagagctttggatcaaagttacgaattctgcttcagaggatggtgctttcattctgactggtttaaaaggctgctttctttgaagacaagcgaagtgagtgggacacagcccaggcgcagaaggtgaaggctgggatctccgcatggtggctgccagccccctgcaagggaggtcatgagcgtgggagatgactccccagcccccagccctcctcatccttgtccctaagaagagagtgagagcaaaacttgtggctgcggtgcagacaagcctgcctctttctcatgcagatgtgatgtttcccacacagggaggcagtcagaaaccagcatatgcccttctgtcttcccagccagcagcccaggaagggcaggtgctttgaaggagaggcccctaaccccctttcacggacattcacagggagtcaaggtggacgcgagagaccacagtggagccacagcccggatgctggccaagcagtacggacacatgaagatcgtggccttgatggacacttactcgccctctctgcccaagagcctctatcggagcccaggtacccacacctgccagccgcgccctgctggggtctctggttgccttgagctttaggtgacctggcagagaaagatgtcccccgcttccccggctcccaccttctctgagatttggctctgcctcccccagctgcttacatgtcaaggttgaggcccctgctctaacaggagataaggatggttacgatggagagtggtacaaaaccaggctgttgtgaatgtagaggctttctgtagtatgcttgactaccgagtaggggcaggcccctcttagttttctgttttcactgtttcctgagctatggcttgttcattcttctatatgaacttgaatatcaacttgtctagctccttaaaaacagtattgatatttttactgagattgtgacaatgtataaattaactatatctttgtgttgttgtcttatccaagaacaagggatgacttcttgttccaatgtacttttgggtcttgcaggagggttttaaatttttcttcatctacattttgcatgtgacttaagtttattcctaagtgtttgatcatctttgtcgctattgtaaatggggttttccctatcattatatcctttttttccccccaactctcagggtattaattattcagtgctatttattttttatttcagtaggtttttggagaacaggtggtggttggatacgtgaataagtcctttagtggtgtcattatatcgtttcactgcatattgtcagtgcatttgaaggcagtggatttctgcaaacttttgttttttttttgatacgggagtttcgctcttgttgctcaggctggagtgcaatgaagcgatcttgcctcaccgcaacctcttcctcccaggttcaagcaattttgcctcagcctcccaggtagctgggattacaggcgtgcaccaccatgcccggctaattttttgtattttcagtagagatggggtttctccatgttggtcaggctggtctagaactcgcaacctcaggtgatccacccatctcagcctcccaaagtgctgggattacaggtgtgagccactgcactcagccctgcaaactaattttatattctgctaccttacagaattcttacattgttcaggttagttttgttattgattctttagggctttacaggtgtactaacatataatctttaagtatcgatggatacactgcttcctgctgattctcatgactctgactttgttgaattgcaccgttcttttgtttagttgctaacacctctagctcattgttcaacatagtggagatagtgagcctccttaccttggtcctgatcttagtggaaatgccacgttacatgagaggctgactgtaaaagggaaggcatatgttattttagcttattaacaaagtattcctcagttcttctattcctgagtggtgttttacaggagtaactattgaattgtgttcccatatctttggagacgatggtgaattttcatatggtagattgtcttcatgaacctcctaataatgaatcaaccttacattcttggcataaatcccacatgttgtactattttaatgtgtttttgaattctgtttattaatatttagtatttttctatggatattcagtcataagtgatactggtctatagttttctttcttctttttttttgtttttgaaatggagtcttgctctgttgcccaggctggactggagtggcgagatctcagctcactgcaacctccgcaacctccgcctcctgagttcaagcaattcttctgcctcagcctcccgagtagctgggatcacaggcgtgcaccactacacccagctaatttttgtatttttagtagagacggggtttcaccatgttggccaggctggtctcgaactcctgatctccagtgatccgcctgcctcagcctcccaaagtgctgggattacaggcgtgagccaccgctcccggcgtggtctatacttttctatttttgttctgtctatcaggtatgggtatcagtgtttacttcataaaaataatttggaagttttccttccttttttgtgttctaggacaatacacgtagcattagtgctacctggtcttagaagttttgatagaatcctcccatgaaaccatctggtctctttctgtgaggtggttcctcgataacagtttttctatttcttctatagagattggcctcctcatactttcttttcttatggggtcagttttggtaaattatattttcctgagagatcacttcatctaggatttcagacttatctgcagaggtctacaagataatattttctccctttttttttttttttttttgagacagagtttcactcttgttccccaggctggagtgcagtggctcgatcttgactcaccgcaacctctgcctcccgggttcaagtgattctcctgcctcagcgtcccaagtagatgggattacaggcatgcgctaccatgcctggataattttatgtttttagtagagacagggtttctccatgttggccgggctggtctcaaactcccgacctcaggtggtctgcccacctgggcctcccaaagtactgggattataggtgtgagccaccgcacccggccaatttttttctccttttaaaatattctgtttcagggccaggcgcggtggcttatgcctataatctcagcactttggaaggccgagttgggcggatcacctgaggtcgggagttcgagaccagcctgatcagtatggagaaaccccatctctactaaaaatataaaattagctgggcgtagtggtgcatgcctgtaatcccagctactcgggaggctgaggtgggagaatcccttgaacccgggaggcagaggttgaggtgagccgagatcgtgccattgcagtccagcctaggcaacaagagcgaaactctgtctcaaaaaaaaaaaaaaaaaaaaaattctgtttcaggctgggtgcagtggctcatgcctgtaatctcagcactttgggaggctgaggcgtgtggatcacttgaggtcaggagttcaagaccagcctggccaacatggtgaaaccccgtctccactaaaaatacaaaaataagccaatgtggtggtgtgcgccagctactctggaggctgaggcaggagaatcacttgaacccgggagggggagattgcagtaagccaaaatcacgccactgcactccagcttggcgacagagcgagactccatctcaaagaaaagtaaatagataaaataaaacaaaataaaatactctgtttcagtggttattttctcctgttattatctttttttggcatggaaaatattgatttattttttgtgacagggtcttgctttgtcacccaggctggagtccagtgacccaatctcgactcaatgcaacctccgcctcccaggctcaaaacgatccttctacctcagctctacgagtagctaggactgtaggtgcaccctaccacgcccagcttacgtttgtattttttgtagagaggtggttttgccatgttgaccaggctggtctcaagagtcctgagctcaagcaatccacccgcctcagcctcccaaagtgctgggactacaggcatgagctactgcacctgacctggaaaatatttatctcatttttaattgacacaaaataactacatatttatggggtacagtgtgtgatgttttgatacatgtatacactgtgtaatgatcaaattaaggtgattagcttatccatcacctcaaacatttatcatttcgaggtgagaacatttaaaatcatgtcttctagtagctattttgaggtataagctgttgttccgtatagtcactctactgtgaacaccagaacttctttcttcgatctgtaattttacacctattgaccaatctctcccactacctccccacccccaacctctgataatcactattctactctacatgtttgacatgagcttttaaaaatcctgtaaatgggtgacatcatgtagtcatgtagtcttttttgttgtttgtttggtttttgagacaggttctcgctttgtcacccaggctggagtgtggtggcataatcttggctcactgcagcctccaattcctgggctcaagtgatcctcctatctcagcctcccgagtagctggcactacaggcacctaccaccacacctggctaatgttttatttttttgtagagacggggtcttgctatactgaccaggttggttttgaactcctgggctcaagtgatcctctcgccttggcctcccagagtgttgggattacaagtgtgagtcaccacaacagctggcatttgtctttcttttctatgtctggcttattttactgaacatagtctcttccaggcttattcatgttgccacaaatgatcagatttcattctttatgtctgaataatattcaattgtgtatataaactcattttctgtcttcgttcatccactgatggacacaggttgattctctatctaggctactgtgaatactgcggcagtaaacatgagggtgtagacatctctttggtatactgatttcctttcttttggataaatacccagtagtggaattgctggatctcatttcttatattttttaatttttttttttttttgagatggagtttcgctcttgtttcctaggctggagtgcaatggcacgatcttggctcactgcaacctccacctcccgggttcaagcgattctcctgcctcagcctccctagtagctgggattacaggcatgtgccaccacgtctggctaattttgcatttttgggagagacagggtttctccatgttggtcagggtggtctcgaactcccgacataaggtggtccacccgactcggcctcccaaagtgctgggattacaggcatgaaccgctgcacccggcaaaaatttcttctattaaaaaaaatagagacagtgtctcagtatgttgcccaggctggtctcaaactcctgggcccaagcgatcctcccacctcagtctcccacagtgctgagattataggcatgagccactgcgcccggcctcacttcttattttgaatatttgtgtttgttctttttttttttttgagacagagtctcgctctgttgcccaggctggagtgcagtggcgcgatctcggctcactgcaacccccgcctcccaggttcaagcgattctcctgcctcagccttttgagtagctgggactacagggtgcccaccaccacacctggctaattttttttttgtatttttagtagagacagggtttcactgtgttagccaggatggtctcgatctcctcacctcgtgatctgcccacctcggcctcccaaactgctagaattacaggtgtgagccaccgtgcgcagcctcttcctttttttcttaagttaaatactagtactttgtctgtttagtggaaaaacaagaaaaacccatcggattttgatttattaatgagacctactgattgtctgtttaatttctgcttttatttttatttggcttactttgttgttctagttttttgagttggaaacttctttcattttcattgttgcccttttgttgctaaatgttagaggctgtgaatttttgctgattgctgctttaagtgtattctgggggttctgtatttaatactttccttgttatttttagaaattctgtaatttttatttatattttctccttcacccaggagttgtctaatagaagtattatgattgtttttgtttgttaatttctagatggaagggcctttttgatcttgcaattaatttctcatgttattctgattaactttaatgtgtctgatcagagagtgtttataattcttacatttacataacttccttgtcatcttatttatcatctactgatctatctatatatatatatatttttttcagatgtagtctcactctgtcacccaggctggagtgcccaagtgcgatcttgactcactgcaacctctgcctcccaggttcaagcgactctcctgcctcagcctcccgagtagttgggattccaggcatctgccaccacgcctggctcatttttttttgtatttttagtagggacagggtttcaccatgttggccaggttggtcttgaagtcctgacctcaagtgatccgcccacctcggcctcccaaagtgctgggattacaggcgtgagccaccgcgcccggccctgatcaatattttttagtgttccgtgttttgcttgagaagttgtattctctattatctgtatacagtttagcatatctgtgagtctatcttatttaggattatgtactcttagttcattttctacaaaattacctattagcgtgtttctgatttatgaaggaagttggtgcattttttggtgacagattttcataacttgttatagattcactgtgaattatggcttttagtattagaagtgtccttctggctgggcatggcccatacctgtaatccgagcactttgggaggccaaggcgggcagatcccctgaggtcaggagttcgagaccagtccagcctacatggtgaaaccttgtctctactcaaaatacacaaattagccaggcatggtggcacatacttacaatcccagctactcgggaggctgaggcaggagaatcacttgaacccgggaggcggaggttacaatgagccgagattgtgccactgcactccagcctaggtgacggagtgaaactctgtttcaaaaaaaaaaaaaaaaaagtgtccttccgtgtcatatttaatgtgttttgccctgaattccacgttgatagcaggattgcagccctggctcttttgtggtttccatctgcctgttctttttaagctgctctgagggtgtgttgggtgctgagattcacgcagctgccgttcccttgcttattgctgcctctttgcatttgtcttacagctccctccccttcagcttggatggaagcacagtctccctggagtgctatagatctttgagtgtgaggaggtgtgtgtccatatggctagctcagtcgccagagcttgagcctcgtcatggggaaggacagagtggcccacgttcagggcctgagctctccctctttgctggcctgccctgagttgtcctgtcagtttgcacctgagcgagcagctcctttctcagtgtcaggctcagcccagcctcttccctggcattgggattgtttcataataaacacagctcaggtggtaatgcaaaggacctttcccttcatttctgccccagcttacccactccacaaggagatctcatcatttcctcctgtatacaactcacgtatctcttaaaagtagaatcagatcagagccttatacaaatcaaatatgaaaaactgaaaagctacaaaataataaaagctctggtttgagctctgaaagctcagactgggaagtgatttgaaacagtttataatcatagcaaacacatgccatgctttagaaaatacaaaattgtggctgggcgctgtggctcactcctgtgatgccagcactttgtgggaggccaaggtgggcggatcacaaggtcaggagatcgagaccagcctggccaacatggtgaaaccccgtctctactaaaaatacaaaaacaagattagctgggcatggtggccgggtgcctgtagtcccagctacttgggagcctgaggcaggagagtggcgtgaacccaggaggtggagcttgcagtgagccgtgatcgcaccattgcactcctgcctgggtgacagagcaagactccgtctcaaaaaaataaagaaaaaaaaaagaaaatacagaattgcttaataagttgtttccagccgggcacagtggtaacgtgcctataatcccagcactttgcgaggctgaggtgggtggatcacctgaggtcaggagttcaagaccagcctaatatgatgaaaccccatctctactaaaatataaaaattagctgggtatggtggcatctgcctataattcccaactactcgggaggctgagataggagaattgcttgaacccaggaggcggaagttccagcctgggcagcaagagcaaaactccttctcaaaagaaaaaaaaaaaagttgtttccaaaggaagggattaggaaaaagtagttgtgacttatattaccatatattttaatgaagagatgggttttacttattcaaattagaacagaatttctgattatgaacaatacagacttatgaacaatttggcaaaccccaacagagataataaactcctggctgggcatggtggctcatgcctgtaatcccagcactttgggaggccaaggcaggcagatcaggagtttgagaccagcctggccaacatggcaaaagcctgtgtctactgaaaaagaaaagaaaaaaaacactgggcatggtggcacgcatctgtaaccgcagctacttggaagggtgaggcgtgagaatcgctagaacccaggaggcggaggttgcagtgagtgagccaagatcatgccattacacttcagctcgggggacagagtgagactctgtctcaagaaaaatgaaacttcccatcctcactaactttgcagctccctgtggcccattggagcagcgccccggcctgttagggcatttctcagaagtgatgccctggcagatacccttctccttaatttaacaaaaccggcgacagtcactttctttcagtttgccgtaaggattagtaaatgagtccattactgaacacactatcttaatcttggtgtttgatcacagaaaagtacgaagatctgagctcttctgacgagtcctgccctgctcctcagagacagaggccttgccggaagaagggtgtcagcatccacgagggaccgcgagccctggccaggatcacaggcattggcctggg

SEQ ID NO: 10689 - DNA, 868 bp, Homo sapiens
gctgaccggaaggtccgggtgcgggacgtgtgcattccacggcgcccgggagctgtcccggtgccgacccgcgagcttcccggcgtgctccgcgccctcccgcaactacttccggggcgggtgccgggggcggtgccccggcgagggagcgtggcggcgagctgtttggggggggttggcgacggcagcccgagggcggcgcaaggcctgaggcccagcacagtgatgtccgagctcagcgatgaagccagcgagccggaactcctgaaccgcagcttgtccatgtggcacgggctcgggacacaggtcagcggggaggagctggatgtccccctggatcttcacacagctgcttccattggccagtatgaagtggtgaaggagtgtgtgcagcgcaaggtgcagagctagaaatgaaagacatccagggctggacagccctcttccactgtaccagcgccgggcaccagcacatggtcaggttcctcttggacagtggagccaatgccaacgtgagggagccgatatgtggatttactcccttgatggaagcagctgctgctggccatgagataatcgtgcagtattttctgaatcacggagtcaaggtggacgcgagagaccacagtggagccacagcccggatgctggccaagcagtacggacacatgaagatcgtggccttgatggacacttactcgccctctctgcccaagagcctctatcggagcccagaaaagtacgaagatctgagctcttctgacgagtcctgccctgctcctcagagacagaggccttgccggaagaagggtgtcagcatccacgagggaccgcgagccctggccaggatcacaggcattggcctggg

SEQ ID NO: 10690 - DNA, 672 bp, Homo sapiens
gggcgggtgccgggggcggtgccccggcgagggagcgtggcggcgagctgtttggggggggttggcgacggcagcccgagggcggcgcaaggcctgaggcccagcacagggagtcaaggtggacgcgagagaccacagtggagccacagcccggatgctggccaagcagtacggacacatgaagatcgtggccttgatggacacttactcgccctctctgcccaagagcctctatcggagcccagaaaagtacgaagatctgagctcttctgacgagtcctgccctgctcctcagagacagaggccttgccggaagaagggtgtcagcatccacgagggaccgcgagccctggccaggatcacaggcattggcctgggcggcagagccccacggcctcgctatgagcaggctcctccccgtggctatgtcaccttcaacagcagtggcgagaaccccctggaagaagagggcctctgctgccgggatgtcacctcccccatcaatgagcgggatgtggagagcagcagcagcagcagcagtcgggaggaacatgctttctgtgccaacctggggcccgtccagagcagcagcagcagcgagggcctggccagagcccaggggctcagcagcgaagcttctgtggagagcaacgaggactcggatcatgcctg

SEQ ID NO: 10691 - DNA, 968 bp, Homo sapiens
ggagctgtcccggtgccgacccgcgagcttcccggcgtgctccgcgccctcccgcaactacttccggggcgggtgccgggggcggtgccccggcgagggagcgtggcggcgagctgtttggggggggttggcgacggcagcccgagggcggcgcaaggcctgaggcccagcacagggagccgatatgtggatttactcccttgatggaagcagctgctgctggccatgagataatcgtgcagtattttctgaatcacggagtcaaggtggacgcgagagaccacagtggagccacagcccggatgctggccaagcagtacggacacatgaagatcgtggccttgatggacacttactcgccctctctgcccaagagcctctatcggagcccagaaaagtacgaagatctgagctcttctgacgagtcctgccctgctcctcagagacagaggccttgccggaagaagggtgtcagcatccacgagggaccgcgagccctggccaggatcacaggcattggcctgggcggcagagccccacggcctcgctatgagcaggctcctccccgtggctatgtcaccttcaacagcagtggcgagaaccccctggaagaagagggcctctgctgccgggatgtcacctcccccatcaatgagcgggatgtggagagcagcagcagcagcagcagtcgggaggaacatgctttctgtgccaacctggggcccgtccagagcagcagcagcagcgagggcctggccagagcccaggggctcagcagcgaagcttctgtggagagcaacgaggactcggatcatgcctgtaaaagctcagctcgcaaacaagctaaaagttacatgaagaccaagaatcctgacagccagtggcctccccgcgctgcaactgacagggaaggctttctcgctgagtccagcccccagactcagagggccccctactcaggaccccag

SEQ ID NO: 10692 - DNA, 19913 bp, Homo sapiens
tgaggtggagatttcagaggtagccagtgggaatagccaacaggtgggacgacaggcagacatctgtctttaggacaaagaccagccctggggacagacaccagaagagtaaatggagctgatgtgttatattcactgttctcatgtcacctgttaattctggaaagggacagtgttctacgcttagggatcggtgactcgtgcactgctcagggtttatcttcagcagggagtttttgcctggcggaacttgtctcttccaatcatctgactgtggcccacatcttgcagggagccgatatgtggatttactcccttgatggaagcagctgctgctggccatgagataatcgtgcagtattttctgaatcacgtaagtgaccctgattattagcatgtaatgtagtcacggcaaatgaggaatcatattactgaagtataagctattacagaattttcctttgcacagaaataactttcattcatttattcaacacattttcattatctattgacgcccggtgttgagtggtgcttaggcattaaggatacagtggtgagtagaaatagacacctattcctgtaataattttgaaaatactatctgaaaattatggaaaaatattttaaaagtaaatagcactcataatcctgtcacttagaaaaattatatagaataagaaggcagagatcctcctctctttttcaacctccctgatgcccacttggtttgagaaagagctgccctaggacttttcctctgctgtggaaagatgtgtctgtaggcaagtgtgtgcacattgctttgtgttttgaacaaagtgggattctacgtatagtctgtaacttagagacatcttatagacatcttatctttgtacagtattccgtgtacaatctgcctcagttaatttaatgagtttcttattagtagaaacttagtttttaacattttgcaattataaacagtgttccgggaatatccttttacacatagctttaatacatttgcagttatttctgtatgttgtatttctgttttattttattaatttatttttttgagacatggtgttgccctgtatcccaggctggagttcagtggcgagatcgtggctcactgcagcttcagcctcctgggctcaagcgatcctcctgcctcagcccccaagtagctgggactacaggtgcatgctaccatgccccggctaattatttaattttttttttttggtagagttgggggtctcagtatgttgtgcaggctagtcttgaattcctgagctcaagcgatcacctcagcctcccaaagtgctgggatcacaggtgcaagcctgtccacacagaaccttgtacataaatattcatagcagtattattcataattgccaaaaagtagaaaaacccacaagtccatctactgaggaattgataaacaaaatatatatctgtatagcaggatattattcggccctacaaagtaatgcagtactgctgcatgctgcggcaggggtgaaccctgatgcgttaggctgggctgggtgcggtggcgcacgccggtaatcccaacactttgggaggctgaggccagagggtcgcttcagccctggagttggaggttgcagtgagctatgattgcgccgccacactccattctgggtcacagagtggatcctgcctcaaaaagaaaaagaaaaggaaaacattcggctcagtgaaagaagccagacacaacaggccacacactaggtgatttcactcataggaaatgtccagaataagcaaatacatagacagaaaatagatgagtggtttcctgggtcttggggaatgggaagattggggtgataaaaatgtgctaaaattgtttgtggtgatggttgaacaactgtgaatatacgagaagccgttgaattgtacattgtaagtgggtgacttgttggtatgtggattatatctttataaggctgttaaacccaatggggggaagtgcaggcggtcctgatgaattcccactaccaaggttgtctgttgtcctgcccaccagtcatagacaaaggtgtccattttctcttgtcctcaccagtcctgatgtcagtcaaccttttgtcaatctggcgggtgaattgtagcgtctcattttagtttgtccttgttagagtagttgaaatttttttctttttttttttttttggagacagaagtcttgtgctgtgtcgcccaggctggaaggctggagtgcagtggcgtgatctcggctcactgcaacctctacctcccaagttcaagcagttcttctgcctcagcctcccgagtagctgggactgcaggcacccgcccgcacacctggctaattttttgtattttagtagagatgaggtttcaccatgttgcccaggctgctcttgaactcctgaactcaggcaatccacccaccttagcctcccaaagtgctaggattacaggcataagccactgcgcccagccagttgaacatttttaaattgatttcttagccatttgtatttcttttttttttttttttttgagactgagtctcactcagtcgcccaggctggagtacagtggcatgatctcagctcactgcaacctccacctcccaggtttaagagattgtcctgcctcagcctcccgagtagctgggactaaaaatacaaaaaatcccggctaattttttgtatttttagtagagacaaggtttcaccgtgttagccaggatggtctcgatctcctgacctcatgatctgcccgccctggcctcccaaagtgctgggattacaggtgtgagccactgtgcccggctggccatttgtatttctcttacgagctgtctatgtttattgcccaattttctattggatagtttgtttttttctcacttattggtgggaatttcttaaatagtgaaaaattcacatggtatctctttttaacaaagaattttgggacacaacatgcacatggtacacatgcagaccagaaggtgggtgcaccgcaggcctgtcccccaccctgcctgcgtctccttggcaccctccccacgggcgactctgggaatacacccacacatgctcatggtcctgccccatgtgcagctgctcccatcttgcattttttaaaaaacttaatcatgaagatttttctatattggtgtataaagagacggggccaggtgcattgtctcgctcctgtaatcccagcactttgagaggccaaggcagacagatcacttgaggtcaggagtttgagaccagcttggccaaggtggtgaaacccgcctctaccaaaaatacaaaaatacaaaatacaggtggctgacgctgtaatcccagctacttgggaggctgagacaggagaatcacttgaacctgggaggcagaggttgcgatgagccaagatgttgccactgcactccagcctgggtgacagagtgagactatctctaaataaataaataaataaataaataaataaatcaataaatcaataaagagatggggtcttgctctgtccctcaggctggagtggagtggtgcagtctcagctcactgcagccttgacctcctggtctcaagtgatcctcctgcctcagcctcccaagtagctgggattacaggtgcgtgccaccacgcccagccaatttttgtattttttttgtagagatggggttttgccacgttgcccaggctggtcttgaactcctgagctcaggcagttcgcctgcctcggtctcccaaagtgctgggattacaggcacgagccaacgcacccagcccctctcttttttttttttttttgagatggcgtcttgctctgttgcccaggctagagtgcagtggcacgatctcggctcactgcaacctcagacttccgggttcacaccattctcctgcctcagcctcccgagtagctgggaccacaggcgcccgccaccatgcccagctaatttttcatatttttagtagagacggggtttcaccgcgttagccaggatggtctcgatctcctgacctcgtgatccgcccaccttggcctcccaaagtgctgggattacaggcgtgagccaccgtgcctggcctctcttttttttttttttttttatggtggcatggtattccctgtagggatgaatcagagtttttttgtttgtttgtttgtttgttttgagatggagtctcgctctgtagccctggctggagtgcagtggcgcaatctcggctcattgcaacctctgcctcccaggttcaagcgattctcctgcctcagcctcctgagtagctgggattacaggcgtgtgccaccacgcccagctaattttgtatttttagtagacagggtttcggcatgttggtcaggatggtcttgaactcctgacctcaagtgatctaccactttggcctcccaaagtgctgagattacaggcatgagccactgcgcctggcctaccgttgacatttcttacacgtctttttaagcacatatgggaatttcttcaggagcttaggatgtgttcttcaaagtagagtctttgttgtgtgaggtgggttcagtcggtagtgggtagtgtaaacttgctttgttccatagtggtcctggttcacacccctccccttagggtgttagacttcttttttttttttgagatggagtctctctctgtcacccaggctggagtgcagtggcgcgatctcggctcactgcaacctctgcctcccaggttcaagcgattttcctgcctcagcctcccgagtagctgggactgtaggcactcgccaccatgcccagctaatttttgtatttttagtagagacagggtttcaccatgttggccaggatggtctcaatctcttgaccttgtgacccgcccgccttggtcttccaaagtgctgggattacaggcgtgagccaccgtgcctggccttttttttttttttttttttggggtggggtcttgctctgtccccaaggctggagtacagtggtgtgatctcagctcagtgcaacttctgactcccaggctcaagcaattcgcctggctcagcctcccgagtagctgggattccaggtgtgtgccaccatatccagctaatttttgtatttttagtggagacagggtttcaccatgttggccaggctggtctcgaactcctgacctcatgatctgtctgcctcagcctcccaaagtgctgggattacaggcgtgagccactgtgcctggccaggatgttagactttttggctccctggccatttgggtttctttttctgcaaataattatttttgtattttttatttattttttttatatagggtcttgctttgtcaccacactagagtgcagtggcctgatcatgggtcattgtagtctcaacctcctgggctgaagtaatccttctgcctcagcctcctcagtagctgggactacaggcacgcactaccacgcctggctgttttttttttgtagagacaaaaatctcactatgttgcccaggctggtcttgaactcctggcctcaagcaatcttcccaccttggcctcccaaagtgctggagttacagacctgagccaccatgcccggccagataattctttgacagataatcctgctgacatgaactagacttccttaagacacatcatagaatcaatagcccagaaccataaagagcctctacttgtaagtttagagtcattttaagtaaggtagaactggagatcataagagatatgtactcttataatttttgattgtatgtttgtttctttttgagacagagtctcactctgtttgcccatgctggagcacagtggcgcgatcatagtttgttgcagcctcaacctcccaggttcaagggatccttgcaactcagcctcctgagtagctgagaccacaagcgcatgctatcacactagctgatttgatttttttgtagagttggggtctcactaagttgcttaggctggtctcaaactcctggctgcaagtggtcctcccaccttggcctcccaaagcgctgggattacaggcaggaaccacggtgcttggccaacaatttgcatgcctttaccacattccccaaatgttaacatttcacctcattttcttatcagtctctttatgtataacatgcatatgttttctgaatcatttaaatgtaaattgtgacataatgccccttttcccctaaatatgtatttcctgagagtaagaatttcattatgtatttcctaaaagcaaaaatgttctctttcccagtcacacaaaattatcagactcaggaactcaacactgagttcttcctccagcacttgacaagaatcaaagtgttggttagtgactgctttgggggatggggcaggactggcagcaggtggcccgatggcctgggtggtttgcctgccagcgatgctggtgggcaagccctgcctggaagctcctctctcccacgtttttcctgccgcccagtagttagaccacctggagccagaggagggggcccacccggtttcccagcctgtccctccagagctgggctccatttctggaggtagagaatggggcaagtctgggcatcttgtgctctttgctaggggaggaaagggctgtggctgctttccttgtcccccatttcccttctgccagtggggccaagccccagcagctcagtcaggagaagaggatatggatctgtctgggcctctctctttaagagaaagttgattcgtgccttccggatagtcttgttccagggtttctaaactttctgatcccaccttcatgttaaaatgagttttgatcatgtgtctctttagtaatatggacattataaaataggaaaaaaaagtctcttaaagcctaagtagttaaaaatttattttcacatcaggcatagtggctcatgccagtaatcccagcacttttagaggccaaagtgggaagatcgcttgaggctggagttggagaccagtctgggcaatacagtgagaccttgtctctaaattaaaaaaaaaaaaaaaaaaaaaattggccaggcatggtggctcatgcctgtaatcccagcactttgggatgccaaggcaggtggatcacctgaggtcaggagttcaagaccagcctggccaacatggtgaaaccccattagcggggcgtggtggcgtgcccctgtagtcccagctacttgggaggctgaggcgggagaatcacttgaacccggaaggcagaggttgcagtgagccgagattgcgccattgcactccagcctgggtgacagagtgagactccgtctcaaaaaaaaaaagccagttgtggtgtgtgtttgtaatcccagggaggctgagaagggaggatcacttgagctggggaggtcagggttgcaatgagccagtgtaatccagcgtgggccacagagtgagattctgcctcaaaaacaaaaccaaaaatatataacgagttaaaatcctacagtaaagaggctactgttttattctggttaaaccttagggttccttctatcaaacttaaactagaattttttttttttcttgagatggagtcgccctctgtcgcccaggctggagtgcagcagcttactgcaatctctgcctcccgtgttgaagcgattctcctgcctcagcctcccgagtagctgggattacaggtgtgtgccaccactcccagctaacttttgtgtttttagtagatacaggctggtctcaaactcctgaccaggctggttgttggccaggctggtctcaaactcctgacctcaagtgatccgcccacctcagcctccaaaagtgctgggattacaggtgtgagcctctgtgcccagccaagaaattattttttatttttgagatagagtcttgcttcgtctgttgcccaggctggtgtgcagtggcgtgatcttggctcattgcaacttccacctcctggactcaggcaattctccttcctcagcttcctgagtagctgggagtacagacgtgtgccaccacgcccggctaatttttgtatttttagtagagatggggttttaccacgttttcccacattggccaggctggtcttgaactcctgacctcaggtgatccacccgtctcggcctaccaaagtgctgggattacaggcttgagccaccgtgcccagcttataaattattgttattatttattattatttttttgagatggaatctcagtctgtcgtcgaggctgtagtgcagtggcgcgatctcagctcactgcaacctccgcctcctggattcaaggatttctcctccctcagcctcctgagtagctgggatacaggcacgcaccaccacacctggctaatttttgtattttttagtagagacggggtttcaccacattgcccaggctggtctcgaactcatgacctatgatccacccaccttggtcccccaaagtgctgggattacaggcgtgagccactgtgcccggcctataaattattttttaaggcacaaagtctcataggtaatttttaatcagagtcaaaagtaggatggggggcactctagaaagtaaaactccttatactttgtgaaaacacagttttttgtcctgtatccctgcccagagaccacctctgcctcccccaccaactacatatgggggtcaaggttgaggccccctggtctaacgggagagacagttgccgtatgggtggtagcaaaactccttaagggttgtgatttttttttttttttttttttttgagttggagtctccgtgtgtcgcccaggctggagtccagtggtgcgatcttggctcactgcaacctccacctcctgggttcaagcgattctcctgcctcagccccccggagtagctgggactgcaggtgcccaccaccacgcccggctaatttctttttgtatttgtagtagagatgaggattcaccctgttggccaggctggtatggaactcctgaccttgtgctccgtccacctcggcctcccaaagtgctgggattacaggcatgagccacggcgcctggctgtgccttttttctcttaatgatgttttgtgcaccctagtccgtgtcaccgcaggtactcccacccaccacgtaaatgggcgggaggcgctctgttttctggatatgctctcacgtagctcattaatctcttattttaagttccttctgattctcactatgctgaatgccacagtgaaaattctaaattgtagtgtatgtcctgcattatttccttaggcgccgctgcacttcagcctgggtaacagagcaagatcctattaaaaaaaaaaaagcaaacatgcttatggtagtacattttaaaaacatagaagattggaaaattggaaaaatccccatcaaaaatagtaaataacttaaaaatagcaacattttgggtatgttaccttccaatattgttttctgtgtaatttttttggtctcattttgccggagttgtaatgtatatgtagttttgtatcatgatccttttttatttttttgagacaaggtctcgctctattgcccaggctggagtacagtggtgcgatctcagctcgctgcagcgtcaagctctgggacttaagtgatcctcctgcctcagcctcctgagtagctgggactacaggcatgtgccgccacaccctgctaattttttattaaagatgctccccctttccggggtcccgcctcctcctctgagctttggctctggcttccctgcctcccccagctgcctggtctgacaggagagaaggacagttacagtgtacagtgacaccaaaaacatgctgtattgattatagtttatttttttttcttgtagaggtgggttcatgctgtgttgcccaggttgttgtccaactcctgagccgagcgatccacctgccttggcctgtcaaatgctgggattacaggcatgagccacctcacttggccatgatcctttttcaacttgatcatacagctgtttgtaaatatcaccatctatggcaataacagaactgactgcttatccccctgagcattcaagttttctctaggtaggttttcattattgtgaatatgctgtgccaaacatcctttttttttttttttttttttttttgagacagagtctcactctgtcttcaggctggagtgcagtggcatgatctcagctcactgcagcctccgcttcccgggttcaagcaattctcctgcctcagcctcccgagtagctgagactataggcgttcaccaccacgcccggctaatttttgtatttttagtagagacggggtttcaccatgttggccaggatggtctcaatctcctgacctcgtgatctgcccacctcggcctcccaaagtgctgggattacaggcatgagccaccgcacccggcctgtgccaaacatctttgtgcactaaagccttttctgtatttagggttatttccttagggtcatggaagtggaattgttgcgctgcaagacctgtaaatacattatagagctttggatcaaagttacgaattctgcttcagaggatggtgctttcattctgactggtttaaaaggctgctttctttgaagacaagcgaagtgagtgggacacagcccaggcgcagaaggtgaaggctgggatctccgcatggtggctgccagccccctgcaagggaggtcatgagcgtgggagatgactccccagcccccagccctcctcatccttgtccctaagaagagagtgagagcaaaacttgtggctgcggtgcagacaagcctgcctctttctcatgcagatgtgatgtttcccacacagggaggcagtcagaaaccagcatatgcccttctgtcttcccagccagcagcccaggaagggcaggtgctttgaaggagaggcccctaaccccctttcacggacattcacagggagtcaaggtggacgcgagagaccacagtggagccacagcccggatgctggccaagcagtacggacacatgaagatcgtggccttgatggacacttactcgccctctctgcccaagagcctctatcggagcccaggtacccacacctgccagccgcgccctgctggggtctctggttgccttgagctttaggtgacctggcagagaaagatgtcccccgcttccccggctcccaccttctctgagatttggctctgcctcccccagctgcttacatgtcaaggttgaggcccctgctctaacaggagataaggatggttacgatggagagtggtacaaaaccaggctgttgtgaatgtagaggctttctgtagtatgcttgactaccgagtaggggcaggcccctcttagttttctgttttcactgtttcctgagctatggcttgttcattcttctatatgaacttgaatatcaacttgtctagctccttaaaaacagtattgatatttttactgagattgtgacaatgtataaattaactatatctttgtgttgttgtcttatccaagaacaagggatgacttcttgttccaatgtacttttgggtcttgcaggagggttttaaatttttcttcatctacattttgcatgtgacttaagtttattcctaagtgtttgatcatctttgtcgctattgtaaatggggttttccctatcattatatcctttttttccccccaactctcagggtattaattattcagtgctatttattttttatttcagtaggtttttggagaacaggtggtggttggatacgtgaataagtcctttagtggtgtcattatatcgtttcactgcatattgtcagtgcatttgaaggcagtggatttctgcaaacttttgttttttttttgatacgggagtttcgctcttgttgctcaggctggagtgcaatgaagcgatcttgcctcaccgcaacctcttcctcccaggttcaagcaattttgcctcagcctcccaggtagctgggattacaggcgtgcaccaccatgcccggctaattttttgtattttcagtagagatggggtttctccatgttggtcaggctggtctagaactcgcaacctcaggtgatccacccatctcagcctcccaaagtgctgggattacaggtgtgagccactgcactcagccctgcaaactaattttatattctgctaccttacagaattcttacattgttcaggttagttttgttattgattctttagggctttacaggtgtactaacatataatctttaagtatcgatggatacactgcttcctgctgattctcatgactctgactttgttgaattgcaccgttcttttgtttagttgctaacacctctagctcattgttcaacatagtggagatagtgagcctccttaccttggtcctgatcttagtggaaatgccacgttacatgagaggctgactgtaaaagggaaggcatatgttattttagcttattaacaaagtattcctcagttcttctattcctgagtggtgttttacaggagtaactattgaattgtgttcccatatctttggagacgatggtgaattttcatatggtagattgtcttcatgaacctcctaataatgaatcaaccttacattcttggcataaatcccacatgttgtactattttaatgtgtttttgaattctgtttattaatatttagtatttttctatggatattcagtcataagtgatactggtctatagttttctttcttctttttttttgtttttgaaatggagtcttgctctgttgcccaggctggactggagtggcgagatctcagctcactgcaacctccgcaacctccgcctcctgagttcaagcaattcttctgcctcagcctcccgagtagctgggatcacaggcgtgcaccactacacccagctaatttttgtatttttagtagagacggggtttcaccatgttggccaggctggtctcgaactcctgatctccagtgatccgcctgcctcagcctcccaaagtgctgggattacaggcgtgagccaccgctcccggcgtggtctatacttttctatttttgttctgtctatcaggtatgggtatcagtgtttacttcataaaaataatttggaagttttccttccttttttgtgttctaggacaatacacgtagcattagtgctacctggtcttagaagttttgatagaatcctcccatgaaaccatctggtctctttctgtgaggtggttcctcgataacagtttttctatttcttctatagagattggcctcctcatactttcttttcttatggggtcagttttggtaaattatattttcctgagagatcacttcatctaggatttcagacttatctgcagaggtctacaagataatattttctccctttttttttttttttttttgagacagagtttcactcttgttccccaggctggagtgcagtggctcgatcttgactcaccgcaacctctgcctcccgggttcaagtgattctcctgcctcagcgtcccaagtagatgggattacaggcatgcgctaccatgcctggataattttatgtttttagtagagacagggtttctccatgttggccgggctggtctcaaactcccgacctcaggtggtctgcccacctgggcctcccaaagtactgggattataggtgtgagccaccgcacccggccaatttttttctccttttaaaatattctgtttcagggccaggcgcggtggcttatgcctataatctcagcactttggaaggccgagttgggcggatcacctgaggtcgggagttcgagaccagcctgatcagtatggagaaaccccatctctactaaaaatataaaattagctgggcgtagtggtgcatgcctgtaatcccagctactcgggaggctgaggtgggagaatcccttgaacccgggaggcagaggttgaggtgagccgagatcgtgccattgcagtccagcctaggcaacaagagcgaaactctgtctcaaaaaaaaaaaaaaaaaaaaaattctgtttcaggctgggtgcagtggctcatgcctgtaatctcagcactttgggaggctgaggcgtgtggatcacttgaggtcaggagttcaagaccagcctggccaacatggtgaaaccccgtctccactaaaaatacaaaaataagccaatgtggtggtgtgcgccagctactctggaggctgaggcaggagaatcacttgaacccgggagggggagattgcagtaagccaaaatcacgccactgcactccagcttggcgacagagcgagactccatctcaaagaaaagtaaatagataaaataaaacaaaataaaatactctgtttcagtggttattttctcctgttattatctttttttggcatggaaaatattgatttattttttgtgacagggtcttgctttgtcacccaggctggagtccagtgacccaatctcgactcaatgcaacctccgcctcccaggctcaaaacgatccttctacctcagctctacgagtagctaggactgtaggtgcaccctaccacgcccagcttacgtttgtattttttgtagagaggtggttttgccatgttgaccaggctggtctcaagagtcctgagctcaagcaatccacccgcctcagcctcccaaagtgctgggactacaggcatgagctactgcacctgacctggaaaatatttatctcatttttaattgacacaaaataactacatatttatggggtacagtgtgtgatgttttgatacatgtatacactgtgtaatgatcaaattaaggtgattagcttatccatcacctcaaacatttatcatttcgaggtgagaacatttaaaatcatgtcttctagtagctattttgaggtataagctgttgttccgtatagtcactctactgtgaacaccagaacttctttcttcgatctgtaattttacacctattgaccaatctctcccactacctccccacccccaacctctgataatcactattctactctacatgtttgacatgagcttttaaaaatcctgtaaatgggtgacatcatgtagtcatgtagtcttttttgttgtttgtttggtttttgagacaggttctcgctttgtcacccaggctggagtgtggtggcataatcttggctcactgcagcctccaattcctgggctcaagtgatcctcctatctcagcctcccgagtagctggcactacaggcacctaccaccacacctggctaatgttttatttttttgtagagacggggtcttgctatactgaccaggttggttttgaactcctgggctcaagtgatcctctcgccttggcctcccagagtgttgggattacaagtgtgagtcaccacaacagctggcatttgtctttcttttctatgtctggcttattttactgaacatagtctcttccaggcttattcatgttgccacaaatgatcagatttcattctttatgtctgaataatattcaattgtgtatataaactcattttctgtcttcgttcatccactgatggacacaggttgattctctatctaggctactgtgaatactgcggcagtaaacatgagggtgtagacatctctttggtatactgatttcctttcttttggataaatacccagtagtggaattgctggatctcatttcttatattttttaatttttttttttttttgagatggagtttcgctcttgtttcctaggctggagtgcaatggcacgatcttggctcactgcaacctccacctcccgggttcaagcgattctcctgcctcagcctccctagtagctgggattacaggcatgtgccaccacgtctggctaattttgcatttttgggagagacagggtttctccatgttggtcagggtggtctcgaactcccgacataaggtggtccacccgactcggcctcccaaagtgctgggattacaggcatgaaccgctgcacccggcaaaaatttcttctattaaaaaaaatagagacagtgtctcagtatgttgcccaggctggtctcaaactcctgggcccaagcgatcctcccacctcagtctcccacagtgctgagattataggcatgagccactgcgcccggcctcacttcttattttgaatatttgtgtttgttctttttttttttttgagacagagtctcgctctgttgcccaggctggagtgcagtggcgcgatctcggctcactgcaacccccgcctcccaggttcaagcgattctcctgcctcagccttttgagtagctgggactacagggtgcccaccaccacacctggctaattttttttttgtatttttagtagagacagggtttcactgtgttagccaggatggtctcgatctcctcacctcgtgatctgcccacctcggcctcccaaactgctagaattacaggtgtgagccaccgtgcgcagcctcttcctttttttcttaagttaaatactagtactttgtctgtttagtggaaaaacaagaaaaacccatcggattttgatttattaatgagacctactgattgtctgtttaatttctgcttttatttttatttggcttactttgttgttctagttttttgagttggaaacttctttcattttcattgttgcccttttgttgctaaatgttagaggctgtgaatttttgctgattgctgctttaagtgtattctgggggttctgtatttaatactttccttgttatttttagaaattctgtaatttttatttatattttctccttcacccaggagttgtctaatagaagtattatgattgtttttgtttgttaatttctagatggaagggcctttttgatcttgcaattaatttctcatgttattctgattaactttaatgtgtctgatcagagagtgtttataattcttacatttacataacttccttgtcatcttatttatcatctactgatctatctatatatatatatatttttttcagatgtagtctcactctgtcacccaggctggagtgcccaagtgcgatcttgactcactgcaacctctgcctcccaggttcaagcgactctcctgcctcagcctcccgagtagttgggattccaggcatctgccaccacgcctggctcatttttttttgtatttttagtagggacagggtttcaccatgttggccaggttggtcttgaagtcctgacctcaagtgatccgcccacctcggcctcccaaagtgctgggattacaggcgtgagccaccgcgcccggccctgatcaatattttttagtgttccgtgttttgcttgagaagttgtattctctattatctgtatacagtttagcatatctgtgagtctatcttatttaggattatgtactcttagttcattttctacaaaattacctattagcgtgtttctgatttatgaaggaagttggtgcattttttggtgacagattttcataacttgttatagattcactgtgaattatggcttttagtattagaagtgtccttctggctgggcatggcccatacctgtaatccgagcactttgggaggccaaggcgggcagatcccctgaggtcaggagttcgagaccagtccagcctacatggtgaaaccttgtctctactcaaaatacacaaattagccaggcatggtggcacatacttacaatcccagctactcgggaggctgaggcaggagaatcacttgaacccgggaggcggaggttacaatgagccgagattgtgccactgcactccagcctaggtgacggagtgaaactctgtttcaaaaaaaaaaaaaaaaaagtgtccttccgtgtcatatttaatgtgttttgccctgaattccacgttgatagcaggattgcagccctggctcttttgtggtttccatctgcctgttctttttaagctgctctgagggtgtgttgggtgctgagattcacgcagctgccgttcccttgcttattgctgcctctttgcatttgtcttacagctccctccccttcagcttggatggaagcacagtctccctggagtgctatagatctttgagtgtgaggaggtgtgtgtccatatggctagctcagtcgccagagcttgagcctcgtcatggggaaggacagagtggcccacgttcagggcctgagctctccctctttgctggcctgccctgagttgtcctgtcagtttgcacctgagcgagcagctcctttctcagtgtcaggctcagcccagcctcttccctggcattgggattgtttcataataaacacagctcaggtggtaatgcaaaggacctttcccttcatttctgccccagcttacccactccacaaggagatctcatcatttcctcctgtatacaactcacgtatctcttaaaagtagaatcagatcagagccttatacaaatcaaatatgaaaaactgaaaagctacaaaataataaaagctctggtttgagctctgaaagctcagactgggaagtgatttgaaacagtttataatcatagcaaacacatgccatgctttagaaaatacaaaattgtggctgggcgctgtggctcactcctgtgatgccagcactttgtgggaggccaaggtgggcggatcacaaggtcaggagatcgagaccagcctggccaacatggtgaaaccccgtctctactaaaaatacaaaaacaagattagctgggcatggtggccgggtgcctgtagtcccagctacttgggagcctgaggcaggagagtggcgtgaacccaggaggtggagcttgcagtgagccgtgatcgcaccattgcactcctgcctgggtgacagagcaagactccgtctcaaaaaaataaagaaaaaaaaaagaaaatacagaattgcttaataagttgtttccagccgggcacagtggtaacgtgcctataatcccagcactttgcgaggctgaggtgggtggatcacctgaggtcaggagttcaagaccagcctaatatgatgaaaccccatctctactaaaatataaaaattagctgggtatggtggcatctgcctataattcccaactactcgggaggctgagataggagaattgcttgaacccaggaggcggaagttccagcctgggcagcaagagcaaaactccttctcaaaagaaaaaaaaaaaagttgtttccaaaggaagggattaggaaaaagtagttgtgacttatattaccatatattttaatgaagagatgggttttacttattcaaattagaacagaatttctgattatgaacaatacagacttatgaacaatttggcaaaccccaacagagataataaactcctggctgggcatggtggctcatgcctgtaatcccagcactttgggaggccaaggcaggcagatcaggagtttgagaccagcctggccaacatggcaaaagcctgtgtctactgaaaaagaaaagaaaaaaaacactgggcatggtggcacgcatctgtaaccgcagctacttggaagggtgaggcgtgagaatcgctagaacccaggaggcggaggttgcagtgagtgagccaagatcatgccattacacttcagctcgggggacagagtgagactctgtctcaagaaaaatgaaacttcccatcctcactaactttgcagctccctgtggcccattggagcagcgccccggcctgttagggcatttctcagaagtgatgccctggcagatacccttctccttaatttaacaaaaccggcgacagtcactttctttcagtttgccgtaaggattagtaaatgagtccattactgaacacactatcttaatcttggtgtttgatcacagaaaagtacgaagatctgagctcttctgacgagtcctgccctgct

SEQ ID NO: 10693 - DNA, 553 bp, Homo sapiens
tgaggtggagatttcagaggtagccagtgggaatagccaacaggtgggacgacaggcagacatctgtctttaggacaaagaccagccctggggacagacaccagaagagtaaatggagctgatgtgttatattcactgttctcatgtcacctgttaattctggaaagggacagtgttctacgcttagggatcggtgactcgtgcactgctcagggtttatcttcagcagggagtttttgcctggcggaacttgtctcttccaatcatctgactgtggcccacatcttgcagggagccgatatgtggatttactcccttgatggaagcagctgctgctggccatgagataatcgtgcagtattttctgaatcacggagtcaaggtggacgcgagagaccacagtggagccacagcccggatgctggccaagcagtacggacacatgaagatcgtggccttgatggacacttactcgccctctctgcccaagagcctctatcggagcccagaaaagtacgaagatctgagctcttctgacgagtcctgccctgct

SEQ ID NO: 10694 - DNA, 9401 bp, Homo sapiens
agcccgagggcggcgcaaggcctgaggcccagcacaggtgggttccgcggcggcccggccccagcacttgccggcacctgcagcccgcctagacccggcgctcgggcgtcccgcgctgcacttgctcgccgcgtgactggaggaccgagcccccacattttctttatgtggttgtggtgggggcacagtaatgccctgtgcgccgtagcgttcctgtggggatgtggccggggggcgtcgggaagcgtcactgctgtgagttacgggtttgtcggccagggacccgccccggggccagtgagctacctttgcgatgcggttccacggggcgagagggggtgcctgggtgctttcacagacctcctctgtgggcgtgacagttaccaccagcatcacatttgttaagatttttaaaaattttttaatttttgtgggtacgtagtaggtgtatatatttatggcgtatatgagagattttgatacaggcatgcagttcgtaataatcacatgtaaaatgggggtctccatcccttcaagcatttatcctttgtgttacaaacaatatgattatactctttgaattatttttaaatgtgcagccgggcgcggtggctcactcacgcctgtaatcctagcactttgggaggcaaaggcgggcggatcacctgaagtcaaggatttgagaccagcctggccaacatggggacacttcgtctctactaaacatacgaaaactaggctggcatggtggctcatacctgtaatctcagctactcgggaagctgaggcaggagaatcgcttgaacccaggaggcggaggttgcattgagccgagatcacgccgctgcactctagcctgggtaacagagtgagattatgtctcaaaaaaaataataataaataaataaaatgtgcaattagattatattgactatagtcaccctgttgtgcggtcaaatactagatctttttttttttttttttttttttgagacggagtctcgctttgtcgcccaggctggagtgcagtggcttgatcaaatactagatcttattcattctgttttttttgtatccattaagcatccccaccctccactacccttcccagccttggttacactagaagtaaccatccttctactttctatgtccatgagttcagttgttttgatttttagataaccacaaataattgagaacatgcaatatttatctttctgtgcctggcttatttcactaaacataacgatctccgcttccatccatgtttttgcaaatgataggatctcattctttttttatggctgaatagtactccattgtgtctaagtaccacattttctttaggattcactgtaaaggtaacagatacttagcattttcagaatggacagaaccaaaaagttgaatgaaaactaaaacgtcttatctctaatgctactttacaccacaccactcgggatgggacattttagttttcactttagtgttttttttttgtttttttttttgagacagaatttcgctctgttgcccaggctggagtgcagtggcttgagctcggctcactgcaatcgcctcccaggctcaagcgattctcttgcctcagcctcctgagtactgagactacaggcgcccaccaccacacccagctaatttttgtaattttagtaaagatgggagttcaccattttggccagggtggtctcgaactcctggcctcaagtggtccgtcacgcttggtctggttctcattgtccttcagacctctggggatgtcagatatgcaagtctccagtaaatagagaacacggcctcaccctgcaggaggcctttggcgtggaagagacatgcccagtgaaggcttgagggaggtatggaagggactctgaactgaccctcagctcgtttggtttcttatccaggcttcgttggccagggctgttagggtgggattctcacctgcaaagtgagggaagggcactgcacgatcttgggctctgctagctgaagaggtggtggctccaggaaggagggctttgcttgccccaccgcacctacacacactcttcaccaagggtctgtgaagtgttcgtctcccacattggtggcttgtttctttagccatcttggctgtcacctggggcttggaagcattctttaatagaaactgaggtcctcatcgcatctattaactaccatagcacctgtaggtcatcacaacctgacaaggcctttgttttcgcctttgctccctttcctacccttgtttcctggcactcttgtacctaaggattctactaggaagctgatgaccttgccttgatttggggattcctggtgtgccgttacccatgtaggcccatctcggggaaagtgttacctcaccagttcaccggcctgttatatttccccccatagctctctcttcaaaggatgcctaagtggattcctattcagttgacggttgctgcgtgccaccagtcacatcctggtttgtctgttggggaattgctttctatttttttcagaaaaatttatttttacttttttgaaattttcaatttcataaccattccagaaaaattaatttatatttaaaatttacaggccaggtgcagtggctcacgcctatatttccaggactttgagaggctgaggcgggcggatcacctgaggtgaggagttcgagaccagcctggccaacatggtgaaacccccgtctctactaaaaatacaaaaattagcctaacatgatggcgcacacctgtaatctcagctattcaggtggctgaggctcaagaagcccttaaacccaggaggcagaggttccagtgagctgaaatcatgccactgcactccagcctgggcaacagagcgagactgtctcaaaaaaataaataaaatttacatacagtaaaattcattttggtgttcagttctgtggtttcataaaggcatggagtcacagatccaccgtcacagtcatacaggtctatcgtcccccaaattccctctctgccccaacctccaaccctttaattttgccttttccagaatgtcatgtaagtgaaattatactgtaggcaggcttcttccatttagcgtaaatcatttgaaattcattcacgtgttgcatgtcaactgttggatccttgtgtttaatgctgagtagcatccattatatggatgtgccaccgtttgtttatccattcttttatgtatcataatagcagcctttttagatatgtccccgttagacagtgaggcactagggattggagttgctaagtagcagagctgcttttttgttgttttttttttttgttttgtttttggagacaaagtcttgctctgtttcccaggctggagtgcaatggcgtgatcttggctcaccgcaacctccgcctcctcagttcaagtgatgctcctacctcagcctcccgagtagctggccttcatgcccagctaatttttgtatttttagtagagacaggatttcaccatgttggccaggctggtcttgaactcttgacctcaagtgatctgcccaccttggcctcccaaagtgctgggattacaggtgtgagccaccgcaccgggtccaagctgaattttgatcaaaccccaaatccagggttcttccccaccacatcaaggaactgattgggttaaacaacccaattagcatttcttcactgcccatccaagaggttgtcaggttcctagagttggtggagaattctcttttacctggtgcctgcggttggaaggaggagcaggtactccacagttaatgcctcaccatatgtgctcctctttactggtgtgatagcaggctcaccagatttagcatggttgggactgcccaaagcatacattatttcagcaaataaatttgtctgagttactcccggggttgactgcactgggttatcagtctgctagtgcagtggtgtagcaggggcaggaccagcctgtttcatgccctggaacaaccagccaggaaagatctaacccttgggccttcctcctcagtgatgtccgagctcagcgatgaagccagcgagccggaactcctgaaccgcagcttgtccatgtggcacgggctcgggacacaggtcagcggggaggagctggatgtccccctggatcttcacacagctgcttccattggccagtatgaagtggtgaaggagtgtgtgcagcggtaagagatctcggggaacttcctctcacattttgagcagcgcagtgatggcttcgatcccacgtgatggggctttgcacacagttgtggatgtttaatgcgtgtagaataggttaacctgcttatctcaggcagctgtcagtaagtattgatgctgagccctgacaaagaggccgtttttattcctaggaagaaaaagagggagtaaactttgatcagaagcttataaacagtcattctttaaccagactaattttattcactaattgcagaaatgcccaaacaaacaagcaaaataaaaataaagacagaaagtgatggcctggtgcggtggctcacacttgtaattccagcactttgggaggctgagatgggcgggtcacttgaggtcaggagtttgagaccattctggataacatgatgaaaccccatctctactaaaaatataaaagttagctgggtgtggtggcatgtacctgtaatcccagctactcaggaggctgaggcaggagaatcgcttgaacccgggaggtggaggttacagtgagctgagattgcgccactgcactctagcctgggcaacagagtgagactctgtctcaaaaacaaaaaaaagaaaaaagaaagtgatccctggccttcttttcccggagggttcattcgatccctgtgatccctgttcccctctagcttctgccatggaggaggagagaggctgggctttcagtgcctctggggaatgacctcccgacgtcactgcccacctgccctttgctaatctgtgtacaatagttagagacaatataaagcccctggcagggtccatggctgcgtcttgcccatagtaggatgtgatcatcttgtttttggaaaagggtcgtctcctcacttccacccccttatgttccacacacagcctaactctgtctcctggttctcatttgatattgtggtgcagcgacctctcttcctctctctgcgtgcctcttccagttcccagtgagccaaagcaaagcattgctgaagccccaggtctccggttcccaagttgtggccctcacttagacatacccagcccatggagtgctggtgcaccttggtacagggtggtctgttgcgctccctccacaggaggctctaggcataggcagctgggtatgcagtcagtacggcccctcaaagggtcacgtttggaattctcaggctcttaagtctttgggtgtcctgttaagatgcagagtccataaccgctccatagaggagcagggggaggcgtttgtgttgtgatgggattttgacactagctgaggtggaggcttgctgatagtaagcacaggatggggcctgaggggagctgggggcatcagaaggaaggggtggggctgaacgaggagtggtaagagagccccagggagatgctctgctgttgtgtaaaggaagatagtgttaggacgagctgggtgcattcgagccctgctgcagaggcatctccatgcagcccccctggccaggggctgccactgaaccctggtatcaggaccttctggaatggctgcccaggtgtgcatcccagagtcactgagggctgccaggcaatggaaggtagttgcctgctgtggtctaatatgtgaatcccggctgggcgcggtggctcacgcctgtaatccagcactttgggaggctaaggcgggtggatcacgaggtcaggagatcgagaccatcctggctaacacggtgaaaccccatctctactaaaaatacaaaaaactagctgggcgtagtggcgggcgcctgtagtcccagctacttgggaggctgaggcaggagaatggcgtgaacttgggaggcggagcttgcagtgagccgagatcgcgccactgcactccagcctgggcgacagagcgagactctgtctcaaaaaaacaacaaaaaagtgaatcccgtaaaagggacagatcctggggttcagtcaccagttgttatcccctctgcaggcaagaactggggaagggaaagaaggcctgtgggcgttaaccatgtaggatcccaggtaaccatgcaagtgggtattattttaaatgtgactcccttgtcccaaccccagagtcgcagctaggaagcccacagttttttcccatgggaaaatgcattgccagaattttaacagcaatcagtgagaaagatgggattctttggtcacagatttttcaagaatgtttctttaaggtgaggtgacaaaggatgaatcagtggcggtgggacttgtccacggtggagtcccttctttcctcactgctcctctccacccagcagtgggctagtagatgccaggcctgtggtggtcagggtttttcaactgtggctgtgttgacaatccaggctggatcattctttgctgtgggggctgtcctggacactgtgggatgtttagcggcagccttggcctccagcagcccttccctgcccagttgtgagaaccaaaaatgccttcacacattgccacatattccctggttgagtgccatctgcctatctggtggtgtgaaagagcatagctggccttgggctaggaggatgcgaaatcagagcaaggagacgaaggctcagggcctcacaaggcagtgtacgagcaactgtcagcatttttctgcctgcctgcctccaatccccacaacgtccagggtggcagataacttctgcttcctgtcaactcatcccgcctggcctagcctcgccaccagctttggtgaaccccacatgcgaggcggctggccatgtctagcatatcttgcgtttgtttaggagagagttagatttgaataagaagaatggtggtggctggaccccgctgatgtatgcctcctacattggccacgacacaatcgtgcacctgctgcttgaggcgggggtgagtgtgaatgtgccgaccccagaagggcagactccactgatgctggcctccagctgtggcaacgagagcatcgcctactttcttctccaggtgagctacgagggaactcaggcccagaaacctgaggggctccgtggccaccctgacagagatgcgaaccactgcaggccacggtgttcgtgtgtgctcgtgtaatcacttctgattcttgcagcatggccgcctggagggcgcccgccccacgcagaggagatgaggccgtaacgcacgttctgtgttctcttgaagcaaggtgcagagctagaaatgaaagacatccagggctggacagccctcttccactgtaccagcgccgggcaccagcacatggtcaggttcctcttggacagtggagccaatgccaacgtgaggtgattgccacatctttagtggccacaggagtggcctaggtgtcatctgactctaaggagggtggctctggaggcagctaaccagagtttagggccaccctgcttcggcacgagaggctcaagatgaggggtaggaccagagtccttccaggcacaggccttttcgtacatctgtgagatgcatctcttcaagccctctcagcttccttttctttatctgaaacccacctgggtcatacagttgtaagaattacatgttttattgtatgccaggggcctaacatactgaatggcatttaaatgtcatacattacatgcaaattccttccattttcttgctttttgtatggatgaggtgaggtgatgctttgaaacagtcatgaggccgggcgtggtggctcacgcctgtgatcccagctctttgggaggccgaggtaggcagatcacgaggtcaggagatcgagaccatcctggctaacatggtgaaaccccatctctactaaaaatacgaaaaaattagctgggcatggtgacgggcgcctgtagtcccagctactcgggaggctgaggcaagagaatggtgtgaacccgggaggtggagcttgcagtgagccgagattgcaccactgcactccagcctgggtgacagagcaagactccatctcaaaaaaaaaaaaacaaaaacaacagtcatgagttttggccgggctcagtggctcacacctgtaatcctagcactctgggaggccaaggcgggcagatcatgaggtcaggagttcgagaccagtctggccaacatggtgaaaccccgtctctactaaaaatacaaaaattagctgggcgtggtggcaggtgcctgtaatcccagctactcgggagtctgaggcgggagaatcacttgaaaccagaaggcagaggttgcagtgaactgagagatcgtgccactgcactccagcctgagcaacaagagcaaaactctgtctcaaaaacaaacaaaaaaccagtcatgagttttataagttggaagtgggattgttgtctaaagcttgtcatgataataatcacctttgaacaaacgcagcgggtaccaatgcagcacccaccctggctgtcattcattctaagacacctgataattttgtatgccactaagaaagaaaaaatatgctactaattaacattcaactcgcctgttgatttaaagatgttttctgacttgagagatgttaaaatatgaacactgtgtgtcttaagatggatgaaaaccagcatttcccatgcatggttcctgacttccaaaccagcatgagacaaggagggatttggaagccctctgaagacagtgccgagttagcataaccaagcatgaaaagcaagcttcaggagctaagcgtggcaaagatagcttagatcattagtacttgaacttttcagagtgggttcatggaggacgttgaacttgaagccaggatttggatgaatggatgggagatgctggctttctgtgaggaattagaacagctttttgaatatgattgaggtggagatttcagaggtagccagtgggaatagccaacaggtgggacgacaggcagacatctgtctttaggacaaagaccagccctggggacagacaccagaagagtaaatggagctgatgtgttatattcactgttctcatgtcacctgttaattctggaaagggacagtgttctacgcttagggatcggtgactcgtgcactgctcagggtttatcttcagcagggagtttttgcctggcggaacttgtctcttccaatcatctgactgtggcccacatcttgcagggagccgatatgtggatttactcccttgatggaagcagct

SEQ ID NO: 10695 - DNA, 566 bp, Homo sapiens
agcccgagggcggcgcaaggcctgaggcccagcacagtgatgtccgagctcagcgatgaagccagcgagccggaactcctgaaccgcagcttgtccatgtggcacgggctcgggacacaggtcagcggggaggagctggatgtccccctggatcttcacacagctgcttccattggccagtatgaagtggtgaaggagtgtgtgcagcggagagagttagatttgaataagaagaatggtggtggctggaccccgctgatgtatgcctcctacattggccacgacacaatcgtgcacctgctgcttgaggcgggggtgagtgtgaatgtgccgaccccagaagggcagactccactgatgctggcctccagctgtggcaacgagagcatcgcctactttcttctccaggtgcagagctagaaatgaaagacatccagggctggacagccctcttccactgtaccagcgccgggcaccagcacatggtcaggttcctcttggacagtggagccaatgccaacgtgagggagccgatatgtggatttactcccttgatggaagcagct

SEQ ID NO: 10696 - DNA, 1053 bp, Homo sapiens
tgtcccctgtgcctgccaggaccttgccgcactgctggagcagatcgggtgtctgaagtacctgcaggtgtttgaggagcaggacgtggacctccgcatctttctgaccctcactgagagcgacctgaaggaaattggcatcacgtgcgtccagaagggccgctctggccctcagcccggggttggggcaaactcccactcatgtaagcgctcttgggacgctgaggcatatcctggtcacattccccccgcaggctgtttgggcccaagaggaagatgacgtccgccattgcccgctggcacagcagtgcccgcccacccggggatgccctggagctggcctacgccgaccggctggaggctgagatgcaggagctcgccatccagctgcacaaggtgagtggctgggtgggggatgggggggcagggtgacacccgtgagttggctccatctctgacagaaaaggtgggtgctgtgtggaggggtcaggtggatgcagtggggagagggccccacacacaggacagggccgtggccaagggtctggcttgaccggccacctcccagcctccccgcgccccccacccccctgcagcgctgcgaggaggtagaggccacgcggggccaggtgtgtcaggagcaggagctgcgcgccgtggtggagagctgcctgctggagcaggaccgcgcccgcgaggacctccaggcccggctgcgggagacgtgggccctggcccgggatgctgccctcgtcctggaccagctgcggtgagtggctctgagctgccctgggctgggtctccagtggtcagccacctggcccctgggcccccacacatcctttcctcctgattttgtaactgaggggtggatttcagggtctggagccaccccacccccatttcatcaggcccttccttcctgcaggcagacccaggcaggagttgggtccgggaatctgcaccggtcgccctcctgctctttagtgcagcctcatggggcactggcccagcccatgagggccagctgcaaggacagggctgagcccctcc

SEQ ID NO: 10697 - DNA, 853 bp, Homo sapiens
tgtcccctgtgcctgccaggaccttgccgcactgctggagcagatcgggtgtctgaagtacctgcaggtgtttgaggagcaggacgtggacctccgcatctttctgaccctcactgagagcgacctgaaggaaattggcatcacgtgcgtccagaagggccgctctggccctcagcccggggttggggcaaactcccactcatgtaagcgctcttgggacgctgaggcatatcctggtcacattccccccgcaggctgtttgggcccaagaggaagatgacgtccgccattgcccgctggcacagcagtgcccgcccacccggggatgccctggagctggcctacgccgaccggctggaggctgagatgcaggagctcgccatccagctgcacaagcgctgcgaggaggtagaggccacgcggggccaggtgtgtcaggagcaggagctgcgcgccgtggtggagagctgcctgctggagcaggaccgcgcccgcgaggacctccaggcccggctgcgggagacgtgggccctggcccgggatgctgccctcgtcctggaccagctgcggtgagtggctctgagctgccctgggctgggtctccagtggtcagccacctggcccctgggcccccacacatcctttcctcctgattttgtaactgaggggtggatttcagggtctggagccaccccacccccatttcatcaggcccttccttcctgcaggcagacccaggcaggagttgggtccgggaatctgcaccggtcgccctcctgctctttagtgcagcctcatggggcactggcccagcccatgagggccagctgcaaggacagggctgagcccctcc

SEQ ID NO: 10698 - DNA, 7878 bp, Homo sapiens
tctgacgagtcctgccctgctcctcagagacagaggccttgccggaagaagggtgtcagcatccacgagggaccgcgagccctggccaggatcacaggcattggcctgggcggcagagccccacggcctcgctatggtgagtggcccgcgtttcccgagggctctttctcattgcataccaggattttgtgttggcaagaatggaatagctcttaggctcctgaaatgtgggtcgctggacctcaggtggcagcgggacaggtggcccagctttcatgctcagggagactcaggattgagtcctgtgatggaaatgcattggtcacggactagctcttgttttttgctttatctcctggagtttccttttcgttggttaaatttaggaatagaactttctctcctgcagcagaaatgtagctaaggtcagatttcattcatcacataggtgggttggctcatacagggaggaggcaaagcgtgaagttcacttccctgccctgcccataccagctgggtcgggtgcgctgctgggggcaggaggccaagaaaacaggccctgctgttttctcagggcgatgaagttgtactcagaccctcctgagagagggcccgcttgttgacttgctggtgaagaatcctagcctttgggttttccagtctcgttcattctcagattcccagccccagggtgttgagcgttttgctcttggggagtgctggggtttctttttaggggagttgggtttggtgcctactctctattgctgtggtctgtcccagagctcagctggaggtgtgagttatgtcttcctttgatggctgtcacccactcatagccaggccaaggctgctggtctcacaggcctggtggctggtccttctcgggagcaaggcctctttgaggccaggacttggaagagtgagagtagacagtgtttcagccaggggtccaccagtaattgaattcccttctagaccccaggaacaagcagatgtgcagacttctgtcttcccaagcctgggtgctgggttgggaactggagacccaccttctcccatcatcctgggaagggtgagctgactgggccactgggaaggcctctctcgagctgctggccagccccaccacagcatgagggcccgcccgtgtcccgtccgctgagctgtgagcactggctctgggacaccgggctggtcgttctgagtggcagagtctcttccttccaaaaggtccctgccacctgctacagcctgaggtgtggtggggacaggaaggaagctgtcatcctggggctgagttggtaattaatctatatagctgtacaacaaatgctttaacaaaatcatacatgtctgaagccgcttgtgtgcggttctttgtatgtatccacagagaagtaatcatggtggtggtctcaggtgtggtatttcaggggatttttgttttctcataccttgtgaaatttaaattttctataagtgcatatattttatttgccagtaattaagaaatttggggccgggcgcagtggctcacgcctgtaatcccagcactttgggaggccgaggcaggtggatcaagagatccagaccatcctggccaacatggtgaaatcccatctttactaaaaatgcaaaaattagctgggcatggtagtacgtgcctataatcccagctactcgggaggctgaggcaggagaatcggttgaacccgggaggcggaggttgcagtgagccgagattgtgccactgcactccagtctggtgacagagcaagactccgtctcaaaaaaaaaaaaaaaaaattgggggggccaggtgcagtggcttatacctgtaatcccagcactttggaaggctgaggtaggaagattgcttgggctcaggagttgtgagaccagcctgggcaatgtagcaagaccctatctctacaaaaaattttgaaaattagccagatatggtggcccatgcctgtagccccagttacatgagaggctgaggtggaaggattgcttgagcccaggaggtcaaggctgtagtgacccatgatggtgccattgcattccagtctggataacacagcaagaccctgtctcaaaaacagtttagggggcaatgataaatagcatgtgctgattagaaaaacttctccataactaggaaaatacgtaaagaggaaagtaagttccccatggtcccatcaaccagtcctttgggttcttttttgagacagggtttcactgtagcccaggctggagtgcagtggcacgatcatagctcactgaaggctccagttcctgagctcaagcgatcctcctgtctcagcctcccaagtagctgagattacagacatgtgccaccgtgactggtcaagtcagtctttttatgtaaaggggcaaaactggagtgaaattgcctggtatacatgcccctttttctgcttggttttagaggcaggtagagttaggtaatttcatattattgttgttaatttttacctcaaggcctttttccttcctgctcagccaggtctctttttcgccggggttgactgaccagaggaggcccgctaagcgcctgtggttaaaggtcacagggacataaagacacgtggtcgatgggtgtctgtgtgaggtcattagctacctcctgctaaaaggaacactcatggtatagttttctctggtcaggcatctgtaaatacagctgaccatttgctacgttttccccttggaaaagaaatggagagggcccaggcttgacctggctgccagccctcgccccaccaggcacttgcttgggccactgactgaccctcagagcatcttttccacccacacaccacagatagagccatgccaggtcgcaggggcaagtaggtgaggtcatgactgggaagtcacctgcctccatcctgggcctcggcctctgaggaggtttcactttggagttccctgggcttatgggccccattctgtacacagagcaggctcctccccgtggctatgtcaccttcaacagcagtggcgagaaccccctggaagaagagggcctctgctgccgggatgtcacctcccccatcaatgagcgggatgtggagagcagcagcagcagcagcagtcggggtacgtgcacccccacccatccggcccgtggctcaggcaggtcctggagctcctgtgtgcccatccccacttatcccctgggcctggcgctggacacagccatccagcagaggacaggaaaggggtaggtgtggacggccctggttcttgtgaggaatgggagaagcttctggtccagcatccccgtgcggcttaagggagccgttccacagcaacaggtttagctccttgcttgggagcccctgaggctttcagggcaggccccagtaggaatgtctgttataactgcacctccgtgcagcagctgtttccatagtgcccaccgtgtgccaagcactgctccgggtgcttgggatttatcagtgaacaaaaaagacagaagccctgcccgtctgtatagaggggagggtttaggacaggcaggaagtttgaaatataaggaagcaaccgctgcaggccccaaggagtgccctggtggaggcggctcagcccggggcacgcccatgcgcagcacctcggtgagggctgcaggcggacgccctgtcttcccgccctcagaggaacatgctttctgtgccaacctggggcccgtccagagcagcagcagcagcgagggcctggccagagcccaggggctcagcagcgaagcttctgtggagagcaacgaggtacggattctttctttcttggtctcccatagccggtccctggctgggatgcctgacatcccccagttactttaagatgagcatgtatgtaagaagcagctgctgcacgtgtgtgctgcactgggacgtgctgtgtccagggtctggcttctcagacgacagcgaacgcaccggaagcccctgtgtggcgggtggggggtttcacgaagcctctcaagcccctgtgtggcgggtgggggtttcaccaaggctctcaagttagcccgcgcactctttcagatgcacgcctctcactgcaggactcggatcatgcctgtaaaagctcagctcgcaaacaagctaaaagttacatgaagaccaagaatcctgacagccagtggcctccccgcgctgcaactgacagggaaggctttctcgctgagtccagcccccagactcagagggccccctactcaggaccccaggtaagaccgcttgtgaaactggaggttacactcagagacggcactttttgtgacttaggaggcatgtgttgtgtatatgacgtgccaggcgctgctaggagaacagaatggcggtggcatccccatggcctgttaggctccacaggctcacagccggctccatggctggcagccccgctgcagcgcttctactctgttcctctccacggaaaggacctgtctccctgctttccatactggagttggcctccctgagcctggggagaagaaaagcacacttgacctcagagctgcctgcaggagtctgacaagatgtggttgaagcagagacaggaactacacacagtgtgtgcttggtgatggttacagctgccaccatcctcctcctttctgtggtccctctgaccacacattaccttagggatcagaggtgtgactcacagctcagctgtctcacctgtgtctgctgagttctcctaccctgtgtgggcagaagaggcacggagaggagaggcagagggaagctctggttggttatttggtttgtttgttcgagacggagtctcgcactgtcatctgggctggagtgcagtggcgcgatctcggctcactgcaacctcctcctcctgggttcaagcgattctcctgcctcagcctcccaagtagctgggattacaggcacccgccaccatgcccatctaattttttgtatttttagtagagacgggatttcactatgttggccaggctggtctcaaattcctgacatcgtgatccgcccgcctcgacctcccaaagtgctgggattacaggcgtgagccaccacacctggcctggtgccatgcccggcctggctggttatttgttaaagcactggctttgctgttcagtagagccttggatttgccggcttctccctgcagcccctggctcagtgagcaggcacacgtctcggtcccttcaacatacgttgagtggagtctggtcagggtagtgtcctaagtatgtttctttcagaaaatagcttgaagaaaatgtcagagtaacatttgtttgtccattaaaagcaataaactctcaaaagtaggatttctggagttgaaaagtaaatgaaatgaaaatatcactagacgagctcacagcagaattgagcaggcagaagagtcagacaacttgtgaacacaggtcacctgagatcatctcgcttgaggaacagaaagaatgagtaaaaaaaattaacagaaatctgtgatcccctcaagcacaccgacaccaccccatacagtggcattccagaaggagagcagaaacgatgggtgagaaacagcctgaccatctcagtggatcagaaacacggatcttacatccagggagctcggtgaactccagacaggtgaactcggagaagagctgcgcttagacaagtggaaatcagaacatccgacactgagactctagaattagagggcagcgctctccgcctacaaagcattgtcgagatcagcagctccatggtcccttcacagaactgagcatgtgtgggaggaggaggccagtttctggtgatgaacatacattgtccccacgtggccgaccatagtgtgaggactcacctgcctgcaacatcctgccctgcctgagccaccagagtaggaggggacagcctgggcgccacacacaaggcactgtcttggttctgagcctggggaagtggtggggctccgagtggaggaaaacgtctctgcttcgtcgtcagccactacctcccccaacctgtcccctgtgcctgccaggaccttgccgcactgctggagcagatcgggtgtctgaagtacctgcaggtgtttgaggagcaggacgtggacctccgcatctttctgaccctcactgagagcgacctgaaggaaattggcatcacgtgcgtccagaagggccgctctggccctcagcccggggttggggcaaactcccactcatgtaagcgctcttgggacgctgaggcatatcctggtcacattccccccgcaggctgtttgggcccaagaggaagatgacgtccgccattgcccgctggcacagcagtgcccgcccacccggggatgccctggagctggcctacgccgaccggctggaggctgagatgcaggagctcgccatccagctgcacaaggtgagtggctgggtgggggatgggggggcagggtgacacccgtgagttggctccatctctgacagaaaaggtgggtgctgtgtggaggggtcaggtggatgcagtggggagagggccccacacacaggacagggccgtggccaagggtctggcttgaccggccacctcccagcctccccgcgccccccacccccctgcagcgctgcgaggaggtagaggccacgcggggccaggtgtgtcaggagcaggagctgcgcgccgtggtggagagctgcctgctggagcaggaccgcgcccgcgaggacctccaggcccggctgcgggagacgtgggccctggcccgggatgctgccctcgtcctggaccagctgcggtgagtggctctgagctgccctgggctgggtctccagtggtcagccacctggcccctgggcccccacacatcctttcctcctgattttgtaactgaggggtggatttcagggtctggagccaccccacccccatttcatcaggcccttccttcctgcaggcagacccaggcaggagttgggtccgggaatctgcaccggtcgccctcctgctctttagtgcagcctcatggggcactggcccagcccatgagggccagctgcaaggacagggctgagcccctccctcccctagaaggtctgaggtgggggctctgcagcggccaggcctctgctctcaccaatatttgtttctgtgtctggcagagcctgtcaagctgagctgtcatctcgagtgaggcaggaccagccccctggtgcagccactctgggcctagccgtccccccagctggtaagagcagtggcctgactccgcactgggcagaggggaaggtgggggagccctgaagccaggtttgacccagtgggcttggcctggttctccggccggcagccactctcccaggtccctgtgtgcacatgatcccagagtccaaggaaaagagggggccctggggacccaagcccacttcctcacctgtgacaggaaaactgcctatcccccaggggtaggaggtactcgagaaaggccctgtgccttggctggctgtgctgtgctgagaccgccagtgacttctgtagcctccagccagggcccagacccgggtccccaccggcagagctttgccttctctcgggctgacccgggcctcgtagtgtttgctcagcctgtgggaggaagggcacaacagggcttccctgcctcggccttgggaggttgcttagacactgtcaggcgggtagggaggttctgatccaagcaggttctcctggttgcatgggctcagaataaagcagggcctgtggggacgcagacccccagctaactcggtccctgcacctgcaccacagactccaagggctggcaagcgtccctgcaggccatgagcctccccgagctctcgggagccctgga

SEQ ID NO: 10699 - DNA, 867 bp, Homo sapiens
tctgacgagtcctgccctgctcctcagagacagaggccttgccggaagaagggtgtcagcatccacgagggaccgcgagccctggccaggatcacaggcattggcctgggcggcagagccccacggcctcgctatgagcaggctcctccccgtggctatgtcaccttcaacagcagtggcgagaaccccctggaagaagagggcctctgctgccgggatgtcacctcccccatcaatgagcgggatgtggagagcagcagcagcagcagcagtcggggaccttgccgcactgctggagcagatcgggtgtctgaagtacctgcaggtgtttgaggagcaggacgtggacctccgcatctttctgaccctcactgagagcgacctgaaggaaattggcatcacgctgtttgggcccaagaggaagatgacgtccgccattgcccgctggcacagcagtgcccgcccacccggggatgccctggagctggcctacgccgaccggctggaggctgagatgcaggagctcgccatccagctgcacaagcgctgcgaggaggtagaggccacgcggggccaggtgtgtcaggagcaggagctgcgcgccgtggtggagagctgcctgctggagcaggaccgcgcccgcgaggacctccaggcccggctgcgggagacgtgggccctggcccgggatgctgccctcgtcctggaccagctgcgagcctgtcaagctgagctgtcatctcgagtgaggcaggaccagccccctggtgcagccactctgggcctagccgtccccccagctgactccaagggctggcaagcgtccctgcaggccatgagcctccccgagctctcgggagccctgga

SEQ ID NO: 10700 - DNA, 3792 bp, Homo sapiens
ctgggattacaggcacccgccaccatgcccatctaattttttgtatttttagtagagacgggatttcactatgttggccaggctggtctcaaattcctgacatcgtgatccgcccgcctcgacctcccaaagtgctgggattacaggcgtgagccaccacacctggcctggtgccatgcccggcctggctggttatttgttaaagcactggctttgctgttcagtagagccttggatttgccggcttctccctgcagcccctggctcagtgagcaggcacacgtctcggtcccttcaacatacgttgagtggagtctggtcagggtagtgtcctaagtatgtttctttcagaaaatagcttgaagaaaatgtcagagtaacatttgtttgtccattaaaagcaataaactctcaaaagtaggatttctggagttgaaaagtaaatgaaatgaaaatatcactagacgagctcacagcagaattgagcaggcagaagagtcagacaacttgtgaacacaggtcacctgagatcatctcgcttgaggaacagaaagaatgagtaaaaaaaattaacagaaatctgtgatcccctcaagcacaccgacaccaccccatacagtggcattccagaaggagagcagaaacgatgggtgagaaacagcctgaccatctcagtggatcagaaacacggatcttacatccagggagctcggtgaactccagacaggtgaactcggagaagagctgcgcttagacaagtggaaatcagaacatccgacactgagactctagaattagagggcagcgctctccgcctacaaagcattgtcgagatcagcagctccatggtcccttcacagaactgagcatgtgtgggaggaggaggccagtttctggtgatgaacatacattgtccccacgtggccgaccatagtgtgaggactcacctgcctgcaacatcctgccctgcctgagccaccagagtaggaggggacagcctgggcgccacacacaaggcactgtcttggttctgagcctggggaagtggtggggctccgagtggaggaaaacgtctctgcttcgtcgtcagccactacctcccccaacctgtcccctgtgcctgccaggaccttgccgcactgctggagcagatcgggtgtctgaagtacctgcaggtgtttgaggagcaggacgtggacctccgcatctttctgaccctcactgagagcgacctgaaggaaattggcatcacgtgcgtccagaagggccgctctggccctcagcccggggttggggcaaactcccactcatgtaagcgctcttgggacgctgaggcatatcctggtcacattccccccgcaggctgtttgggcccaagaggaagatgacgtccgccattgcccgctggcacagcagtgcccgcccacccggggatgccctggagctggcctacgccgaccggctggaggctgagatgcaggagctcgccatccagctgcacaaggtgagtggctgggtgggggatgggggggcagggtgacacccgtgagttggctccatctctgacagaaaaggtgggtgctgtgtggaggggtcaggtggatgcagtggggagagggccccacacacaggacagggccgtggccaagggtctggcttgaccggccacctcccagcctccccgcgccccccacccccctgcagcgctgcgaggaggtagaggccacgcggggccaggtgtgtcaggagcaggagctgcgcgccgtggtggagagctgcctgctggagcaggaccgcgcccgcgaggacctccaggcccggctgcgggagacgtgggccctggcccgggatgctgccctcgtcctggaccagctgcggtgagtggctctgagctgccctgggctgggtctccagtggtcagccacctggcccctgggcccccacacatcctttcctcctgattttgtaactgaggggtggatttcagggtctggagccaccccacccccatttcatcaggcccttccttcctgcaggcagacccaggcaggagttgggtccgggaatctgcaccggtcgccctcctgctctttagtgcagcctcatggggcactggcccagcccatgagggccagctgcaaggacagggctgagcccctccctcccctagaaggtctgaggtgggggctctgcagcggccaggcctctgctctcaccaatatttgtttctgtgtctggcagagcctgtcaagctgagctgtcatctcgagtgaggcaggaccagccccctggtgcagccactctgggcctagccgtccccccagctggtaagagcagtggcctgactccgcactgggcagaggggaaggtgggggagccctgaagccaggtttgacccagtgggcttggcctggttctccggccggcagccactctcccaggtccctgtgtgcacatgatcccagagtccaaggaaaagagggggccctggggacccaagcccacttcctcacctgtgacaggaaaactgcctatcccccaggggtaggaggtactcgagaaaggccctgtgccttggctggctgtgctgtgctgagaccgccagtgacttctgtagcctccagccagggcccagacccgggtccccaccggcagagctttgccttctctcgggctgacccgggcctcgtagtgtttgctcagcctgtgggaggaagggcacaacagggcttccctgcctcggccttgggaggttgcttagacactgtcaggcgggtagggaggttctgatccaagcaggttctcctggttgcatgggctcagaataaagcagggcctgtggggacgcagacccccagctaactcggtccctgcacctgcaccacagactccaagggctggcaagcgtccctgcaggccatgagcctccccgagctctcgggagccctggaggaccgtgtccgtgagatgggtgagtctccggggaccagacgactgagcgctccttttgtttccgagggaggcaaagggacccctttccagggaaagcgggtttgtgtctctctaccccaaggctgacctcggggctggggccataacgggtgaggggcaggtcacatcctgcagctgagaccccggggcagcaccacccagccctcctgagcctggccgggagaggctcaaggtcatcattcctcagggcaagcactgtgcttagtgacccagagcctggagaagctgcaggtgctgaacgggaagaagtggcgggagacctagcctgcgggccggtgagtgtctgccagcctggatcccgcgtggtgggagcagcagggcctgtctgggcggctgcaggtgtgggtatgcacccacctgtccccctcccttctcaccggggctttttctttcagaatctgacgttgggtgattggtccaccctgaagctgtgtgccagggagtgaggaggacagtgagcaggtagctgccatgtgcagcccaggcccagtgggggccagaggatcaggccccgggagcagccggcagacagaggcaagacgggggctgcggccctggctcggcagctcgggccagcactgaggcgggacgagggcctcacccagaacctcgtggtgaggcccagagttcatgggctgccctggcccataccaggcagggccctggggggaaagtgtatccatatacacgcacaggtgccaactgaggtgggaccttaggaatgaggactggggcacctggaaaatgccattttttggaaaataaaatttaagaacagct

SEQ ID NO: 10701 - DNA, 2210 bp, Homo sapiens
ctgggattacaggcacccgccaccatgcccatctaattttttgtatttttagtagagacgggatttcactatgttggccaggctggtctcaaattcctgacatcgtgatccgcccgcctcgacctcccaaagtgctgggattacaggcgtgagccaccacacctggcctggtgccatgcccggcctggctggttatttgttaaagcactggctttgctgttcagtagagccttggatttgccggcttctccctgcagcccctggctcagtgagcaggcacacgtctcggtcccttcaacatacgttgagtggagtctggtcagggtagtgtcctaagtatgtttctttcagaaaatagcttgaagaaaatgtcagagtaacatttgtttgtccattaaaagcaataaactctcaaaagtaggatttctggagttgaaaagtaaatgaaatgaaaatatcactagacgagctcacagcagaattgagcaggcagaagagtcagacaacttgtgaacacaggtcacctgagatcatctcgcttgaggaacagaaagaatgagtaaaaaaaattaacagaaatctgtgatcccctcaagcacaccgacaccaccccatacagtggcattccagaaggagagcagaaacgatgggtgagaaacagcctgaccatctcagtggatcagaaacacggatcttacatccagggagctcggtgaactccagacaggtgaactcggagaagagctgcgcttagacaagtggaaatcagaacatccgacactgagactctagaattagagggcagcgctctccgcctacaaagcattgtcgagatcagcagctccatggtcccttcacagaactgagcatgtgtgggaggaggaggccagtttctggtgatgaacatacattgtccccacgtggccgaccatagtgtgaggactcacctgcctgcaacatcctgccctgcctgagccaccagagtaggaggggacagcctgggcgccacacacaaggcactgtcttggttctgagcctggggaagtggtggggctccgagtggaggaaaacgtctctgcttcgtcgtcagccactacctcccccaacctgtcccctgtgcctgccaggaccttgccgcactgctggagcagatcgggtgtctgaagtacctgcaggtgtttgaggagcaggacgtggacctccgcatctttctgaccctcactgagagcgacctgaaggaaattggcatcacgctgtttgggcccaagaggaagatgacgtccgccattgcccgctggcacagcagtgcccgcccacccggggatgccctggagctggcctacgccgaccggctggaggctgagatgcaggagctcgccatccagctgcacaagcgctgcgaggaggtagaggccacgcggggccaggtgtgtcaggagcaggagctgcgcgccgtggtggagagctgcctgctggagcaggaccgcgcccgcgaggacctccaggcccggctgcgggagacgtgggccctggcccgggatgctgccctcgtcctggaccagctgcgagcctgtcaagctgagctgtcatctcgagtgaggcaggaccagccccctggtgcagccactctgggcctagccgtccccccagctgactccaagggctggcaagcgtccctgcaggccatgagcctccccgagctctcgggagccctggaggaccgtgtccgtgagatggggcaagcactgtgcttagtgacccagagcctggagaagctgcaggtgctgaacgggaagaagtggcgggagacctagcctgcgggccgaatctgacgttgggtgattggtccaccctgaagctgtgtgccagggagtgaggaggacagtgagcaggtagctgccatgtgcagcccaggcccagtgggggccagaggatcaggccccgggagcagccggcagacagaggcaagacgggggctgcggccctggctcggcagctcgggccagcactgaggcgggacgagggcctcacccagaacctcgtggtgaggcccagagttcatgggctgccctggcccataccaggcagggccctggggggaaagtgtatccatatacacgcacaggtgccaactgaggtgggaccttaggaatgaggactggggcacctggaaaatgccattttttggaaaataaaatttaagaacagct

SEQ ID NO: 10702 - DNA, 29005 bp, Homo sapiens
ggtgccccggcgagggagcgtggcggcgagctgtttggggggggttggcgacggcagcccgagggcggcgcaaggcctgaggcccagcacaggtgggttccgcggcggcccggccccagcacttgccggcacctgcagcccgcctagacccggcgctcgggcgtcccgcgctgcacttgctcgccgcgtgactggaggaccgagcccccacattttctttatgtggttgtggtgggggcacagtaatgccctgtgcgccgtagcgttcctgtggggatgtggccggggggcgtcgggaagcgtcactgctgtgagttacgggtttgtcggccagggacccgccccggggccagtgagctacctttgcgatgcggttccacggggcgagagggggtgcctgggtgctttcacagacctcctctgtgggcgtgacagttaccaccagcatcacatttgttaagatttttaaaaattttttaatttttgtgggtacgtagtaggtgtatatatttatggcgtatatgagagattttgatacaggcatgcagttcgtaataatcacatgtaaaatgggggtctccatcccttcaagcatttatcctttgtgttacaaacaatatgattatactctttgaattatttttaaatgtgcagccgggcgcggtggctcactcacgcctgtaatcctagcactttgggaggcaaaggcgggcggatcacctgaagtcaaggatttgagaccagcctggccaacatggggacacttcgtctctactaaacatacgaaaactaggctggcatggtggctcatacctgtaatctcagctactcgggaagctgaggcaggagaatcgcttgaacccaggaggcggaggttgcattgagccgagatcacgccgctgcactctagcctgggtaacagagtgagattatgtctcaaaaaaaataataataaataaataaaatgtgcaattagattatattgactatagtcaccctgttgtgcggtcaaatactagatctttttttttttttttttttttttgagacggagtctcgctttgtcgcccaggctggagtgcagtggcttgatcaaatactagatcttattcattctgttttttttgtatccattaagcatccccaccctccactacccttcccagccttggttacactagaagtaaccatccttctactttctatgtccatgagttcagttgttttgatttttagataaccacaaataattgagaacatgcaatatttatctttctgtgcctggcttatttcactaaacataacgatctccgcttccatccatgtttttgcaaatgataggatctcattctttttttatggctgaatagtactccattgtgtctaagtaccacattttctttaggattcactgtaaaggtaacagatacttagcattttcagaatggacagaaccaaaaagttgaatgaaaactaaaacgtcttatctctaatgctactttacaccacaccactcgggatgggacattttagttttcactttagtgttttttttttgtttttttttttgagacagaatttcgctctgttgcccaggctggagtgcagtggcttgagctcggctcactgcaatcgcctcccaggctcaagcgattctcttgcctcagcctcctgagtactgagactacaggcgcccaccaccacacccagctaatttttgtaattttagtaaagatgggagttcaccattttggccagggtggtctcgaactcctggcctcaagtggtccgtcacgcttggtctggttctcattgtccttcagacctctggggatgtcagatatgcaagtctccagtaaatagagaacacggcctcaccctgcaggaggcctttggcgtggaagagacatgcccagtgaaggcttgagggaggtatggaagggactctgaactgaccctcagctcgtttggtttcttatccaggcttcgttggccagggctgttagggtgggattctcacctgcaaagtgagggaagggcactgcacgatcttgggctctgctagctgaagaggtggtggctccaggaaggagggctttgcttgccccaccgcacctacacacactcttcaccaagggtctgtgaagtgttcgtctcccacattggtggcttgtttctttagccatcttggctgtcacctggggcttggaagcattctttaatagaaactgaggtcctcatcgcatctattaactaccatagcacctgtaggtcatcacaacctgacaaggcctttgttttcgcctttgctccctttcctacccttgtttcctggcactcttgtacctaaggattctactaggaagctgatgaccttgccttgatttggggattcctggtgtgccgttacccatgtaggcccatctcggggaaagtgttacctcaccagttcaccggcctgttatatttccccccatagctctctcttcaaaggatgcctaagtggattcctattcagttgacggttgctgcgtgccaccagtcacatcctggtttgtctgttggggaattgctttctatttttttcagaaaaatttatttttacttttttgaaattttcaatttcataaccattccagaaaaattaatttatatttaaaatttacaggccaggtgcagtggctcacgcctatatttccaggactttgagaggctgaggcgggcggatcacctgaggtgaggagttcgagaccagcctggccaacatggtgaaacccccgtctctactaaaaatacaaaaattagcctaacatgatggcgcacacctgtaatctcagctattcaggtggctgaggctcaagaagcccttaaacccaggaggcagaggttccagtgagctgaaatcatgccactgcactccagcctgggcaacagagcgagactgtctcaaaaaaataaataaaatttacatacagtaaaattcattttggtgttcagttctgtggtttcataaaggcatggagtcacagatccaccgtcacagtcatacaggtctatcgtcccccaaattccctctctgccccaacctccaaccctttaattttgccttttccagaatgtcatgtaagtgaaattatactgtaggcaggcttcttccatttagcgtaaatcatttgaaattcattcacgtgttgcatgtcaactgttggatccttgtgtttaatgctgagtagcatccattatatggatgtgccaccgtttgtttatccattcttttatgtatcataatagcagcctttttagatatgtccccgttagacagtgaggcactagggattggagttgctaagtagcagagctgcttttttgttgttttttttttttgttttgtttttggagacaaagtcttgctctgtttcccaggctggagtgcaatggcgtgatcttggctcaccgcaacctccgcctcctcagttcaagtgatgctcctacctcagcctcccgagtagctggccttcatgcccagctaatttttgtatttttagtagagacaggatttcaccatgttggccaggctggtcttgaactcttgacctcaagtgatctgcccaccttggcctcccaaagtgctgggattacaggtgtgagccaccgcaccgggtccaagctgaattttgatcaaaccccaaatccagggttcttccccaccacatcaaggaactgattgggttaaacaacccaattagcatttcttcactgcccatccaagaggttgtcaggttcctagagttggtggagaattctcttttacctggtgcctgcggttggaaggaggagcaggtactccacagttaatgcctcaccatatgtgctcctctttactggtgtgatagcaggctcaccagatttagcatggttgggactgcccaaagcatacattatttcagcaaataaatttgtctgagttactcccggggttgactgcactgggttatcagtctgctagtgcagtggtgtagcaggggcaggaccagcctgtttcatgccctggaacaaccagccaggaaagatctaacccttgggccttcctcctcagtgatgtccgagctcagcgatgaagccagcgagccggaactcctgaaccgcagcttgtccatgtggcacgggctcgggacacaggtcagcggggaggagctggatgtccccctggatcttcacacagctgcttccattggccagtatgaagtggtgaaggagtgtgtgcagcggtaagagatctcggggaacttcctctcacattttgagcagcgcagtgatggcttcgatcccacgtgatggggctttgcacacagttgtggatgtttaatgcgtgtagaataggttaacctgcttatctcaggcagctgtcagtaagtattgatgctgagccctgacaaagaggccgtttttattcctaggaagaaaaagagggagtaaactttgatcagaagcttataaacagtcattctttaaccagactaattttattcactaattgcagaaatgcccaaacaaacaagcaaaataaaaataaagacagaaagtgatggcctggtgcggtggctcacacttgtaattccagcactttgggaggctgagatgggcgggtcacttgaggtcaggagtttgagaccattctggataacatgatgaaaccccatctctactaaaaatataaaagttagctgggtgtggtggcatgtacctgtaatcccagctactcaggaggctgaggcaggagaatcgcttgaacccgggaggtggaggttacagtgagctgagattgcgccactgcactctagcctgggcaacagagtgagactctgtctcaaaaacaaaaaaaagaaaaaagaaagtgatccctggccttcttttcccggagggttcattcgatccctgtgatccctgttcccctctagcttctgccatggaggaggagagaggctgggctttcagtgcctctggggaatgacctcccgacgtcactgcccacctgccctttgctaatctgtgtacaatagttagagacaatataaagcccctggcagggtccatggctgcgtcttgcccatagtaggatgtgatcatcttgtttttggaaaagggtcgtctcctcacttccacccccttatgttccacacacagcctaactctgtctcctggttctcatttgatattgtggtgcagcgacctctcttcctctctctgcgtgcctcttccagttcccagtgagccaaagcaaagcattgctgaagccccaggtctccggttcccaagttgtggccctcacttagacatacccagcccatggagtgctggtgcaccttggtacagggtggtctgttgcgctccctccacaggaggctctaggcataggcagctgggtatgcagtcagtacggcccctcaaagggtcacgtttggaattctcaggctcttaagtctttgggtgtcctgttaagatgcagagtccataaccgctccatagaggagcagggggaggcgtttgtgttgtgatgggattttgacactagctgaggtggaggcttgctgatagtaagcacaggatggggcctgaggggagctgggggcatcagaaggaaggggtggggctgaacgaggagtggtaagagagccccagggagatgctctgctgttgtgtaaaggaagatagtgttaggacgagctgggtgcattcgagccctgctgcagaggcatctccatgcagcccccctggccaggggctgccactgaaccctggtatcaggaccttctggaatggctgcccaggtgtgcatcccagagtcactgagggctgccaggcaatggaaggtagttgcctgctgtggtctaatatgtgaatcccggctgggcgcggtggctcacgcctgtaatccagcactttgggaggctaaggcgggtggatcacgaggtcaggagatcgagaccatcctggctaacacggtgaaaccccatctctactaaaaatacaaaaaactagctgggcgtagtggcgggcgcctgtagtcccagctacttgggaggctgaggcaggagaatggcgtgaacttgggaggcggagcttgcagtgagccgagatcgcgccactgcactccagcctgggcgacagagcgagactctgtctcaaaaaaacaacaaaaaagtgaatcccgtaaaagggacagatcctggggttcagtcaccagttgttatcccctctgcaggcaagaactggggaagggaaagaaggcctgtgggcgttaaccatgtaggatcccaggtaaccatgcaagtgggtattattttaaatgtgactcccttgtcccaaccccagagtcgcagctaggaagcccacagttttttcccatgggaaaatgcattgccagaattttaacagcaatcagtgagaaagatgggattctttggtcacagatttttcaagaatgtttctttaaggtgaggtgacaaaggatgaatcagtggcggtgggacttgtccacggtggagtcccttctttcctcactgctcctctccacccagcagtgggctagtagatgccaggcctgtggtggtcagggtttttcaactgtggctgtgttgacaatccaggctggatcattctttgctgtgggggctgtcctggacactgtgggatgtttagcggcagccttggcctccagcagcccttccctgcccagttgtgagaaccaaaaatgccttcacacattgccacatattccctggttgagtgccatctgcctatctggtggtgtgaaagagcatagctggccttgggctaggaggatgcgaaatcagagcaaggagacgaaggctcagggcctcacaaggcagtgtacgagcaactgtcagcatttttctgcctgcctgcctccaatccccacaacgtccagggtggcagataacttctgcttcctgtcaactcatcccgcctggcctagcctcgccaccagctttggtgaaccccacatgcgaggcggctggccatgtctagcatatcttgcgtttgtttaggagagagttagatttgaataagaagaatggtggtggctggaccccgctgatgtatgcctcctacattggccacgacacaatcgtgcacctgctgcttgaggcgggggtgagtgtgaatgtgccgaccccagaagggcagactccactgatgctggcctccagctgtggcaacgagagcatcgcctactttcttctccaggtgagctacgagggaactcaggcccagaaacctgaggggctccgtggccaccctgacagagatgcgaaccactgcaggccacggtgttcgtgtgtgctcgtgtaatcacttctgattcttgcagcatggccgcctggagggcgcccgccccacgcagaggagatgaggccgtaacgcacgttctgtgttctcttgaagcaaggtgcagagctagaaatgaaagacatccagggctggacagccctcttccactgtaccagcgccgggcaccagcacatggtcaggttcctcttggacagtggagccaatgccaacgtgaggtgattgccacatctttagtggccacaggagtggcctaggtgtcatctgactctaaggagggtggctctggaggcagctaaccagagtttagggccaccctgcttcggcacgagaggctcaagatgaggggtaggaccagagtccttccaggcacaggccttttcgtacatctgtgagatgcatctcttcaagccctctcagcttccttttctttatctgaaacccacctgggtcatacagttgtaagaattacatgttttattgtatgccaggggcctaacatactgaatggcatttaaatgtcatacattacatgcaaattccttccattttcttgctttttgtatggatgaggtgaggtgatgctttgaaacagtcatgaggccgggcgtggtggctcacgcctgtgatcccagctctttgggaggccgaggtaggcagatcacgaggtcaggagatcgagaccatcctggctaacatggtgaaaccccatctctactaaaaatacgaaaaaattagctgggcatggtgacgggcgcctgtagtcccagctactcgggaggctgaggcaagagaatggtgtgaacccgggaggtggagcttgcagtgagccgagattgcaccactgcactccagcctgggtgacagagcaagactccatctcaaaaaaaaaaaaacaaaaacaacagtcatgagttttggccgggctcagtggctcacacctgtaatcctagcactctgggaggccaaggcgggcagatcatgaggtcaggagttcgagaccagtctggccaacatggtgaaaccccgtctctactaaaaatacaaaaattagctgggcgtggtggcaggtgcctgtaatcccagctactcgggagtctgaggcgggagaatcacttgaaaccagaaggcagaggttgcagtgaactgagagatcgtgccactgcactccagcctgagcaacaagagcaaaactctgtctcaaaaacaaacaaaaaaccagtcatgagttttataagttggaagtgggattgttgtctaaagcttgtcatgataataatcacctttgaacaaacgcagcgggtaccaatgcagcacccaccctggctgtcattcattctaagacacctgataattttgtatgccactaagaaagaaaaaatatgctactaattaacattcaactcgcctgttgatttaaagatgttttctgacttgagagatgttaaaatatgaacactgtgtgtcttaagatggatgaaaaccagcatttcccatgcatggttcctgacttccaaaccagcatgagacaaggagggatttggaagccctctgaagacagtgccgagttagcataaccaagcatgaaaagcaagcttcaggagctaagcgtggcaaagatagcttagatcattagtacttgaacttttcagagtgggttcatggaggacgttgaacttgaagccaggatttggatgaatggatgggagatgctggctttctgtgaggaattagaacagctttttgaatatgattgaggtggagatttcagaggtagccagtgggaatagccaacaggtgggacgacaggcagacatctgtctttaggacaaagaccagccctggggacagacaccagaagagtaaatggagctgatgtgttatattcactgttctcatgtcacctgttaattctggaaagggacagtgttctacgcttagggatcggtgactcgtgcactgctcagggtttatcttcagcagggagtttttgcctggcggaacttgtctcttccaatcatctgactgtggcccacatcttgcagggagccgatatgtggatttactcccttgatggaagcagctgctgctggccatgagataatcgtgcagtattttctgaatcacgtaagtgaccctgattattagcatgtaatgtagtcacggcaaatgaggaatcatattactgaagtataagctattacagaattttcctttgcacagaaataactttcattcatttattcaacacattttcattatctattgacgcccggtgttgagtggtgcttaggcattaaggatacagtggtgagtagaaatagacacctattcctgtaataattttgaaaatactatctgaaaattatggaaaaatattttaaaagtaaatagcactcataatcctgtcacttagaaaaattatatagaataagaaggcagagatcctcctctctttttcaacctccctgatgcccacttggtttgagaaagagctgccctaggacttttcctctgctgtggaaagatgtgtctgtaggcaagtgtgtgcacattgctttgtgttttgaacaaagtgggattctacgtatagtctgtaacttagagacatcttatagacatcttatctttgtacagtattccgtgtacaatctgcctcagttaatttaatgagtttcttattagtagaaacttagtttttaacattttgcaattataaacagtgttccgggaatatccttttacacatagctttaatacatttgcagttatttctgtatgttgtatttctgttttattttattaatttatttttttgagacatggtgttgccctgtatcccaggctggagttcagtggcgagatcgtggctcactgcagcttcagcctcctgggctcaagcgatcctcctgcctcagcccccaagtagctgggactacaggtgcatgctaccatgccccggctaattatttaattttttttttttggtagagttgggggtctcagtatgttgtgcaggctagtcttgaattcctgagctcaagcgatcacctcagcctcccaaagtgctgggatcacaggtgcaagcctgtccacacagaaccttgtacataaatattcatagcagtattattcataattgccaaaaagtagaaaaacccacaagtccatctactgaggaattgataaacaaaatatatatctgtatagcaggatattattcggccctacaaagtaatgcagtactgctgcatgctgcggcaggggtgaaccctgatgcgttaggctgggctgggtgcggtggcgcacgccggtaatcccaacactttgggaggctgaggccagagggtcgcttcagccctggagttggaggttgcagtgagctatgattgcgccgccacactccattctgggtcacagagtggatcctgcctcaaaaagaaaaagaaaaggaaaacattcggctcagtgaaagaagccagacacaacaggccacacactaggtgatttcactcataggaaatgtccagaataagcaaatacatagacagaaaatagatgagtggtttcctgggtcttggggaatgggaagattggggtgataaaaatgtgctaaaattgtttgtggtgatggttgaacaactgtgaatatacgagaagccgttgaattgtacattgtaagtgggtgacttgttggtatgtggattatatctttataaggctgttaaacccaatggggggaagtgcaggcggtcctgatgaattcccactaccaaggttgtctgttgtcctgcccaccagtcatagacaaaggtgtccattttctcttgtcctcaccagtcctgatgtcagtcaaccttttgtcaatctggcgggtgaattgtagcgtctcattttagtttgtccttgttagagtagttgaaatttttttctttttttttttttttggagacagaagtcttgtgctgtgtcgcccaggctggaaggctggagtgcagtggcgtgatctcggctcactgcaacctctacctcccaagttcaagcagttcttctgcctcagcctcccgagtagctgggactgcaggcacccgcccgcacacctggctaattttttgtattttagtagagatgaggtttcaccatgttgcccaggctgctcttgaactcctgaactcaggcaatccacccaccttagcctcccaaagtgctaggattacaggcataagccactgcgcccagccagttgaacatttttaaattgatttcttagccatttgtatttcttttttttttttttttttgagactgagtctcactcagtcgcccaggctggagtacagtggcatgatctcagctcactgcaacctccacctcccaggtttaagagattgtcctgcctcagcctcccgagtagctgggactaaaaatacaaaaaatcccggctaattttttgtatttttagtagagacaaggtttcaccgtgttagccaggatggtctcgatctcctgacctcatgatctgcccgccctggcctcccaaagtgctgggattacaggtgtgagccactgtgcccggctggccatttgtatttctcttacgagctgtctatgtttattgcccaattttctattggatagtttgtttttttctcacttattggtgggaatttcttaaatagtgaaaaattcacatggtatctctttttaacaaagaattttgggacacaacatgcacatggtacacatgcagaccagaaggtgggtgcaccgcaggcctgtcccccaccctgcctgcgtctccttggcaccctccccacgggcgactctgggaatacacccacacatgctcatggtcctgccccatgtgcagctgctcccatcttgcattttttaaaaaacttaatcatgaagatttttctatattggtgtataaagagacggggccaggtgcattgtctcgctcctgtaatcccagcactttgagaggccaaggcagacagatcacttgaggtcaggagtttgagaccagcttggccaaggtggtgaaacccgcctctaccaaaaatacaaaaatacaaaatacaggtggctgacgctgtaatcccagctacttgggaggctgagacaggagaatcacttgaacctgggaggcagaggttgcgatgagccaagatgttgccactgcactccagcctgggtgacagagtgagactatctctaaataaataaataaataaataaataaataaatcaataaatcaataaagagatggggtcttgctctgtccctcaggctggagtggagtggtgcagtctcagctcactgcagccttgacctcctggtctcaagtgatcctcctgcctcagcctcccaagtagctgggattacaggtgcgtgccaccacgcccagccaatttttgtattttttttgtagagatggggttttgccacgttgcccaggctggtcttgaactcctgagctcaggcagttcgcctgcctcggtctcccaaagtgctgggattacaggcacgagccaacgcacccagcccctctcttttttttttttttttgagatggcgtcttgctctgttgcccaggctagagtgcagtggcacgatctcggctcactgcaacctcagacttccgggttcacaccattctcctgcctcagcctcccgagtagctgggaccacaggcgcccgccaccatgcccagctaatttttcatatttttagtagagacggggtttcaccgcgttagccaggatggtctcgatctcctgacctcgtgatccgcccaccttggcctcccaaagtgctgggattacaggcgtgagccaccgtgcctggcctctcttttttttttttttttttatggtggcatggtattccctgtagggatgaatcagagtttttttgtttgtttgtttgtttgttttgagatggagtctcgctctgtagccctggctggagtgcagtggcgcaatctcggctcattgcaacctctgcctcccaggttcaagcgattctcctgcctcagcctcctgagtagctgggattacaggcgtgtgccaccacgcccagctaattttgtatttttagtagacagggtttcggcatgttggtcaggatggtcttgaactcctgacctcaagtgatctaccactttggcctcccaaagtgctgagattacaggcatgagccactgcgcctggcctaccgttgacatttcttacacgtctttttaagcacatatgggaatttcttcaggagcttaggatgtgttcttcaaagtagagtctttgttgtgtgaggtgggttcagtcggtagtgggtagtgtaaacttgctttgttccatagtggtcctggttcacacccctccccttagggtgttagacttcttttttttttttgagatggagtctctctctgtcacccaggctggagtgcagtggcgcgatctcggctcactgcaacctctgcctcccaggttcaagcgattttcctgcctcagcctcccgagtagctgggactgtaggcactcgccaccatgcccagctaatttttgtatttttagtagagacagggtttcaccatgttggccaggatggtctcaatctcttgaccttgtgacccgcccgccttggtcttccaaagtgctgggattacaggcgtgagccaccgtgcctggccttttttttttttttttttttggggtggggtcttgctctgtccccaaggctggagtacagtggtgtgatctcagctcagtgcaacttctgactcccaggctcaagcaattcgcctggctcagcctcccgagtagctgggattccaggtgtgtgccaccatatccagctaatttttgtatttttagtggagacagggtttcaccatgttggccaggctggtctcgaactcctgacctcatgatctgtctgcctcagcctcccaaagtgctgggattacaggcgtgagccactgtgcctggccaggatgttagactttttggctccctggccatttgggtttctttttctgcaaataattatttttgtattttttatttattttttttatatagggtcttgctttgtcaccacactagagtgcagtggcctgatcatgggtcattgtagtctcaacctcctgggctgaagtaatccttctgcctcagcctcctcagtagctgggactacaggcacgcactaccacgcctggctgttttttttttgtagagacaaaaatctcactatgttgcccaggctggtcttgaactcctggcctcaagcaatcttcccaccttggcctcccaaagtgctggagttacagacctgagccaccatgcccggccagataattctttgacagataatcctgctgacatgaactagacttccttaagacacatcatagaatcaatagcccagaaccataaagagcctctacttgtaagtttagagtcattttaagtaaggtagaactggagatcataagagatatgtactcttataatttttgattgtatgtttgtttctttttgagacagagtctcactctgtttgcccatgctggagcacagtggcgcgatcatagtttgttgcagcctcaacctcccaggttcaagggatccttgcaactcagcctcctgagtagctgagaccacaagcgcatgctatcacactagctgatttgatttttttgtagagttggggtctcactaagttgcttaggctggtctcaaactcctggctgcaagtggtcctcccaccttggcctcccaaagcgctgggattacaggcaggaaccacggtgcttggccaacaatttgcatgcctttaccacattccccaaatgttaacatttcacctcattttcttatcagtctctttatgtataacatgcatatgttttctgaatcatttaaatgtaaattgtgacataatgccccttttcccctaaatatgtatttcctgagagtaagaatttcattatgtatttcctaaaagcaaaaatgttctctttcccagtcacacaaaattatcagactcaggaactcaacactgagttcttcctccagcacttgacaagaatcaaagtgttggttagtgactgctttgggggatggggcaggactggcagcaggtggcccgatggcctgggtggtttgcctgccagcgatgctggtgggcaagccctgcctggaagctcctctctcccacgtttttcctgccgcccagtagttagaccacctggagccagaggagggggcccacccggtttcccagcctgtccctccagagctgggctccatttctggaggtagagaatggggcaagtctgggcatcttgtgctctttgctaggggaggaaagggctgtggctgctttccttgtcccccatttcccttctgccagtggggccaagccccagcagctcagtcaggagaagaggatatggatctgtctgggcctctctctttaagagaaagttgattcgtgccttccggatagtcttgttccagggtttctaaactttctgatcccaccttcatgttaaaatgagttttgatcatgtgtctctttagtaatatggacattataaaataggaaaaaaaagtctcttaaagcctaagtagttaaaaatttattttcacatcaggcatagtggctcatgccagtaatcccagcacttttagaggccaaagtgggaagatcgcttgaggctggagttggagaccagtctgggcaatacagtgagaccttgtctctaaattaaaaaaaaaaaaaaaaaaaaaattggccaggcatggtggctcatgcctgtaatcccagcactttgggatgccaaggcaggtggatcacctgaggtcaggagttcaagaccagcctggccaacatggtgaaaccccattagcggggcgtggtggcgtgcccctgtagtcccagctacttgggaggctgaggcgggagaatcacttgaacccggaaggcagaggttgcagtgagccgagattgcgccattgcactccagcctgggtgacagagtgagactccgtctcaaaaaaaaaaagccagttgtggtgtgtgtttgtaatcccagggaggctgagaagggaggatcacttgagctggggaggtcagggttgcaatgagccagtgtaatccagcgtgggccacagagtgagattctgcctcaaaaacaaaaccaaaaatatataacgagttaaaatcctacagtaaagaggctactgttttattctggttaaaccttagggttccttctatcaaacttaaactagaattttttttttttcttgagatggagtcgccctctgtcgcccaggctggagtgcagcagcttactgcaatctctgcctcccgtgttgaagcgattctcctgcctcagcctcccgagtagctgggattacaggtgtgtgccaccactcccagctaacttttgtgtttttagtagatacaggctggtctcaaactcctgaccaggctggttgttggccaggctggtctcaaactcctgacctcaagtgatccgcccacctcagcctccaaaagtgctgggattacaggtgtgagcctctgtgcccagccaagaaattattttttatttttgagatagagtcttgcttcgtctgttgcccaggctggtgtgcagtggcgtgatcttggctcattgcaacttccacctcctggactcaggcaattctccttcctcagcttcctgagtagctgggagtacagacgtgtgccaccacgcccggctaatttttgtatttttagtagagatggggttttaccacgttttcccacattggccaggctggtcttgaactcctgacctcaggtgatccacccgtctcggcctaccaaagtgctgggattacaggcttgagccaccgtgcccagcttataaattattgttattatttattattatttttttgagatggaatctcagtctgtcgtcgaggctgtagtgcagtggcgcgatctcagctcactgcaacctccgcctcctggattcaaggatttctcctccctcagcctcctgagtagctgggatacaggcacgcaccaccacacctggctaatttttgtattttttagtagagacggggtttcaccacattgcccaggctggtctcgaactcatgacctatgatccacccaccttggtcccccaaagtgctgggattacaggcgtgagccactgtgcccggcctataaattattttttaaggcacaaagtctcataggtaatttttaatcagagtcaaaagtaggatggggggcactctagaaagtaaaactccttatactttgtgaaaacacagttttttgtcctgtatccctgcccagagaccacctctgcctcccccaccaactacatatgggggtcaaggttgaggccccctggtctaacgggagagacagttgccgtatgggtggtagcaaaactccttaagggttgtgatttttttttttttttttttttttgagttggagtctccgtgtgtcgcccaggctggagtccagtggtgcgatcttggctcactgcaacctccacctcctgggttcaagcgattctcctgcctcagccccccggagtagctgggactgcaggtgcccaccaccacgcccggctaatttctttttgtatttgtagtagagatgaggattcaccctgttggccaggctggtatggaactcctgaccttgtgctccgtccacctcggcctcccaaagtgctgggattacaggcatgagccacggcgcctggctgtgccttttttctcttaatgatgttttgtgcaccctagtccgtgtcaccgcaggtactcccacccaccacgtaaatgggcgggaggcgctctgttttctggatatgctctcacgtagctcattaatctcttattttaagttccttctgattctcactatgctgaatgccacagtgaaaattctaaattgtagtgtatgtcctgcattatttccttaggcgccgctgcacttcagcctgggtaacagagcaagatcctattaaaaaaaaaaaagcaaacatgcttatggtagtacattttaaaaacatagaagattggaaaattggaaaaatccccatcaaaaatagtaaataacttaaaaatagcaacattttgggtatgttaccttccaatattgttttctgtgtaatttttttggtctcattttgccggagttgtaatgtatatgtagttttgtatcatgatccttttttatttttttgagacaaggtctcgctctattgcccaggctggagtacagtggtgcgatctcagctcgctgcagcgtcaagctctgggacttaagtgatcctcctgcctcagcctcctgagtagctgggactacaggcatgtgccgccacaccctgctaattttttattaaagatgctccccctttccggggtcccgcctcctcctctgagctttggctctggcttccctgcctcccccagctgcctggtctgacaggagagaaggacagttacagtgtacagtgacaccaaaaacatgctgtattgattatagtttatttttttttcttgtagaggtgggttcatgctgtgttgcccaggttgttgtccaactcctgagccgagcgatccacctgccttggcctgtcaaatgctgggattacaggcatgagccacctcacttggccatgatcctttttcaacttgatcatacagctgtttgtaaatatcaccatctatggcaataacagaactgactgcttatccccctgagcattcaagttttctctaggtaggttttcattattgtgaatatgctgtgccaaacatcctttttttttttttttttttttttttgagacagagtctcactctgtcttcaggctggagtgcagtggcatgatctcagctcactgcagcctccgcttcccgggttcaagcaattctcctgcctcagcctcccgagtagctgagactataggcgttcaccaccacgcccggctaatttttgtatttttagtagagacggggtttcaccatgttggccaggatggtctcaatctcctgacctcgtgatctgcccacctcggcctcccaaagtgctgggattacaggcatgagccaccgcacccggcctgtgccaaacatctttgtgcactaaagccttttctgtatttagggttatttccttagggtcatggaagtggaattgttgcgctgcaagacctgtaaatacattatagagctttggatcaaagttacgaattctgcttcagaggatggtgctttcattctgactggtttaaaaggctgctttctttgaagacaagcgaagtgagtgggacacagcccaggcgcagaaggtgaaggctgggatctccgcatggtggctgccagccccctgcaagggaggtcatgagcgtgggagatgactccccagcccccagccctcctcatccttgtccctaagaagagagtgagagcaaaacttgtggctgcggtgcagacaagcctgcctctttctcatgcagatgtgatgtttcccacacagggaggcagtcagaaaccagcatatgcccttctgtcttcccagccagcagcccaggaagggcaggtgctttgaaggagaggcccctaaccccctttcacggacattcacagggagtcaaggtggacgcgagagaccacagtggagccacagcccggatgctggccaagcagtacggacacatgaagatcgtggccttgatggacacttactcgccctctctgcccaagagcctctatcggagcccaggtacccacacctgccagccgcgccctgctggggtctctggttgccttgagctttaggtgacctggcagagaaagatgtcccccgcttccccggctcccaccttctctgagatttggctctgcctcccccagctgcttacatgtcaaggttgaggcccctgctctaacaggagataaggatggttacgatggagagtggtacaaaaccaggctgttgtgaatgtagaggctttctgtagtatgcttgactaccgagtaggggcaggcccctcttagttttctgttttcactgtttcctgagctatggcttgttcattcttctatatgaacttgaatatcaacttgtctagctccttaaaaacagtattgatatttttactgagattgtgacaatgtataaattaactatatctttgtgttgttgtcttatccaagaacaagggatgacttcttgttccaatgtacttttgggtcttgcaggagggttttaaatttttcttcatctacattttgcatgtgacttaagtttattcctaagtgtttgatcatctttgtcgctattgtaaatggggttttccctatcattatatcctttttttccccccaactctcagggtattaattattcagtgctatttattttttatttcagtaggtttttggagaacaggtggtggttggatacgtgaataagtcctttagtggtgtcattatatcgtttcactgcatattgtcagtgcatttgaaggcagtggatttctgcaaacttttgttttttttttgatacgggagtttcgctcttgttgctcaggctggagtgcaatgaagcgatcttgcctcaccgcaacctcttcctcccaggttcaagcaattttgcctcagcctcccaggtagctgggattacaggcgtgcaccaccatgcccggctaattttttgtattttcagtagagatggggtttctccatgttggtcaggctggtctagaactcgcaacctcaggtgatccacccatctcagcctcccaaagtgctgggattacaggtgtgagccactgcactcagccctgcaaactaattttatattctgctaccttacagaattcttacattgttcaggttagttttgttattgattctttagggctttacaggtgtactaacatataatctttaagtatcgatggatacactgcttcctgctgattctcatgactctgactttgttgaattgcaccgttcttttgtttagttgctaacacctctagctcattgttcaacatagtggagatagtgagcctccttaccttggtcctgatcttagtggaaatgccacgttacatgagaggctgactgtaaaagggaaggcatatgttattttagcttattaacaaagtattcctcagttcttctattcctgagtggtgttttacaggagtaactattgaattgtgttcccatatctttggagacgatggtgaattttcatatggtagattgtcttcatgaacctcctaataatgaatcaaccttacattcttggcataaatcccacatgttgtactattttaatgtgtttttgaattctgtttattaatatttagtatttttctatggatattcagtcataagtgatactggtctatagttttctttcttctttttttttgtttttgaaatggagtcttgctctgttgcccaggctggactggagtggcgagatctcagctcactgcaacctccgcaacctccgcctcctgagttcaagcaattcttctgcctcagcctcccgagtagctgggatcacaggcgtgcaccactacacccagctaatttttgtatttttagtagagacggggtttcaccatgttggccaggctggtctcgaactcctgatctccagtgatccgcctgcctcagcctcccaaagtgctgggattacaggcgtgagccaccgctcccggcgtggtctatacttttctatttttgttctgtctatcaggtatgggtatcagtgtttacttcataaaaataatttggaagttttccttccttttttgtgttctaggacaatacacgtagcattagtgctacctggtcttagaagttttgatagaatcctcccatgaaaccatctggtctctttctgtgaggtggttcctcgataacagtttttctatttcttctatagagattggcctcctcatactttcttttcttatggggtcagttttggtaaattatattttcctgagagatcacttcatctaggatttcagacttatctgcagaggtctacaagataatattttctccctttttttttttttttttttgagacagagtttcactcttgttccccaggctggagtgcagtggctcgatcttgactcaccgcaacctctgcctcccgggttcaagtgattctcctgcctcagcgtcccaagtagatgggattacaggcatgcgctaccatgcctggataattttatgtttttagtagagacagggtttctccatgttggccgggctggtctcaaactcccgacctcaggtggtctgcccacctgggcctcccaaagtactgggattataggtgtgagccaccgcacccggccaatttttttctccttttaaaatattctgtttcagggccaggcgcggtggcttatgcctataatctcagcactttggaaggccgagttgggcggatcacctgaggtcgggagttcgagaccagcctgatcagtatggagaaaccccatctctactaaaaatataaaattagctgggcgtagtggtgcatgcctgtaatcccagctactcgggaggctgaggtgggagaatcccttgaacccgggaggcagaggttgaggtgagccgagatcgtgccattgcagtccagcctaggcaacaagagcgaaactctgtctcaaaaaaaaaaaaaaaaaaaaaattctgtttcaggctgggtgcagtggctcatgcctgtaatctcagcactttgggaggctgaggcgtgtggatcacttgaggtcaggagttcaagaccagcctggccaacatggtgaaaccccgtctccactaaaaatacaaaaataagccaatgtggtggtgtgcgccagctactctggaggctgaggcaggagaatcacttgaacccgggagggggagattgcagtaagccaaaatcacgccactgcactccagcttggcgacagagcgagactccatctcaaagaaaagtaaatagataaaataaaacaaaataaaatactctgtttcagtggttattttctcctgttattatctttttttggcatggaaaatattgatttattttttgtgacagggtcttgctttgtcacccaggctggagtccagtgacccaatctcgactcaatgcaacctccgcctcccaggctcaaaacgatccttctacctcagctctacgagtagctaggactgtaggtgcaccctaccacgcccagcttacgtttgtattttttgtagagaggtggttttgccatgttgaccaggctggtctcaagagtcctgagctcaagcaatccacccgcctcagcctcccaaagtgctgggactacaggcatgagctactgcacctgacctggaaaatatttatctcatttttaattgacacaaaataactacatatttatggggtacagtgtgtgatgttttgatacatgtatacactgtgtaatgatcaaattaaggtgattagcttatccatcacctcaaacatttatcatttcgaggtgagaacatttaaaatcatgtcttctagtagctattttgaggtataagctgttgttccgtatagtcactctactgtgaacaccagaacttctttcttcgatctgtaattttacacctattgaccaatctctcccactacctccccacccccaacctctgataatcactattctactctacatgtttgacatgagcttttaaaaatcctgtaaatgggtgacatcatgtagtcatgtagtcttttttgttgtttgtttggtttttgagacaggttctcgctttgtcacccaggctggagtgtggtggcataatcttggctcactgcagcctccaattcctgggctcaagtgatcctcctatctcagcctcccgagtagctggcactacaggcacctaccaccacacctggctaatgttttatttttttgtagagacggggtcttgctatactgaccaggttggttttgaactcctgggctcaagtgatcctctcgccttggcctcccagagtgttgggattacaagtgtgagtcaccacaacagctggcatttgtctttcttttctatgtctggcttattttactgaacatagtctcttccaggcttattcatgttgccacaaatgatcagatttcattctttatgtctgaataatattcaattgtgtatataaactcattttctgtcttcgttcatccactgatggacacaggttgattctctatctaggctactgtgaatactgcggcagtaaacatgagggtgtagacatctctttggtatactgatttcctttcttttggataaatacccagtagtggaattgctggatctcatttcttatattttttaatttttttttttttttgagatggagtttcgctcttgtttcctaggctggagtgcaatggcacgatcttggctcactgcaacctccacctcccgggttcaagcgattctcctgcctcagcctccctagtagctgggattacaggcatgtgccaccacgtctggctaattttgcatttttgggagagacagggtttctccatgttggtcagggtggtctcgaactcccgacataaggtggtccacccgactcggcctcccaaagtgctgggattacaggcatgaaccgctgcacccggcaaaaatttcttctattaaaaaaaatagagacagtgtctcagtatgttgcccaggctggtctcaaactcctgggcccaagcgatcctcccacctcagtctcccacagtgctgagattataggcatgagccactgcgcccggcctcacttcttattttgaatatttgtgtttgttctttttttttttttgagacagagtctcgctctgttgcccaggctggagtgcagtggcgcgatctcggctcactgcaacccccgcctcccaggttcaagcgattctcctgcctcagccttttgagtagctgggactacagggtgcccaccaccacacctggctaattttttttttgtatttttagtagagacagggtttcactgtgttagccaggatggtctcgatctcctcacctcgtgatctgcccacctcggcctcccaaactgctagaattacaggtgtgagccaccgtgcgcagcctcttcctttttttcttaagttaaatactagtactttgtctgtttagtggaaaaacaagaaaaacccatcggattttgatttattaatgagacctactgattgtctgtttaatttctgcttttatttttatttggcttactttgttgttctagttttttgagttggaaacttctttcattttcattgttgcccttttgttgctaaatgttagaggctgtgaatttttgctgattgctgctttaagtgtattctgggggttctgtatttaatactttccttgttatttttagaaattctgtaatttttatttatattttctccttcacccaggagttgtctaatagaagtattatgattgtttttgtttgttaatttctagatggaagggcctttttgatcttgcaattaatttctcatgttattctgattaactttaatgtgtctgatcagagagtgtttataattcttacatttacataacttccttgtcatcttatttatcatctactgatctatctatatatatatatatttttttcagatgtagtctcactctgtcacccaggctggagtgcccaagtgcgatcttgactcactgcaacctctgcctcccaggttcaagcgactctcctgcctcagcctcccgagtagttgggattccaggcatctgccaccacgcctggctcatttttttttgtatttttagtagggacagggtttcaccatgttggccaggttggtcttgaagtcctgacctcaagtgatccgcccacctcggcctcccaaagtgctgggattacaggcgtgagccaccgcgcccggccctgatcaatattttttagtgttccgtgttttgcttgagaagttgtattctctattatctgtatacagtttagcatatctgtgagtctatcttatttaggattatgtactcttagttcattttctacaaaattacctattagcgtgtttctgatttatgaaggaagttggtgcattttttggtgacagattttcataacttgttatagattcactgtgaattatggcttttagtattagaagtgtccttctggctgggcatggcccatacctgtaatccgagcactttgggaggccaaggcgggcagatcccctgaggtcaggagttcgagaccagtccagcctacatggtgaaaccttgtctctactcaaaatacacaaattagccaggcatggtggcacatacttacaatcccagctactcgggaggctgaggcaggagaatcacttgaacccgggaggcggaggttacaatgagccgagattgtgccactgcactccagcctaggtgacggagtgaaactctgtttcaaaaaaaaaaaaaaaaaagtgtccttccgtgtcatatttaatgtgttttgccctgaattccacgttgatagcaggattgcagccctggctcttttgtggtttccatctgcctgttctttttaagctgctctgagggtgtgttgggtgctgagattcacgcagctgccgttcccttgcttattgctgcctctttgcatttgtcttacagctccctccccttcagcttggatggaagcacagtctccctggagtgctatagatctttgagtgtgaggaggtgtgtgtccatatggctagctcagtcgccagagcttgagcctcgtcatggggaaggacagagtggcccacgttcagggcctgagctctccctctttgctggcctgccctgagttgtcctgtcagtttgcacctgagcgagcagctcctttctcagtgtcaggctcagcccagcctcttccctggcattgggattgtttcataataaacacagctcaggtggtaatgcaaaggacctttcccttcatttctgccccagcttacccactccacaaggagatctcatcatttcctcctgtatacaactcacgtatctcttaaaagtagaatcagatcagagccttatacaaatcaaatatgaaaaactgaaaagctacaaaataataaaagctctggtttgagctctgaaagctcagactgggaagtgatttgaaacagtttataatcatagcaaacacatgccatgctttagaaaatacaaaattgtggctgggcgctgtggctcactcctgtgatgccagcactttgtgggaggccaaggtgggcggatcacaaggtcaggagatcgagaccagcctggccaacatggtgaaaccccgtctctactaaaaatacaaaaacaagattagctgggcatggtggccgggtgcctgtagtcccagctacttgggagcctgaggcaggagagtggcgtgaacccaggaggtggagcttgcagtgagccgtgatcgcaccattgcactcctgcctgggtgacagagcaagactccgtctcaaaaaaataaagaaaaaaaaaagaaaatacagaattgcttaataagttgtttccagccgggcacagtggtaacgtgcctataatcccagcactttgcgaggctgaggtgggtggatcacctgaggtcaggagttcaagaccagcctaatatgatgaaaccccatctctactaaaatataaaaattagctgggtatggtggcatctgcctataattcccaactactcgggaggctgagataggagaattgcttgaacccaggaggcggaagttccagcctgggcagcaagagcaaaactccttctcaaaagaaaaaaaaaaaagttgtttccaaaggaagggattaggaaaaagtagttgtgacttatattaccatatattttaatgaagagatgggttttacttattcaaattagaacagaatttctgattatgaacaatacagacttatgaacaatttggcaaaccccaacagagataataaactcctggctgggcatggtggctcatgcctgtaatcccagcactttgggaggccaaggcaggcagatcaggagtttgagaccagcctggccaacatggcaaaagcctgtgtctactgaaaaagaaaagaaaaaaaacactgggcatggtggcacgcatctgtaaccgcagctacttggaagggtgaggcgtgagaatcgctagaacccaggaggcggaggttgcagtgagtgagccaagatcatgccattacacttcagctcgggggacagagtgagactctgtctcaagaaaaatgaaacttcccatcctcactaactttgcagctccctgtggcccattggagcagcgccccggcctgttagggcatttctcagaagtgatgccctggcagatacccttctccttaatttaacaaaaccggcgacagtcactttctttcagtttgccgtaaggattagtaaatgagtccattactgaacacactatcttaatcttggtgtttgatcacagaaaagtacgaa

SEQ ID NO: 10703 - DNA, 561 bp, Homo sapiens
ggtgccccggcgagggagcgtggcggcgagctgtttggggggggttggcgacggcagcccgagggcggcgcaaggcctgaggcccagcacaggccaggtgcagtggctcacgcctatatttccaggactttgagaggctgaggcgggcggatcacctgagtgatgtccgagctcagcgatgaagccagcgagccggaactcctgaaccgcagcttgtccatgtggcacgggctcgggacacaggtcagcggggaggagctggatgtccccctggatcttcacacagctgcttccattggccagtatgaagtggtgaaggagtgtgtgcagcgggagccgatatgtggatttactcccttgatggaagcagctgctgctggccatgagataatcgtgcagtattttctgaatcacggagtcaaggtggacgcgagagaccacagtggagccacagcccggatgctggccaagcagtacggacacatgaagatcgtggccttgatggacacttactcgccctctctgcccaagagcctctatcggagcccagaaaagtacgaa

SEQ ID NO: 10704 - DNA, 9336 bp, Homo sapiens
cacaggtgggttccgcggcggcccggccccagcacttgccggcacctgcagcccgcctagacccggcgctcgggcgtcccgcgctgcacttgctcgccgcgtgactggaggaccgagcccccacattttctttatgtggttgtggtgggggcacagtaatgccctgtgcgccgtagcgttcctgtggggatgtggccggggggcgtcgggaagcgtcactgctgtgagttacgggtttgtcggccagggacccgccccggggccagtgagctacctttgcgatgcggttccacggggcgagagggggtgcctgggtgctttcacagacctcctctgtgggcgtgacagttaccaccagcatcacatttgttaagatttttaaaaattttttaatttttgtgggtacgtagtaggtgtatatatttatggcgtatatgagagattttgatacaggcatgcagttcgtaataatcacatgtaaaatgggggtctccatcccttcaagcatttatcctttgtgttacaaacaatatgattatactctttgaattatttttaaatgtgcagccgggcgcggtggctcactcacgcctgtaatcctagcactttgggaggcaaaggcgggcggatcacctgaagtcaaggatttgagaccagcctggccaacatggggacacttcgtctctactaaacatacgaaaactaggctggcatggtggctcatacctgtaatctcagctactcgggaagctgaggcaggagaatcgcttgaacccaggaggcggaggttgcattgagccgagatcacgccgctgcactctagcctgggtaacagagtgagattatgtctcaaaaaaaataataataaataaataaaatgtgcaattagattatattgactatagtcaccctgttgtgcggtcaaatactagatctttttttttttttttttttttttgagacggagtctcgctttgtcgcccaggctggagtgcagtggcttgatcaaatactagatcttattcattctgttttttttgtatccattaagcatccccaccctccactacccttcccagccttggttacactagaagtaaccatccttctactttctatgtccatgagttcagttgttttgatttttagataaccacaaataattgagaacatgcaatatttatctttctgtgcctggcttatttcactaaacataacgatctccgcttccatccatgtttttgcaaatgataggatctcattctttttttatggctgaatagtactccattgtgtctaagtaccacattttctttaggattcactgtaaaggtaacagatacttagcattttcagaatggacagaaccaaaaagttgaatgaaaactaaaacgtcttatctctaatgctactttacaccacaccactcgggatgggacattttagttttcactttagtgttttttttttgtttttttttttgagacagaatttcgctctgttgcccaggctggagtgcagtggcttgagctcggctcactgcaatcgcctcccaggctcaagcgattctcttgcctcagcctcctgagtactgagactacaggcgcccaccaccacacccagctaatttttgtaattttagtaaagatgggagttcaccattttggccagggtggtctcgaactcctggcctcaagtggtccgtcacgcttggtctggttctcattgtccttcagacctctggggatgtcagatatgcaagtctccagtaaatagagaacacggcctcaccctgcaggaggcctttggcgtggaagagacatgcccagtgaaggcttgagggaggtatggaagggactctgaactgaccctcagctcgtttggtttcttatccaggcttcgttggccagggctgttagggtgggattctcacctgcaaagtgagggaagggcactgcacgatcttgggctctgctagctgaagaggtggtggctccaggaaggagggctttgcttgccccaccgcacctacacacactcttcaccaagggtctgtgaagtgttcgtctcccacattggtggcttgtttctttagccatcttggctgtcacctggggcttggaagcattctttaatagaaactgaggtcctcatcgcatctattaactaccatagcacctgtaggtcatcacaacctgacaaggcctttgttttcgcctttgctccctttcctacccttgtttcctggcactcttgtacctaaggattctactaggaagctgatgaccttgccttgatttggggattcctggtgtgccgttacccatgtaggcccatctcggggaaagtgttacctcaccagttcaccggcctgttatatttccccccatagctctctcttcaaaggatgcctaagtggattcctattcagttgacggttgctgcgtgccaccagtcacatcctggtttgtctgttggggaattgctttctatttttttcagaaaaatttatttttacttttttgaaattttcaatttcataaccattccagaaaaattaatttatatttaaaatttacaggccaggtgcagtggctcacgcctatatttccaggactttgagaggctgaggcgggcggatcacctgaggtgaggagttcgagaccagcctggccaacatggtgaaacccccgtctctactaaaaatacaaaaattagcctaacatgatggcgcacacctgtaatctcagctattcaggtggctgaggctcaagaagcccttaaacccaggaggcagaggttccagtgagctgaaatcatgccactgcactccagcctgggcaacagagcgagactgtctcaaaaaaataaataaaatttacatacagtaaaattcattttggtgttcagttctgtggtttcataaaggcatggagtcacagatccaccgtcacagtcatacaggtctatcgtcccccaaattccctctctgccccaacctccaaccctttaattttgccttttccagaatgtcatgtaagtgaaattatactgtaggcaggcttcttccatttagcgtaaatcatttgaaattcattcacgtgttgcatgtcaactgttggatccttgtgtttaatgctgagtagcatccattatatggatgtgccaccgtttgtttatccattcttttatgtatcataatagcagcctttttagatatgtccccgttagacagtgaggcactagggattggagttgctaagtagcagagctgcttttttgttgttttttttttttgttttgtttttggagacaaagtcttgctctgtttcccaggctggagtgcaatggcgtgatcttggctcaccgcaacctccgcctcctcagttcaagtgatgctcctacctcagcctcccgagtagctggccttcatgcccagctaatttttgtatttttagtagagacaggatttcaccatgttggccaggctggtcttgaactcttgacctcaagtgatctgcccaccttggcctcccaaagtgctgggattacaggtgtgagccaccgcaccgggtccaagctgaattttgatcaaaccccaaatccagggttcttccccaccacatcaaggaactgattgggttaaacaacccaattagcatttcttcactgcccatccaagaggttgtcaggttcctagagttggtggagaattctcttttacctggtgcctgcggttggaaggaggagcaggtactccacagttaatgcctcaccatatgtgctcctctttactggtgtgatagcaggctcaccagatttagcatggttgggactgcccaaagcatacattatttcagcaaataaatttgtctgagttactcccggggttgactgcactgggttatcagtctgctagtgcagtggtgtagcaggggcaggaccagcctgtttcatgccctggaacaaccagccaggaaagatctaacccttgggccttcctcctcagtgatgtccgagctcagcgatgaagccagcgagccggaactcctgaaccgcagcttgtccatgtggcacgggctcgggacacaggtcagcggggaggagctggatgtccccctggatcttcacacagctgcttccattggccagtatgaagtggtgaaggagtgtgtgcagcggtaagagatctcggggaacttcctctcacattttgagcagcgcagtgatggcttcgatcccacgtgatggggctttgcacacagttgtggatgtttaatgcgtgtagaataggttaacctgcttatctcaggcagctgtcagtaagtattgatgctgagccctgacaaagaggccgtttttattcctaggaagaaaaagagggagtaaactttgatcagaagcttataaacagtcattctttaaccagactaattttattcactaattgcagaaatgcccaaacaaacaagcaaaataaaaataaagacagaaagtgatggcctggtgcggtggctcacacttgtaattccagcactttgggaggctgagatgggcgggtcacttgaggtcaggagtttgagaccattctggataacatgatgaaaccccatctctactaaaaatataaaagttagctgggtgtggtggcatgtacctgtaatcccagctactcaggaggctgaggcaggagaatcgcttgaacccgggaggtggaggttacagtgagctgagattgcgccactgcactctagcctgggcaacagagtgagactctgtctcaaaaacaaaaaaaagaaaaaagaaagtgatccctggccttcttttcccggagggttcattcgatccctgtgatccctgttcccctctagcttctgccatggaggaggagagaggctgggctttcagtgcctctggggaatgacctcccgacgtcactgcccacctgccctttgctaatctgtgtacaatagttagagacaatataaagcccctggcagggtccatggctgcgtcttgcccatagtaggatgtgatcatcttgtttttggaaaagggtcgtctcctcacttccacccccttatgttccacacacagcctaactctgtctcctggttctcatttgatattgtggtgcagcgacctctcttcctctctctgcgtgcctcttccagttcccagtgagccaaagcaaagcattgctgaagccccaggtctccggttcccaagttgtggccctcacttagacatacccagcccatggagtgctggtgcaccttggtacagggtggtctgttgcgctccctccacaggaggctctaggcataggcagctgggtatgcagtcagtacggcccctcaaagggtcacgtttggaattctcaggctcttaagtctttgggtgtcctgttaagatgcagagtccataaccgctccatagaggagcagggggaggcgtttgtgttgtgatgggattttgacactagctgaggtggaggcttgctgatagtaagcacaggatggggcctgaggggagctgggggcatcagaaggaaggggtggggctgaacgaggagtggtaagagagccccagggagatgctctgctgttgtgtaaaggaagatagtgttaggacgagctgggtgcattcgagccctgctgcagaggcatctccatgcagcccccctggccaggggctgccactgaaccctggtatcaggaccttctggaatggctgcccaggtgtgcatcccagagtcactgagggctgccaggcaatggaaggtagttgcctgctgtggtctaatatgtgaatcccggctgggcgcggtggctcacgcctgtaatccagcactttgggaggctaaggcgggtggatcacgaggtcaggagatcgagaccatcctggctaacacggtgaaaccccatctctactaaaaatacaaaaaactagctgggcgtagtggcgggcgcctgtagtcccagctacttgggaggctgaggcaggagaatggcgtgaacttgggaggcggagcttgcagtgagccgagatcgcgccactgcactccagcctgggcgacagagcgagactctgtctcaaaaaaacaacaaaaaagtgaatcccgtaaaagggacagatcctggggttcagtcaccagttgttatcccctctgcaggcaagaactggggaagggaaagaaggcctgtgggcgttaaccatgtaggatcccaggtaaccatgcaagtgggtattattttaaatgtgactcccttgtcccaaccccagagtcgcagctaggaagcccacagttttttcccatgggaaaatgcattgccagaattttaacagcaatcagtgagaaagatgggattctttggtcacagatttttcaagaatgtttctttaaggtgaggtgacaaaggatgaatcagtggcggtgggacttgtccacggtggagtcccttctttcctcactgctcctctccacccagcagtgggctagtagatgccaggcctgtggtggtcagggtttttcaactgtggctgtgttgacaatccaggctggatcattctttgctgtgggggctgtcctggacactgtgggatgtttagcggcagccttggcctccagcagcccttccctgcccagttgtgagaaccaaaaatgccttcacacattgccacatattccctggttgagtgccatctgcctatctggtggtgtgaaagagcatagctggccttgggctaggaggatgcgaaatcagagcaaggagacgaaggctcagggcctcacaaggcagtgtacgagcaactgtcagcatttttctgcctgcctgcctccaatccccacaacgtccagggtggcagataacttctgcttcctgtcaactcatcccgcctggcctagcctcgccaccagctttggtgaaccccacatgcgaggcggctggccatgtctagcatatcttgcgtttgtttaggagagagttagatttgaataagaagaatggtggtggctggaccccgctgatgtatgcctcctacattggccacgacacaatcgtgcacctgctgcttgaggcgggggtgagtgtgaatgtgccgaccccagaagggcagactccactgatgctggcctccagctgtggcaacgagagcatcgcctactttcttctccaggtgagctacgagggaactcaggcccagaaacctgaggggctccgtggccaccctgacagagatgcgaaccactgcaggccacggtgttcgtgtgtgctcgtgtaatcacttctgattcttgcagcatggccgcctggagggcgcccgccccacgcagaggagatgaggccgtaacgcacgttctgtgttctcttgaagcaaggtgcagagctagaaatgaaagacatccagggctggacagccctcttccactgtaccagcgccgggcaccagcacatggtcaggttcctcttggacagtggagccaatgccaacgtgaggtgattgccacatctttagtggccacaggagtggcctaggtgtcatctgactctaaggagggtggctctggaggcagctaaccagagtttagggccaccctgcttcggcacgagaggctcaagatgaggggtaggaccagagtccttccaggcacaggccttttcgtacatctgtgagatgcatctcttcaagccctctcagcttccttttctttatctgaaacccacctgggtcatacagttgtaagaattacatgttttattgtatgccaggggcctaacatactgaatggcatttaaatgtcatacattacatgcaaattccttccattttcttgctttttgtatggatgaggtgaggtgatgctttgaaacagtcatgaggccgggcgtggtggctcacgcctgtgatcccagctctttgggaggccgaggtaggcagatcacgaggtcaggagatcgagaccatcctggctaacatggtgaaaccccatctctactaaaaatacgaaaaaattagctgggcatggtgacgggcgcctgtagtcccagctactcgggaggctgaggcaagagaatggtgtgaacccgggaggtggagcttgcagtgagccgagattgcaccactgcactccagcctgggtgacagagcaagactccatctcaaaaaaaaaaaaacaaaaacaacagtcatgagttttggccgggctcagtggctcacacctgtaatcctagcactctgggaggccaaggcgggcagatcatgaggtcaggagttcgagaccagtctggccaacatggtgaaaccccgtctctactaaaaatacaaaaattagctgggcgtggtggcaggtgcctgtaatcccagctactcgggagtctgaggcgggagaatcacttgaaaccagaaggcagaggttgcagtgaactgagagatcgtgccactgcactccagcctgagcaacaagagcaaaactctgtctcaaaaacaaacaaaaaaccagtcatgagttttataagttggaagtgggattgttgtctaaagcttgtcatgataataatcacctttgaacaaacgcagcgggtaccaatgcagcacccaccctggctgtcattcattctaagacacctgataattttgtatgccactaagaaagaaaaaatatgctactaattaacattcaactcgcctgttgatttaaagatgttttctgacttgagagatgttaaaatatgaacactgtgtgtcttaagatggatgaaaaccagcatttcccatgcatggttcctgacttccaaaccagcatgagacaaggagggatttggaagccctctgaagacagtgccgagttagcataaccaagcatgaaaagcaagcttcaggagctaagcgtggcaaagatagcttagatcattagtacttgaacttttcagagtgggttcatggaggacgttgaacttgaagccaggatttggatgaatggatgggagatgctggctttctgtgaggaattagaacagctttttgaatatgattgaggtggagatttcagaggtagccagtgggaatagccaacaggtgggacgacaggcagacatctgtctttaggacaaagaccagccctggggacagacaccagaagagtaaatggagctgatgtgttatattcactgttctcatgtcacctgttaattctggaaagggacagtgttctacgcttagggatcggtgactcgtgcactgctcagggtttatcttcagcagggagtttttgcctggcggaacttgtctcttccaatcatctgactgtggcccacatcttgcagggagccg

SEQ ID NO: 10705 - DNA, 723 bp, Homo sapiens
cacaggtgggttccgcggcggcccggccccagcacttgccggcacctgcagcccgcctagacccggcgctcgggcgtcccgcgctgcacttgctcgccgcgtgactggaggaccgagcccccacattttctttatgtggttgtggtgggggcacagtaatgccctgtgcgccgtagcgttcctgtggggatgtggccggggggcgtcgggaagcgtcactgcttgatgtccgagctcagcgatgaagccagcgagccggaactcctgaaccgcagcttgtccatgtggcacgggctcgggacacaggtcagcggggaggagctggatgtccccctggatcttcacacagctgcttccattggccagtatgaagtggtgaaggagtgtgtgcagcggagagagttagatttgaataagaagaatggtggtggctggaccccgctgatgtatgcctcctacattggccacgacacaatcgtgcacctgctgcttgaggcgggggtgagtgtgaatgtgccgaccccagaagggcagactccactgatgctggcctccagctgtggcaacgagagcatcgcctactttcttctccagcaaggtgcagagctagaaatgaaagacatccagggctggacagccctcttccactgtaccagcgccgggcaccagcacatggtcaggttcctcttggacagtggagccaatgccaacgtgagggagccg

SEQ ID NO: 10706 - DNA, 2291 bp, Homo sapiens
cgacggcagcccgagggcggcgcaaggcctgaggcccagcacagtgatgtccgagctcagcgatgaagccagcgagccggaactcctgaaccgcagcttgtccatgtggcacgggctcgggacacaggtcagcggggaggagctggatgtccccctggatcttcacacagctgcttccattggccagtatgaagtggtgaaggagtgtgtgcagcggagagagttagatttgaataagaagaatggtggtggctggaccccgctgatgtatgcctcctacattggccacgacacaatcgtgcacctgctgcttgaggcgggggtgagtgtgaatgtgccgaccccagaagggcagactccactgatgctggcctccagctgtggcaacgagagcatcgcctactttcttctccagggagccgatatgtggatttactcccttgatggaagcagctgctgctggccatgagataatcgtgcagtattttctgaatcacggagtcaaggtggacgcgagagaccacagtggagccacagcccggatgctggccaagcagtacggacacatgaagatcgtggccttgatggacacttactcgccctctctgcccaagagcctctatcggagcccagaaaagtacgaagatctgagctcttctgacgagtcctgccctgctcctcagagacagaggccttgccggaagaagggtgtcagcatccacgagggaccgcgagccctggccaggatcacaggcattggcctgggcggcagagccccacggcctcgctatgagcaggctcctccccgtggctatgtcaccttcaacagcagtggcgagaaccccctggaagaagagggcctctgctgccgggatgtcacctcccccatcaatgagcgggatgtggagagcagcagcagcagcagcagtcgggaggaacatgctttctgtgccaacctggggcccgtccagagcagcagcagcagcgagggcctggccagagcccaggggctcagcagcgaagcttctgtggagagcaacgaggactcggatcatgcctgtaaaagctcagctcgcaaacaagctaaaagttacatgaagaccaagaatcctgacagccagtggcctccccgcgctgcaactgacagggaaggctttctcgctgagtccagcccccagactcagagggccccctactcaggaccccaggaccttgccgcactgctggagcagatcgggtgtctgaagtacctgcaggtgtttgaggagcaggacgtggacctccgcatctttctgaccctcactgagagcgacctgaaggaaattggcatcacgctgtttgggcccaagaggaagatgacgtccgccattgcccgctggcacagcagtgcccgcccacccggggatgccctggagctggcctacgccgaccggctggaggctgagatgcaggagctcgccatccagctgcacaagcgctgcgaggaggtagaggccacgcggggccaggtgtgtcaggagcaggagctgcgcgccgtggtggagagctgcctgctggagcaggaccgcgcccgcgaggacctccaggcccggctgcgggagacgtgggccctggcccgggatgctgccctcgtcctggaccagctgcgagcctgtcaagctgagctgtcatctcgagtgaggcaggaccagccccctggtgcagccactctgggcctagccgtccccccagctgactccaagggctggcaagcgtccctgcaggccatgagcctccccgagctctcgggagccctggaggaccgtgtccgtgagatggggcaagcactgtgcttagtgacccagagcctggagaagctgcaggtgctgaacgggaagaagtggcgggagacctagcctgcgggccgaatctgacgttgggtgattggtccaccctgaagctgtgtgccagggagtgaggaggacagtgagcaggtagctgccatgtgcagcccaggcccagtgggggccagaggatcaggccccgggagcagccggcagacagaggcaagacgggggctgcggccctggctcggcagctcgggccagcactgaggcgggacgagggcctcacccagaacctcgtggtgaggcccagagttcatgggctgccctggcccataccaggcagggccctggggggaaagtgtatccatatacacgcacaggtgccaactgaggtgggaccttaggaatgaggactggggcacctggaaaatgccattttttggaaaataaaatttaagaacagct

SEQ ID NO: 10707 - DNA, 4838 bp, Homo sapiens
ggcagcccgagggcggcgcaaggcctgaggcccagcacaggtgggttccgcggcggcccggccccagcacttgccggcacctgcagcccgcctagacccggcgctcgggcgtcccgcgctgcacttgctcgccgcgtgactggaggaccgagcccccacattttctttatgtggttgtggtgggggcacagtaatgccctgtgcgccgtagcgttcctgtggggatgtggccggggggcgtcgggaagcgtcactgctgtgagttacgggtttgtcggccagggacccgccccggggccagtgagctacctttgcgatgcggttccacggggcgagagggggtgcctgggtgctttcacagacctcctctgtgggcgtgacagttaccaccagcatcacatttgttaagatttttaaaaattttttaatttttgtgggtacgtagtaggtgtatatatttatggcgtatatgagagattttgatacaggcatgcagttcgtaataatcacatgtaaaatgggggtctccatcccttcaagcatttatcctttgtgttacaaacaatatgattatactctttgaattatttttaaatgtgcagccgggcgcggtggctcactcacgcctgtaatcctagcactttgggaggcaaaggcgggcggatcacctgaagtcaaggatttgagaccagcctggccaacatggggacacttcgtctctactaaacatacgaaaactaggctggcatggtggctcatacctgtaatctcagctactcgggaagctgaggcaggagaatcgcttgaacccaggaggcggaggttgcattgagccgagatcacgccgctgcactctagcctgggtaacagagtgagattatgtctcaaaaaaaataataataaataaataaaatgtgcaattagattatattgactatagtcaccctgttgtgcggtcaaatactagatctttttttttttttttttttttttgagacggagtctcgctttgtcgcccaggctggagtgcagtggcttgatcaaatactagatcttattcattctgttttttttgtatccattaagcatccccaccctccactacccttcccagccttggttacactagaagtaaccatccttctactttctatgtccatgagttcagttgttttgatttttagataaccacaaataattgagaacatgcaatatttatctttctgtgcctggcttatttcactaaacataacgatctccgcttccatccatgtttttgcaaatgataggatctcattctttttttatggctgaatagtactccattgtgtctaagtaccacattttctttaggattcactgtaaaggtaacagatacttagcattttcagaatggacagaaccaaaaagttgaatgaaaactaaaacgtcttatctctaatgctactttacaccacaccactcgggatgggacattttagttttcactttagtgttttttttttgtttttttttttgagacagaatttcgctctgttgcccaggctggagtgcagtggcttgagctcggctcactgcaatcgcctcccaggctcaagcgattctcttgcctcagcctcctgagtactgagactacaggcgcccaccaccacacccagctaatttttgtaattttagtaaagatgggagttcaccattttggccagggtggtctcgaactcctggcctcaagtggtccgtcacgcttggtctggttctcattgtccttcagacctctggggatgtcagatatgcaagtctccagtaaatagagaacacggcctcaccctgcaggaggcctttggcgtggaagagacatgcccagtgaaggcttgagggaggtatggaagggactctgaactgaccctcagctcgtttggtttcttatccaggcttcgttggccagggctgttagggtgggattctcacctgcaaagtgagggaagggcactgcacgatcttgggctctgctagctgaagaggtggtggctccaggaaggagggctttgcttgccccaccgcacctacacacactcttcaccaagggtctgtgaagtgttcgtctcccacattggtggcttgtttctttagccatcttggctgtcacctggggcttggaagcattctttaatagaaactgaggtcctcatcgcatctattaactaccatagcacctgtaggtcatcacaacctgacaaggcctttgttttcgcctttgctccctttcctacccttgtttcctggcactcttgtacctaaggattctactaggaagctgatgaccttgccttgatttggggattcctggtgtgccgttacccatgtaggcccatctcggggaaagtgttacctcaccagttcaccggcctgttatatttccccccatagctctctcttcaaaggatgcctaagtggattcctattcagttgacggttgctgcgtgccaccagtcacatcctggtttgtctgttggggaattgctttctatttttttcagaaaaatttatttttacttttttgaaattttcaatttcataaccattccagaaaaattaatttatatttaaaatttacaggccaggtgcagtggctcacgcctatatttccaggactttgagaggctgaggcgggcggatcacctgaggtgaggagttcgagaccagcctggccaacatggtgaaacccccgtctctactaaaaatacaaaaattagcctaacatgatggcgcacacctgtaatctcagctattcaggtggctgaggctcaagaagcccttaaacccaggaggcagaggttccagtgagctgaaatcatgccactgcactccagcctgggcaacagagcgagactgtctcaaaaaaataaataaaatttacatacagtaaaattcattttggtgttcagttctgtggtttcataaaggcatggagtcacagatccaccgtcacagtcatacaggtctatcgtcccccaaattccctctctgccccaacctccaaccctttaattttgccttttccagaatgtcatgtaagtgaaattatactgtaggcaggcttcttccatttagcgtaaatcatttgaaattcattcacgtgttgcatgtcaactgttggatccttgtgtttaatgctgagtagcatccattatatggatgtgccaccgtttgtttatccattcttttatgtatcataatagcagcctttttagatatgtccccgttagacagtgaggcactagggattggagttgctaagtagcagagctgcttttttgttgttttttttttttgttttgtttttggagacaaagtcttgctctgtttcccaggctggagtgcaatggcgtgatcttggctcaccgcaacctccgcctcctcagttcaagtgatgctcctacctcagcctcccgagtagctggccttcatgcccagctaatttttgtatttttagtagagacaggatttcaccatgttggccaggctggtcttgaactcttgacctcaagtgatctgcccaccttggcctcccaaagtgctgggattacaggtgtgagccaccgcaccgggtccaagctgaattttgatcaaaccccaaatccagggttcttccccaccacatcaaggaactgattgggttaaacaacccaattagcatttcttcactgcccatccaagaggttgtcaggttcctagagttggtggagaattctcttttacctggtgcctgcggttggaaggaggagcaggtactccacagttaatgcctcaccatatgtgctcctctttactggtgtgatagcaggctcaccagatttagcatggttgggactgcccaaagcatacattatttcagcaaataaatttgtctgagttactcccggggttgactgcactgggttatcagtctgctagtgcagtggtgtagcaggggcaggaccagcctgtttcatgccctggaacaaccagccaggaaagatctaacccttgggccttcctcctcagtgatgtccgagctcagcgatgaagccagcgagccggaactcctgaaccgcagcttgtccatgtggcacgggctcgggacacaggtcagcggggaggagctggatgtccccctggatcttcacacagctgcttccattggccagtatgaagtggtgaaggagtgtgtgcagcggtaagagatctcggggaacttcctctcacattttgagcagcgcagtgatggcttcgatcccacgtgatggggctttgcacacagttgtggatgtttaatgcgtgtagaataggttaacctgcttatctcaggcagctgtcagtaagtattgatgctgagccctgacaaagaggccgtttttattcctaggaagaaaaagagggagtaaactttgatcagaagcttataaacagtcattctttaaccagactaattttattcactaattgcagaaatgcccaaacaaacaagcaaaataaaaataaagacagaaagtgatggcctggtgcggtggctcacacttgtaattccagcactttgggaggctgagatgggcgggtcacttgaggtcaggagtttgagaccattctggataacatgatgaaaccccatctctactaaaaatataaaagttagctgggtgtggtggcatgtacctgtaatcccagctactcaggaggctgaggcaggagaatcgcttgaacccgggaggtggaggttacagtgagctgagattgcgccactgcactctagcctgggcaacagagtgagactctgtctcaaaaacaaaaaaaagaaaaaa

SEQ ID NO: 10708 - DNA, 834 bp, Homo sapiens
ggcagcccgagggcggcgcaaggcctgaggcccagcacagtgatgtccgagctcagcgatgaagccagcgagccggaactcctgaaccgcagcttgtccatgtggcacgggctcgggacacaggtcagcggggaggagctggatgtccccctggatcttcacacagctgcttccattggccagtatgaagtggtgaaggagtgtgtgcagcggtaagagatctcggggaacttcctctcacattttgagcagcgcagtgatggcttcgatcccacgtgatggggctttgcacacagttgtggatgtttaatgcgtgtagaataggttaacctgcttatctcaggcagctgtcagtaagtattgatgctgagccctgacaaagaggccgtttttattcctaggaagaaaaagagggagtaaactttgatcagaagcttataaacagtcattctttaaccagactaattttattcactaattgcagaaatgcccaaacaaacaagcaaaataaaaataaagacagaaagtgatggcctggtgcggtggctcacacttgtaattccagcactttgggaggctgagatgggcgggtcacttgaggtcaggagtttgagaccattctggataacatgatgaaaccccatctctactaaaaatataaaagttagctgggtgtggtggcatgtacctgtaatcccagctactcaggaggctgaggcaggagaatcgcttgaacccgggaggtggaggttacagtgagctgagattgcgccactgcactctagcctgggcaacagagtgagactctgtctcaaaaacaaaaaaaagaaaaaa

SEQ ID NO: 10709 - DNA, 2198 bp, Homo sapiens
cgggggcggtgccccggcgagggagcgtggcggcgagctgtttggggggggttggcgacggcagcccgagggcggcgcaaggcctgaggcccagcacagtgatgtccgagctcagcgatgaagccagcgagccggaactcctgaaccgcagcttgtccatgtggcacgggctcgggacacaggtcagcggggaggagctggatgtccccctggatcttcacacagctgcttccattggccagtatgaagtggtgaaggagtgtgtgcagcgggagtcaaggtggacgcgagagaccacagtggagccacagcccggatgctggccaagcagtacggacacatgaagatcgtggccttgatggacacttactcgccctctctgcccaagagcctctatcggagcccagaaaagtacgaagatctgagctcttctgacgagtcctgccctgctcctcagagacagaggccttgccggaagaagggtgtcagcatccacgagggaccgcgagccctggccaggatcacaggcattggcctgggcggcagagccccacggcctcgctatgagcaggctcctccccgtggctatgtcaccttcaacagcagtggcgagaaccccctggaagaagagggcctctgctgccgggatgtcacctcccccatcaatgagcgggatgtggagagcagcagcagcagcagcagtcgggaggaacatgctttctgtgccaacctggggcccgtccagagcagcagcagcagcgagggcctggccagagcccaggggctcagcagcgaagcttctgtggagagcaacgaggactcggatcatgcctgtaaaagctcagctcgcaaacaagctaaaagttacatgaagaccaagaatcctgacagccagtggcctccccgcgctgcaactgacagggaaggctttctcgctgagtccagcccccagactcagagggccccctactcaggaccccaggtaagaccgcttgtgaaactggaggttacactcagagacggcactttttgtgacttaggaggcatgtgttgtgtatatgacgtgccaggcgctgctaggagaacagaatggcggtggcatccccatggcctgttaggctccacaggctcacagccggctccatggctggcagccccgctgcagcgcttctactctgttcctctccacggaaaggacctgtctccctgctttccatactggagttggcctccctgagcctggggagaagaaaagcacacttgacctcagagctgcctgcaggagtctgacaagatgtggttgaagcagagacaggaactacacacagtgtgtgcttggtgatggttacagctgccaccatcctcctcctttctgtggtccctctgaccacacattaccttagggatcagaggtgtgactcacagctcagctgtctcacctgtgtctgctgagttctcctaccctgtgtgggcagaagaggcacggagaggagaggcagagggaagctctggttggttatttggtttgtttgttcgagacggagtctcgcactgtcatctgggctggagtgcagtggcgcgatctcggctcactgcaacctcctcctcctgggttcaagcgattctcctgcctcagcctcccaagtagctgggattacaggcacccgccaccatgcccatctaattttttgtatttttagtagagacgggatttcactatgttggccaggctggtctcaaattcctgacatcgtgatccgcccgcctcgacctcccaaagtgctgggattacaggcgtgagccaccacacctggcctggtgccatgcccggcctggctggttatttgttaaagcactggctttgctgttcagtagagccttggatttgccggcttctccctgcagcccctggctcagtgagcaggcacacgtctcggtcccttcaacatacgttgagtggagtctggtcagggtagtgtcctaagtatgtttctttcagaaaatagcttgaagaaaatgtcagagtaacatttgtttgtccattaaaagcaataaactctcaaaagtaggatttctggagttgaaaagtaaatgaaatgaaaatatcactagacgagctcacagcagaattgagcaggcagaagagtcagacaacttgtgaacacaggtcacctgagatcatctcgcttgaggaacag

SEQ ID NO: 10710 - DNA, 2821 bp, Homo sapiens
tagatttgaataagaagaatggtggtggctggaccccgctgatgtatgcctcctacattggccacgacacaatcgtgcacctgctgcttgaggcgggggtgagtgtgaatgtgccgaccccagaagggcagactccactgatgctggcctccagctgtggcaacgagagcatcgcctactttcttctccagcatggccgcctggagggcgcccgccccacgcagaggagatgaggccgtaacgcacgttctgtgttctcttgaagcaaggtgcagagctagaaatgaaagacatccagggctggacagccctcttccactgtaccagcgccgggcaccagcacatggtcaggttcctcttggacagtggagccaatgccaacgtgagggagccgatatgtggatttactcccttgatggaagcagctgctgctggccatgagataatcgtgcagtattttctgaatcacggagtcaaggtggacgcgagagaccacagtggagccacagcccggatgctggccaagcagtacggacacatgaagatcgtggccttgatggacacttactcgccctctctgcccaagagcctctatcggagcccagaaaagtacgaagatctgagctcttctgacgagtcctgccctgctcctcagagacagaggccttgccggaagaagggtgtcagcatccacgagggaccgcgagccctggccaggatcacaggcattggcctgggcggcagagccccacggcctcgctatgagcaggctcctccccgtggctatgtcaccttcaacagcagtggcgagaaccccctggaagaagagggcctctgctgccgggatgtcacctcccccatcaatgagcgggatgtggagagcagcagcagcagcagcagtcggggtacgtgcacccccacccatccggcccgtggctcaggcaggtcctggagctcctgtgtgcccatccccacttatcccctgggcctggcgctggacacagccatccagcagaggacaggaaaggggtaggtgtggacggccctggttcttgtgaggaatgggagaagcttctggtccagcatccccgtgcggcttaagggagccgttccacagcaacaggtttagctccttgcttgggagcccctgaggctttcagggcaggccccagtaggaatgtctgttataactgcacctccgtgcagcagctgtttccatagtgcccaccgtgtgccaagcactgctccgggtgcttgggatttatcagtgaacaaaaaagacagaagccctgcccgtctgtatagaggggagggtttaggacaggcaggaagtttgaaatataaggaagcaaccgctgcaggccccaaggagtgccctggtggaggcggctcagcccggggcacgcccatgcgcagcacctcggtgagggctgcaggcggacgccctgtcttcccgccctcagaggaacatgctttctgtgccaacctggggcccgtccagagcagcagcagcagcgagggcctggccagagcccaggggctcagcagcgaagcttctgtggagagcaacgaggactcggatcatgcctgtaaaagctcagctcgcaaacaagctaaaagttacatgaagaccaagaatcctgacagccagtggcctccccgcgctgcaactgacagggaaggctttctcgctgagtccagcccccagactcagagggccccctactcaggaccccaggaccttgccgcactgctggagcagatcgggtgtctgaagtacctgcaggtgtttgaggagcaggacgtggacctccgcatctttctgaccctcactgagagcgacctgaaggaaattggcatcacgctgtttgggcccaagaggaagatgacgtccgccattgcccgctggcacagcagtgcccgcccacccggggatgccctggagctggcctacgccgaccggctggaggctgagatgcaggagctcgccatccagctgcacaagcgctgcgaggaggtagaggccacgcggggccaggtgtgtcaggagcaggagctgcgcgccgtggtggagagctgcctgctggagcaggaccgcgcccgcgaggacctccaggcccggctgcgggagacgtgggccctggcccgggatgctgccctcgtcctggaccagctgcgagcctgtcaagctgagctgtcatctcgagtgaggcaggaccagccccctggtgcagccactctgggcctagccgtccccccagctgactccaagggctggcaagcgtccctgcaggccatgagcctccccgagctctcgggagccctggaggaccgtgtccgtgagatggggcaagcactgtgcttagtgacccagagcctggagaagctgcaggtgctgaacgggaagaagtggcgggagacctagcctgcgggccgaatctgacgttgggtgattggtccaccctgaagctgtgtgccagggagtgaggaggacagtgagcaggtagctgccatgtgcagcccaggcccagtgggggccagaggatcaggccccgggagcagccggcagacagaggcaagacgggggctgcggccctggctcggcagctcgggccagcactgaggcgggacgagggcctcacccagaacctcgtggtgaggcccagagttcatgggctgccctggcccataccaggcagggccctggggggaaagtgtatccatatacacgcacaggtgccaactgaggtgggaccttaggaatgaggactggggcacctggaaaatgccattttttggaaaataaaatttaagaacagct

SEQ ID NO: 10711 - DNA, 3659 bp, Homo sapiens
gctgggattacaggcgtgagccaccacacctggcctggtgccatgcccggcctggctggttatttgttaaagcactggctttgctgttcagtagagccttggatttgccggcttctccctgcagcccctggctcagtgagcaggcacacgtctcggtcccttcaacatacgttgagtggagtctggtcagggtagtgtcctaagtatgtttctttcagaaaatagcttgaagaaaatgtcagagtaacatttgtttgtccattaaaagcaataaactctcaaaagtaggatttctggagttgaaaagtaaatgaaatgaaaatatcactagacgagctcacagcagaattgagcaggcagaagagtcagacaacttgtgaacacaggtcacctgagatcatctcgcttgaggaacagaaagaatgagtaaaaaaaattaacagaaatctgtgatcccctcaagcacaccgacaccaccccatacagtggcattccagaaggagagcagaaacgatgggtgagaaacagcctgaccatctcagtggatcagaaacacggatcttacatccagggagctcggtgaactccagacaggtgaactcggagaagagctgcgcttagacaagtggaaatcagaacatccgacactgagactctagaattagagggcagcgctctccgcctacaaagcattgtcgagatcagcagctccatggtcccttcacagaactgagcatgtgtgggaggaggaggccagtttctggtgatgaacatacattgtccccacgtggccgaccatagtgtgaggactcacctgcctgcaacatcctgccctgcctgagccaccagagtaggaggggacagcctgggcgccacacacaaggcactgtcttggttctgagcctggggaagtggtggggctccgagtggaggaaaacgtctctgcttcgtcgtcagccactacctcccccaacctgtcccctgtgcctgccaggaccttgccgcactgctggagcagatcgggtgtctgaagtacctgcaggtgtttgaggagcaggacgtggacctccgcatctttctgaccctcactgagagcgacctgaaggaaattggcatcacgtgcgtccagaagggccgctctggccctcagcccggggttggggcaaactcccactcatgtaagcgctcttgggacgctgaggcatatcctggtcacattccccccgcaggctgtttgggcccaagaggaagatgacgtccgccattgcccgctggcacagcagtgcccgcccacccggggatgccctggagctggcctacgccgaccggctggaggctgagatgcaggagctcgccatccagctgcacaaggtgagtggctgggtgggggatgggggggcagggtgacacccgtgagttggctccatctctgacagaaaaggtgggtgctgtgtggaggggtcaggtggatgcagtggggagagggccccacacacaggacagggccgtggccaagggtctggcttgaccggccacctcccagcctccccgcgccccccacccccctgcagcgctgcgaggaggtagaggccacgcggggccaggtgtgtcaggagcaggagctgcgcgccgtggtggagagctgcctgctggagcaggaccgcgcccgcgaggacctccaggcccggctgcgggagacgtgggccctggcccgggatgctgccctcgtcctggaccagctgcggtgagtggctctgagctgccctgggctgggtctccagtggtcagccacctggcccctgggcccccacacatcctttcctcctgattttgtaactgaggggtggatttcagggtctggagccaccccacccccatttcatcaggcccttccttcctgcaggcagacccaggcaggagttgggtccgggaatctgcaccggtcgccctcctgctctttagtgcagcctcatggggcactggcccagcccatgagggccagctgcaaggacagggctgagcccctccctcccctagaaggtctgaggtgggggctctgcagcggccaggcctctgctctcaccaatatttgtttctgtgtctggcagagcctgtcaagctgagctgtcatctcgagtgaggcaggaccagccccctggtgcagccactctgggcctagccgtccccccagctggtaagagcagtggcctgactccgcactgggcagaggggaaggtgggggagccctgaagccaggtttgacccagtgggcttggcctggttctccggccggcagccactctcccaggtccctgtgtgcacatgatcccagagtccaaggaaaagagggggccctggggacccaagcccacttcctcacctgtgacaggaaaactgcctatcccccaggggtaggaggtactcgagaaaggccctgtgccttggctggctgtgctgtgctgagaccgccagtgacttctgtagcctccagccagggcccagacccgggtccccaccggcagagctttgccttctctcgggctgacccgggcctcgtagtgtttgctcagcctgtgggaggaagggcacaacagggcttccctgcctcggccttgggaggttgcttagacactgtcaggcgggtagggaggttctgatccaagcaggttctcctggttgcatgggctcagaataaagcagggcctgtggggacgcagacccccagctaactcggtccctgcacctgcaccacagactccaagggctggcaagcgtccctgcaggccatgagcctccccgagctctcgggagccctggaggaccgtgtccgtgagatgggtgagtctccggggaccagacgactgagcgctccttttgtttccgagggaggcaaagggacccctttccagggaaagcgggtttgtgtctctctaccccaaggctgacctcggggctggggccataacgggtgaggggcaggtcacatcctgcagctgagaccccggggcagcaccacccagccctcctgagcctggccgggagaggctcaaggtcatcattcctcagggcaagcactgtgcttagtgacccagagcctggagaagctgcaggtgctgaacgggaagaagtggcgggagacctagcctgcgggccggtgagtgtctgccagcctggatcccgcgtggtgggagcagcagggcctgtctgggcggctgcaggtgtgggtatgcacccacctgtccccctcccttctcaccggggctttttctttcagaatctgacgttgggtgattggtccaccctgaagctgtgtgccagggagtgaggaggacagtgagcaggtagctgccatgtgcagcccaggcccagtgggggccagaggatcaggccccgggagcagccggcagacagaggcaagacgggggctgcggccctggctcggcagctcgggccagcactgaggcgggacgagggcctcacccagaacctcgtggtgaggcccagagttcatgggctgccctggcccataccaggcagggccctggggggaaagtgtatccatatacacgcacaggtgccaactgaggtgggaccttaggaatgaggactggggcacctggaaaatgccattttttggaaaataaaatttaagaacagct

SEQ ID NO: 10712 - DNA, 2187 bp, Homo sapiens
gctgggattacaggcgtgagccaccacacctggcctggtgccatgcccggcctggctggttatttgttaaagcactggctttgctgttcagtagagccttggatttgccggcttctccctgcagcccctggctcagtgagcaggcacacgtctcggtcccttcaacatacgttgagtggagtctggtcagggtagtgtcctaagtatgtttctttcagaaaatagcttgaagaaaatgtcagagtaacatttgtttgtccattaaaagcaataaactctcaaaagtaggatttctggagttgaaaagtaaatgaaatgaaaatatcactagacgagctcacagcagaattgagcaggcagaagagtcagacaacttgtgaacacaggtcacctgagatcatctcgcttgaggaacagaaagaatgagtaaaaaaaattaacagaaatctgtgatcccctcaagcacaccgacaccaccccatacagtggcattccagaaggagagcagaaacgatgggtgagaaacagcctgaccatctcagtggatcagaaacacggatcttacatccagggagctcggtgaactccagacaggtgaactcggagaagagctgcgcttagacaagtggaaatcagaacatccgacactgagactctagaattagagggcagcgctctccgcctacaaagcattgtcgagatcagcagctccatggtcccttcacagaactgagcatgtgtgggaggaggaggccagtttctggtgatgaacatacattgtccccacgtggccgaccatagtgtgaggactcacctgcctgcaacatcctgccctgcctgagccaccagagtaggaggggacagcctgggcgccacacacaaggcactgtcttggttctgagcctggggaagtggtggggctccgagtggaggaaaacgtctctgcttcgtcgtcagccactacctcccccaacctgtcccctgtgcctgccaggaccttgccgcactgctggagcagatcgggtgtctgaagtacctgcaggtgtttgaggagcaggacgtggacctccgcatctttctgaccctcactgagagcgacctgaaggaaattggcatcacgtgcgtccagaagggccgctctggccctcagcccggggttggggcaaactcccactcatgtaagcgctcttgggacgctgaggcatatcctggtcacattccccccgcaggctgtttgggcccaagaggaagatgacgtccgccattgcccgctggcacagcagtgcccgcccacccggggatgccctggagctggcctacgccgaccggctggaggctgagatgcaggagctcgccatccagctgcacaagcgctgcgaggaggtagaggccacgcggggccaggtgtgtcaggagcaggagctgcgcgccgtggtggagagctgcctgctggagcaggaccgcgcccgcgaggacctccaggcccggctgcgggagacgtgggccctggcccgggatgctgccctcgtcctggaccagctgcgagcctgtcaagctgagctgtcatctcgagtgaggcaggaccagccccctggtgcagccactctgggcctagccgtccccccagctgactccaagggctggcaagcgtccctgcaggccatgagcctccccgagctctcgggagccctggaggaccgtgtccgtgagatggggcaagcactgtgcttagtgacccagagcctggagaagctgcaggtgctgaacgggaagaagtggcgggagacctagcctgcgggccgaatctgacgttgggtgattggtccaccctgaagctgtgtgccagggagtgaggaggacagtgagcaggtagctgccatgtgcagcccaggcccagtgggggccagaggatcaggccccgggagcagccggcagacagaggcaagacgggggctgcggccctggctcggcagctcgggccagcactgaggcgggacgagggcctcacccagaacctcgtggtgaggcccagagttcatgggctgccctggcccataccaggcagggccctggggggaaagtgtatccatatacacgcacaggtgccaactgaggtgggaccttaggaatgaggactggggcacctggaaaatgccattttttggaaaataaaatttaagaacagct

SEQ ID NO: 10713 - DNA, 16766 bp, Homo sapiens
gttggcgacggcagcccgagggcggcgcaaggcctgaggcccagcacaggtgggttccgcggcggcccggccccagcacttgccggcacctgcagcccgcctagacccggcgctcgggcgtcccgcgctgcacttgctcgccgcgtgactggaggaccgagcccccacattttctttatgtggttgtggtgggggcacagtaatgccctgtgcgccgtagcgttcctgtggggatgtggccggggggcgtcgggaagcgtcactgctgtgagttacgggtttgtcggccagggacccgccccggggccagtgagctacctttgcgatgcggttccacggggcgagagggggtgcctgggtgctttcacagacctcctctgtgggcgtgacagttaccaccagcatcacatttgttaagatttttaaaaattttttaatttttgtgggtacgtagtaggtgtatatatttatggcgtatatgagagattttgatacaggcatgcagttcgtaataatcacatgtaaaatgggggtctccatcccttcaagcatttatcctttgtgttacaaacaatatgattatactctttgaattatttttaaatgtgcagccgggcgcggtggctcactcacgcctgtaatcctagcactttgggaggcaaaggcgggcggatcacctgaagtcaaggatttgagaccagcctggccaacatggggacacttcgtctctactaaacatacgaaaactaggctggcatggtggctcatacctgtaatctcagctactcgggaagctgaggcaggagaatcgcttgaacccaggaggcggaggttgcattgagccgagatcacgccgctgcactctagcctgggtaacagagtgagattatgtctcaaaaaaaataataataaataaataaaatgtgcaattagattatattgactatagtcaccctgttgtgcggtcaaatactagatctttttttttttttttttttttttgagacggagtctcgctttgtcgcccaggctggagtgcagtggcttgatcaaatactagatcttattcattctgttttttttgtatccattaagcatccccaccctccactacccttcccagccttggttacactagaagtaaccatccttctactttctatgtccatgagttcagttgttttgatttttagataaccacaaataattgagaacatgcaatatttatctttctgtgcctggcttatttcactaaacataacgatctccgcttccatccatgtttttgcaaatgataggatctcattctttttttatggctgaatagtactccattgtgtctaagtaccacattttctttaggattcactgtaaaggtaacagatacttagcattttcagaatggacagaaccaaaaagttgaatgaaaactaaaacgtcttatctctaatgctactttacaccacaccactcgggatgggacattttagttttcactttagtgttttttttttgtttttttttttgagacagaatttcgctctgttgcccaggctggagtgcagtggcttgagctcggctcactgcaatcgcctcccaggctcaagcgattctcttgcctcagcctcctgagtactgagactacaggcgcccaccaccacacccagctaatttttgtaattttagtaaagatgggagttcaccattttggccagggtggtctcgaactcctggcctcaagtggtccgtcacgcttggtctggttctcattgtccttcagacctctggggatgtcagatatgcaagtctccagtaaatagagaacacggcctcaccctgcaggaggcctttggcgtggaagagacatgcccagtgaaggcttgagggaggtatggaagggactctgaactgaccctcagctcgtttggtttcttatccaggcttcgttggccagggctgttagggtgggattctcacctgcaaagtgagggaagggcactgcacgatcttgggctctgctagctgaagaggtggtggctccaggaaggagggctttgcttgccccaccgcacctacacacactcttcaccaagggtctgtgaagtgttcgtctcccacattggtggcttgtttctttagccatcttggctgtcacctggggcttggaagcattctttaatagaaactgaggtcctcatcgcatctattaactaccatagcacctgtaggtcatcacaacctgacaaggcctttgttttcgcctttgctccctttcctacccttgtttcctggcactcttgtacctaaggattctactaggaagctgatgaccttgccttgatttggggattcctggtgtgccgttacccatgtaggcccatctcggggaaagtgttacctcaccagttcaccggcctgttatatttccccccatagctctctcttcaaaggatgcctaagtggattcctattcagttgacggttgctgcgtgccaccagtcacatcctggtttgtctgttggggaattgctttctatttttttcagaaaaatttatttttacttttttgaaattttcaatttcataaccattccagaaaaattaatttatatttaaaatttacaggccaggtgcagtggctcacgcctatatttccaggactttgagaggctgaggcgggcggatcacctgaggtgaggagttcgagaccagcctggccaacatggtgaaacccccgtctctactaaaaatacaaaaattagcctaacatgatggcgcacacctgtaatctcagctattcaggtggctgaggctcaagaagcccttaaacccaggaggcagaggttccagtgagctgaaatcatgccactgcactccagcctgggcaacagagcgagactgtctcaaaaaaataaataaaatttacatacagtaaaattcattttggtgttcagttctgtggtttcataaaggcatggagtcacagatccaccgtcacagtcatacaggtctatcgtcccccaaattccctctctgccccaacctccaaccctttaattttgccttttccagaatgtcatgtaagtgaaattatactgtaggcaggcttcttccatttagcgtaaatcatttgaaattcattcacgtgttgcatgtcaactgttggatccttgtgtttaatgctgagtagcatccattatatggatgtgccaccgtttgtttatccattcttttatgtatcataatagcagcctttttagatatgtccccgttagacagtgaggcactagggattggagttgctaagtagcagagctgcttttttgttgttttttttttttgttttgtttttggagacaaagtcttgctctgtttcccaggctggagtgcaatggcgtgatcttggctcaccgcaacctccgcctcctcagttcaagtgatgctcctacctcagcctcccgagtagctggccttcatgcccagctaatttttgtatttttagtagagacaggatttcaccatgttggccaggctggtcttgaactcttgacctcaagtgatctgcccaccttggcctcccaaagtgctgggattacaggtgtgagccaccgcaccgggtccaagctgaattttgatcaaaccccaaatccagggttcttccccaccacatcaaggaactgattgggttaaacaacccaattagcatttcttcactgcccatccaagaggttgtcaggttcctagagttggtggagaattctcttttacctggtgcctgcggttggaaggaggagcaggtactccacagttaatgcctcaccatatgtgctcctctttactggtgtgatagcaggctcaccagatttagcatggttgggactgcccaaagcatacattatttcagcaaataaatttgtctgagttactcccggggttgactgcactgggttatcagtctgctagtgcagtggtgtagcaggggcaggaccagcctgtttcatgccctggaacaaccagccaggaaagatctaacccttgggccttcctcctcagtgatgtccgagctcagcgatgaagccagcgagccggaactcctgaaccgcagcttgtccatgtggcacgggctcgggacacaggtcagcggggaggagctggatgtccccctggatcttcacacagctgcttccattggccagtatgaagtggtgaaggagtgtgtgcagcggtaagagatctcggggaacttcctctcacattttgagcagcgcagtgatggcttcgatcccacgtgatggggctttgcacacagttgtggatgtttaatgcgtgtagaataggttaacctgcttatctcaggcagctgtcagtaagtattgatgctgagccctgacaaagaggccgtttttattcctaggaagaaaaagagggagtaaactttgatcagaagcttataaacagtcattctttaaccagactaattttattcactaattgcagaaatgcccaaacaaacaagcaaaataaaaataaagacagaaagtgatggcctggtgcggtggctcacacttgtaattccagcactttgggaggctgagatgggcgggtcacttgaggtcaggagtttgagaccattctggataacatgatgaaaccccatctctactaaaaatataaaagttagctgggtgtggtggcatgtacctgtaatcccagctactcaggaggctgaggcaggagaatcgcttgaacccgggaggtggaggttacagtgagctgagattgcgccactgcactctagcctgggcaacagagtgagactctgtctcaaaaacaaaaaaaagaaaaaagaaagtgatccctggccttcttttcccggagggttcattcgatccctgtgatccctgttcccctctagcttctgccatggaggaggagagaggctgggctttcagtgcctctggggaatgacctcccgacgtcactgcccacctgccctttgctaatctgtgtacaatagttagagacaatataaagcccctggcagggtccatggctgcgtcttgcccatagtaggatgtgatcatcttgtttttggaaaagggtcgtctcctcacttccacccccttatgttccacacacagcctaactctgtctcctggttctcatttgatattgtggtgcagcgacctctcttcctctctctgcgtgcctcttccagttcccagtgagccaaagcaaagcattgctgaagccccaggtctccggttcccaagttgtggccctcacttagacatacccagcccatggagtgctggtgcaccttggtacagggtggtctgttgcgctccctccacaggaggctctaggcataggcagctgggtatgcagtcagtacggcccctcaaagggtcacgtttggaattctcaggctcttaagtctttgggtgtcctgttaagatgcagagtccataaccgctccatagaggagcagggggaggcgtttgtgttgtgatgggattttgacactagctgaggtggaggcttgctgatagtaagcacaggatggggcctgaggggagctgggggcatcagaaggaaggggtggggctgaacgaggagtggtaagagagccccagggagatgctctgctgttgtgtaaaggaagatagtgttaggacgagctgggtgcattcgagccctgctgcagaggcatctccatgcagcccccctggccaggggctgccactgaaccctggtatcaggaccttctggaatggctgcccaggtgtgcatcccagagtcactgagggctgccaggcaatggaaggtagttgcctgctgtggtctaatatgtgaatcccggctgggcgcggtggctcacgcctgtaatccagcactttgggaggctaaggcgggtggatcacgaggtcaggagatcgagaccatcctggctaacacggtgaaaccccatctctactaaaaatacaaaaaactagctgggcgtagtggcgggcgcctgtagtcccagctacttgggaggctgaggcaggagaatggcgtgaacttgggaggcggagcttgcagtgagccgagatcgcgccactgcactccagcctgggcgacagagcgagactctgtctcaaaaaaacaacaaaaaagtgaatcccgtaaaagggacagatcctggggttcagtcaccagttgttatcccctctgcaggcaagaactggggaagggaaagaaggcctgtgggcgttaaccatgtaggatcccaggtaaccatgcaagtgggtattattttaaatgtgactcccttgtcccaaccccagagtcgcagctaggaagcccacagttttttcccatgggaaaatgcattgccagaattttaacagcaatcagtgagaaagatgggattctttggtcacagatttttcaagaatgtttctttaaggtgaggtgacaaaggatgaatcagtggcggtgggacttgtccacggtggagtcccttctttcctcactgctcctctccacccagcagtgggctagtagatgccaggcctgtggtggtcagggtttttcaactgtggctgtgttgacaatccaggctggatcattctttgctgtgggggctgtcctggacactgtgggatgtttagcggcagccttggcctccagcagcccttccctgcccagttgtgagaaccaaaaatgccttcacacattgccacatattccctggttgagtgccatctgcctatctggtggtgtgaaagagcatagctggccttgggctaggaggatgcgaaatcagagcaaggagacgaaggctcagggcctcacaaggcagtgtacgagcaactgtcagcatttttctgcctgcctgcctccaatccccacaacgtccagggtggcagataacttctgcttcctgtcaactcatcccgcctggcctagcctcgccaccagctttggtgaaccccacatgcgaggcggctggccatgtctagcatatcttgcgtttgtttaggagagagttagatttgaataagaagaatggtggtggctggaccccgctgatgtatgcctcctacattggccacgacacaatcgtgcacctgctgcttgaggcgggggtgagtgtgaatgtgccgaccccagaagggcagactccactgatgctggcctccagctgtggcaacgagagcatcgcctactttcttctccaggtgagctacgagggaactcaggcccagaaacctgaggggctccgtggccaccctgacagagatgcgaaccactgcaggccacggtgttcgtgtgtgctcgtgtaatcacttctgattcttgcagcatggccgcctggagggcgcccgccccacgcagaggagatgaggccgtaacgcacgttctgtgttctcttgaagcaaggtgcagagctagaaatgaaagacatccagggctggacagccctcttccactgtaccagcgccgggcaccagcacatggtcaggttcctcttggacagtggagccaatgccaacgtgaggtgattgccacatctttagtggccacaggagtggcctaggtgtcatctgactctaaggagggtggctctggaggcagctaaccagagtttagggccaccctgcttcggcacgagaggctcaagatgaggggtaggaccagagtccttccaggcacaggccttttcgtacatctgtgagatgcatctcttcaagccctctcagcttccttttctttatctgaaacccacctgggtcatacagttgtaagaattacatgttttattgtatgccaggggcctaacatactgaatggcatttaaatgtcatacattacatgcaaattccttccattttcttgctttttgtatggatgaggtgaggtgatgctttgaaacagtcatgaggccgggcgtggtggctcacgcctgtgatcccagctctttgggaggccgaggtaggcagatcacgaggtcaggagatcgagaccatcctggctaacatggtgaaaccccatctctactaaaaatacgaaaaaattagctgggcatggtgacgggcgcctgtagtcccagctactcgggaggctgaggcaagagaatggtgtgaacccgggaggtggagcttgcagtgagccgagattgcaccactgcactccagcctgggtgacagagcaagactccatctcaaaaaaaaaaaaacaaaaacaacagtcatgagttttggccgggctcagtggctcacacctgtaatcctagcactctgggaggccaaggcgggcagatcatgaggtcaggagttcgagaccagtctggccaacatggtgaaaccccgtctctactaaaaatacaaaaattagctgggcgtggtggcaggtgcctgtaatcccagctactcgggagtctgaggcgggagaatcacttgaaaccagaaggcagaggttgcagtgaactgagagatcgtgccactgcactccagcctgagcaacaagagcaaaactctgtctcaaaaacaaacaaaaaaccagtcatgagttttataagttggaagtgggattgttgtctaaagcttgtcatgataataatcacctttgaacaaacgcagcgggtaccaatgcagcacccaccctggctgtcattcattctaagacacctgataattttgtatgccactaagaaagaaaaaatatgctactaattaacattcaactcgcctgttgatttaaagatgttttctgacttgagagatgttaaaatatgaacactgtgtgtcttaagatggatgaaaaccagcatttcccatgcatggttcctgacttccaaaccagcatgagacaaggagggatttggaagccctctgaagacagtgccgagttagcataaccaagcatgaaaagcaagcttcaggagctaagcgtggcaaagatagcttagatcattagtacttgaacttttcagagtgggttcatggaggacgttgaacttgaagccaggatttggatgaatggatgggagatgctggctttctgtgaggaattagaacagctttttgaatatgattgaggtggagatttcagaggtagccagtgggaatagccaacaggtgggacgacaggcagacatctgtctttaggacaaagaccagccctggggacagacaccagaagagtaaatggagctgatgtgttatattcactgttctcatgtcacctgttaattctggaaagggacagtgttctacgcttagggatcggtgactcgtgcactgctcagggtttatcttcagcagggagtttttgcctggcggaacttgtctcttccaatcatctgactgtggcccacatcttgcagggagccgatatgtggatttactcccttgatggaagcagctgctgctggccatgagataatcgtgcagtattttctgaatcacgtaagtgaccctgattattagcatgtaatgtagtcacggcaaatgaggaatcatattactgaagtataagctattacagaattttcctttgcacagaaataactttcattcatttattcaacacattttcattatctattgacgcccggtgttgagtggtgcttaggcattaaggatacagtggtgagtagaaatagacacctattcctgtaataattttgaaaatactatctgaaaattatggaaaaatattttaaaagtaaatagcactcataatcctgtcacttagaaaaattatatagaataagaaggcagagatcctcctctctttttcaacctccctgatgcccacttggtttgagaaagagctgccctaggacttttcctctgctgtggaaagatgtgtctgtaggcaagtgtgtgcacattgctttgtgttttgaacaaagtgggattctacgtatagtctgtaacttagagacatcttatagacatcttatctttgtacagtattccgtgtacaatctgcctcagttaatttaatgagtttcttattagtagaaacttagtttttaacattttgcaattataaacagtgttccgggaatatccttttacacatagctttaatacatttgcagttatttctgtatgttgtatttctgttttattttattaatttatttttttgagacatggtgttgccctgtatcccaggctggagttcagtggcgagatcgtggctcactgcagcttcagcctcctgggctcaagcgatcctcctgcctcagcccccaagtagctgggactacaggtgcatgctaccatgccccggctaattatttaattttttttttttggtagagttgggggtctcagtatgttgtgcaggctagtcttgaattcctgagctcaagcgatcacctcagcctcccaaagtgctgggatcacaggtgcaagcctgtccacacagaaccttgtacataaatattcatagcagtattattcataattgccaaaaagtagaaaaacccacaagtccatctactgaggaattgataaacaaaatatatatctgtatagcaggatattattcggccctacaaagtaatgcagtactgctgcatgctgcggcaggggtgaaccctgatgcgttaggctgggctgggtgcggtggcgcacgccggtaatcccaacactttgggaggctgaggccagagggtcgcttcagccctggagttggaggttgcagtgagctatgattgcgccgccacactccattctgggtcacagagtggatcctgcctcaaaaagaaaaagaaaaggaaaacattcggctcagtgaaagaagccagacacaacaggccacacactaggtgatttcactcataggaaatgtccagaataagcaaatacatagacagaaaatagatgagtggtttcctgggtcttggggaatgggaagattggggtgataaaaatgtgctaaaattgtttgtggtgatggttgaacaactgtgaatatacgagaagccgttgaattgtacattgtaagtgggtgacttgttggtatgtggattatatctttataaggctgttaaacccaatggggggaagtgcaggcggtcctgatgaattcccactaccaaggttgtctgttgtcctgcccaccagtcatagacaaaggtgtccattttctcttgtcctcaccagtcctgatgtcagtcaaccttttgtcaatctggcgggtgaattgtagcgtctcattttagtttgtccttgttagagtagttgaaatttttttctttttttttttttttggagacagaagtcttgtgctgtgtcgcccaggctggaaggctggagtgcagtggcgtgatctcggctcactgcaacctctacctcccaagttcaagcagttcttctgcctcagcctcccgagtagctgggactgcaggcacccgcccgcacacctggctaattttttgtattttagtagagatgaggtttcaccatgttgcccaggctgctcttgaactcctgaactcaggcaatccacccaccttagcctcccaaagtgctaggattacaggcataagccactgcgcccagccagttgaacatttttaaattgatttcttagccatttgtatttcttttttttttttttttttgagactgagtctcactcagtcgcccaggctggagtacagtggcatgatctcagctcactgcaacctccacctcccaggtttaagagattgtcctgcctcagcctcccgagtagctgggactaaaaatacaaaaaatcccggctaattttttgtatttttagtagagacaaggtttcaccgtgttagccaggatggtctcgatctcctgacctcatgatctgcccgccctggcctcccaaagtgctgggattacaggtgtgagccactgtgcccggctggccatttgtatttctcttacgagctgtctatgtttattgcccaattttctattggatagtttgtttttttctcacttattggtgggaatttcttaaatagtgaaaaattcacatggtatctctttttaacaaagaattttgggacacaacatgcacatggtacacatgcagaccagaaggtgggtgcaccgcaggcctgtcccccaccctgcctgcgtctccttggcaccctccccacgggcgactctgggaatacacccacacatgctcatggtcctgccccatgtgcagctgctcccatcttgcattttttaaaaaacttaatcatgaagatttttctatattggtgtataaagagacggggccaggtgcattgtctcgctcctgtaatcccagcactttgagaggccaaggcagacagatcacttgaggtcaggagtttgagaccagcttggccaaggtggtgaaacccgcctctaccaaaaatacaaaaatacaaaatacaggtggctgacgctgtaatcccagctacttgggaggctgagacaggagaatcacttgaacctgggaggcagaggttgcgatgagccaagatgttgccactgcactccagcctgggtgacagagtgagactatctctaaataaataaataaataaataaataaataaatcaataaatcaataaagagatggggtcttgctctgtccctcaggctggagtggagtggtgcagtctcagctcactgcagccttgacctcctggtctcaagtgatcctcctgcctcagcctcccaagtagctgggattacaggtgcgtgccaccacgcccagccaatttttgtattttttttgtagagatggggttttgccacgttgcccaggctggtcttgaactcctgagctcaggcagttcgcctgcctcggtctcccaaagtgctgggattacaggcacgagccaacgcacccagcccctctcttttttttttttttttgagatggcgtcttgctctgttgcccaggctagagtgcagtggcacgatctcggctcactgcaacctcagacttccgggttcacaccattctcctgcctcagcctcccgagtagctgggaccacaggcgcccgccaccatgcccagctaatttttcatatttttagtagagacggggtttcaccgcgttagccaggatggtctcgatctcctgacctcgtgatccgcccaccttggcctcccaaagtgctgggattacaggcgtgagccaccgtgcctggcctctcttttttttttttttttttatggtggcatggtattccctgtagggatgaatcagagtttttttgtttgtttgtttgtttgttttgagatggagtctcgctctgtagccctggctggagtgcagtggcgcaatctcggctcattgcaacctctgcctcccaggttcaagcgattctcctgcctcagcctcctgagtagctgggattacaggcgtgtgccaccacgcccagctaattttgtatttttagtagacagggtttcggcatgttggtcaggatggtcttgaactcctgacctcaagtgatctaccactttggcctcccaaagtgctgagattacaggcatgagccactgcgcctggcctaccgttgacatttcttacacgtctttttaagcacatatgggaatttcttcaggagcttaggatgtgttcttcaaagtagagtctttgttgtgtgaggtgggttcagtcggtagtgggtagtgtaaacttgctttgttccatagtggtcctggttcacacccctccccttagggtgttagacttcttttttttttttgagatggagtctctctctgtcacccaggctggagtgcagtggcgcgatctcggctcactgcaacctctgcctcccaggttcaagcgattttcctgcctcagcctcccgagtagctgggactgtaggcactcgccaccatgcccagctaatttttgtatttttagtagagacagggtttcaccatgttggccaggatggtctcaatctcttgaccttgtgacccgcccgccttggtcttccaaagtgctgggattacaggcgtgagccaccgtgcctggccttttttttttttttttttttggggtggggtcttgctctgtccccaaggctggagtacagtggtgtgatctcagctcagtgcaacttctgactcccaggctcaagcaattcgcctggctcagcctcccgagtagctgggattccaggtgtgtgccaccatatccagctaatttttgtatttttagtggagacagggtttcaccatgttggccaggctggtctcgaactcctgacctcatgatctgtctgcctcagcctcccaaagtgctgggattacaggcgtgagccactgtgcctggccaggatgttagactttttggctccctggccatttgggtttctttttctgcaaataattatttttgtattttttatttattttttttatatagggtcttgctttgtcaccacactagagtgcagtggcctgatcatgggtcattgtagtctcaacctcctgggctgaagtaatccttctgcctcagcctcctcagtagctgggactacaggcacgcactaccacgcctggctgttttttttttgtagagacaaaaatctcactatgttgcccaggctggtcttgaactcctggcctcaagcaatcttcccaccttggcctcccaaagtgctggagttacagacctgagccaccatgcccggccagataattctttgacagataatcctgctgacatgaactagacttccttaagacacatcatagaatcaatagcccagaaccataaagagcctctacttgtaagtttagagtcattttaagtaaggtagaactggagatcataagagatatgtactcttataatttttgattgtatgtttgtttctttttgagacagagtctcactctgtttgcccatgctggagcacagtggcgcgatcatagtttgttgcagcctcaacctcccaggttcaagggatccttgcaactcagcctcctgagtagctgagaccacaagcgcatgctatcacactagctgatttgatttttttgtagagttggggtctcactaagttgcttaggctggtctcaaactcctggctgcaagtggtcctcccaccttggcctcccaaagcgctgggattacaggcaggaaccacggtgcttggccaacaatttgcatgcctttaccacattccccaaatgttaacatttcacctcattttcttatcagtctctttatgtataacatgcatatgttttctgaatcatttaaatgtaaattgtgacataatgccccttttcccctaaatatgtatttcctgagagtaagaatttcattatgtatttcctaaaagcaaaaatgttctctttcccagtcacacaaaattatcagactcaggaactcaacactgagttcttcctccagcacttgacaagaatcaaagtgttggttagtgactgctttgggggatggggcaggactggcagcaggtggcccgatggcctgggtggtttgcctgccagcgatgctggtgggcaagccctgcctggaagctcctctctcccacgtttttcctgccgcccagtagttagaccacctggagccagaggagggggcccacccggtttcccagcctgtccctccagagctgggctccatttctggaggtagagaatggggcaagtctgggcatcttgtgctctttgctaggggaggaaagggctgtggctgctttccttgtcccccatttcccttctgccagtggggccaagccccagcagctcagtcaggagaagaggatatggatctgtctgggcctctctctttaagagaaagttgattcgtgccttccggatagtcttgttccagggtttctaaactttctgatcccaccttcatgttaaaatgagttttgatcatgtgtctctttagtaatatggacattataaaataggaaaaaaaagtctcttaaagcctaagtagttaaaaatttattttcacatcaggcatagtggctcatgccagtaatcccagcacttttagaggccaaagtgggaagatcgcttgaggctggagttggagaccagtctgggcaatacagtgagaccttgtctctaaattaaaaaaaaaaaaaaaaaaaaaattggccaggcatggtggctcatgcctgtaatcccagcactttgggatgccaaggcaggtggatcacctgaggtcaggagttcaagaccagcctggccaacatggtgaaaccccattagcggggcgtggtggcgtgcccctgtagtcccagctacttgggaggctgaggcgggagaatcacttgaacccggaaggcagaggttgcagtgagccgagattgcgccattgcactccagcctgggtgacagagtgagactccgtctcaaaaaaaaaaagccagttgtggtgtgtgtttgtaatcccagggaggctgagaagggaggatcacttgagctggggaggtcagggttgcaatgagccagtgtaatccagcgtgggccacagagtgagattctgcctcaaaaacaaaaccaaaaatatataacgagttaaaatcctacagtaaagaggctactgttttattctggttaaaccttagggttccttctatcaaacttaaactagaattttttttttttcttgagatggagtcgccctctgtcgcccaggctggagtgcagcagcttactgcaatctctgcctcccgtgttgaagcgattctcctgcctcagcctcccgagtagctgggattacaggtgt

SEQ ID NO: 10714 - DNA, 540 bp, Homo sapiens
gttggcgacggcagcccgagggcggcgcaaggcctgaggcccagcacagtgatgtccgagctcagcgatgaagccagcgagccggaactcctgaaccgcagcttgtccatgtggcacgggctcgggacacaggtcagcggggaggagctggatgtccccctggatcttcacacagctgcttccattggccagtatgaagtggtgaaggagtgtgtgcagcgcaaggtgcagagctagaaatgaaagacatccagggctggacagccctcttccactgtaccagcgccgggcaccagcacatggtcaggttcctcttggacagtggagccaatgccaacgtgagggagccgatatgtggatttactcccttgatggaagcagctgctgctggccatgagataatcgtgcagtattttctgaatcacatggagtcgccctctgtcgcccaggctggagtgcagcagcttactgcaatctctgcctcccgtgttgaagcgattctcctgcctcagcctcccgagtagctgggattacaggtgt

SEQ ID NO: 10715 - DNA, 3098 bp, Homo sapiens
gcgagactctgtctcaaaaaaacaacaaaaaagtgaatcccgtaaaagggacagatcctggggttcagtcaccagttgttatcccctctgcaggcaagaactggggaagggaaagaaggcctgtgggcgttaaccatgtaggatcccaggtaaccatgcaagtgggtattattttaaatgtgactcccttgtcccaaccccagagtcgcagctaggaagcccacagttttttcccatgggaaaatgcattgccagaattttaacagcaatcagtgagaaagatgggattctttggtcacagatttttcaagaatgtttctttaaggtgaggtgacaaaggatgaatcagtggcggtgggacttgtccacggtggagtcccttctttcctcactgctcctctccacccagcagtgggctagtagatgccaggcctgtggtggtcagggtttttcaactgtggctgtgttgacaatccaggctggatcattctttgctgtgggggctgtcctggacactgtgggatgtttagcggcagccttggcctccagcagcccttccctgcccagttgtgagaaccaaaaatgccttcacacattgccacatattccctggttgagtgccatctgcctatctggtggtgtgaaagagcatagctggccttgggctaggaggatgcgaaatcagagcaaggagacgaaggctcagggcctcacaaggcagtgtacgagcaactgtcagcatttttctgcctgcctgcctccaatccccacaacgtccagggtggcagataacttctgcttcctgtcaactcatcccgcctggcctagcctcgccaccagctttggtgaaccccacatgcgaggcggctggccatgtctagcatatcttgcgtttgtttaggagagagttagatttgaataagaagaatggtggtggctggaccccgctgatgtatgcctcctacattggccacgacacaatcgtgcacctgctgcttgaggcgggggtgagtgtgaatgtgccgaccccagaagggcagactccactgatgctggcctccagctgtggcaacgagagcatcgcctactttcttctccagcaaggtgcagagctagaaatgaaagacatccagggctggacagccctcttccactgtaccagcgccgggcaccagcacatggtcaggttcctcttggacagtggagccaatgccaacgtgagggagccgatatgtggatttactcccttgatggaagcagctgctgctggccatgagataatcgtgcagtattttctgaatcacggagtcaaggtggacgcgagagaccacagtggagccacagcccggatgctggccaagcagtacggacacatgaagatcgtggccttgatggacacttactcgccctctctgcccaagagcctctatcggagcccagaaaagtacgaagatctgagctcttctgacgagtcctgccctgctcctcagagacagaggccttgccggaagaagggtgtcagcatccacgagggaccgcgagccctggccaggatcacaggcattggcctgggcggcagagccccacggcctcgctatgagcaggctcctccccgtggctatgtcaccttcaacagcagtggcgagaaccccctggaagaagagggcctctgctgccgggatgtcacctcccccatcaatgagcgggatgtggagagcagcagcagcagcagcagtcgggaggaacatgctttctgtgccaacctggggcccgtccagagcagcagcagcagcgagggcctggccagagcccaggggctcagcagcgaagcttctgtggagagcaacgaggactcggatcatgcctgtaaaagctcagctcgcaaacaagctaaaagttacatgaagaccaagaatcctgacagccagtggcctccccgcgctgcaactgacagggaaggctttctcgctgagtccagcccccagactcagagggccccctactcaggaccccaggaccttgccgcactgctggagcagatcgggtgtctgaagtacctgcaggtgtttgaggagcaggacgtggacctccgcatctttctgaccctcactgagagcgacctgaaggaaattggcatcacgctgtttgggcccaagaggaagatgacgtccgccattgcccgctggcacagcagtgcccgcccacccggggatgccctggagctggcctacgccgaccggctggaggctgagatgcaggagctcgccatccagctgcacaagcgctgcgaggaggtagaggccacgcggggccaggtgtgtcaggagcaggagctgcgcgccgtggtggagagctgcctgctggagcaggaccgcgcccgcgaggacctccaggcccggctgcgggagacgtgggccctggcccgggatgctgccctcgtcctggaccagctgcgagcctgtcaagctgagctgtcatctcgagtgaggcaggaccagccccctggtgcagccactctgggcctagccgtccccccagctgactccaagggctggcaagcgtccctgcaggccatgagcctccccgagctctcgggagccctggaggaccgtgtccgtgagatggggcaagcactgtgcttagtgacccagagcctggagaagctgcaggtgctgaacgggaagaagtggcgggagacctagcctgcgggccgaatctgacgttgggtgattggtccaccctgaagctgtgtgccagggagtgaggaggacagtgagcaggtagctgccatgtgcagcccaggcccagtgggggccagaggatcaggccccgggagcagccggcagacagaggcaagacgggggctgcggccctggctcggcagctcgggccagcactgaggcgggacgagggcctcacccagaacctcgtggtgaggcccagagttcatgggctgccctggcccataccaggcagggccctggggggaaagtgtatccatatacacgcacaggtgccaactgaggtgggaccttaggaatgaggactggggcacctggaaaatgccattttttggaaaataaaatttaagaacagct

SEQ ID NO: 10716 - DNA, 916 bp, Homo sapiens
agcccgagggcggcgcaaggcctgaggcccagcacagtgatgtccgagctcagcgatgaagccagcgagccggaactcctgaaccgcagcttgtccatgtggcacgggctcgggacacaggtcagcggggaggagctggatgtccccctggatcttcacacagctgcttccattggccagtatgaagtggtgaaggagtgtgtgcagcgggagccgatatgtggatttactcccttgatggaagcagctgctgctggccatgagataatcgtgcagtattttctgaatcacggagtcaaggtggacgcgagagaccacagtggagccacagcccggatgctggccaagcagtacggacacatgaagatcgtggccttgatggacacttactcgccctctctgcccaagagcctctatcggagcccagaaaagtacgaagatctgagctcttctgacgagtcctgccctgctcctcagagacagaggccttgccggaagaagggtgtcagcatccacgagggaccgcgagccctggccaggatcacaggcattggcctgggcggcagagccccacggcctcgctatggctcctccccgtggctatgtcaccttcaacagcagtggcgagaaccccctggaagaagagggcctctgctgccgggatgtcacctcccccatcaatgagcgggatgtggagagcagcagcagcagcagcagtcgggaggaacatgctttctgtgccaacctggggcccgtccagagcagcagcagcagcgagggcctggccagagcccaggggctcagcagcgaagcttctgtggagagcaacgaggactcggatcatgcctgtaaaagctcagctcgcaaacaagctaaaagttacatgaagaccaagaatcctgacagccagtggcct

SEQ ID NO: 10717 - DNA, 2302 bp, Homo sapiens
agctgtttggggggggttggcgacggcagcccgagggcggcgcaaggcctgaggcccagcacaggccaggtgcagtggctcacgcctatatttccaggactttgagaggctgaggcgggcggatcacctgagtgatgtccgagctcagcgatgaagccagcgagccggaactcctgaaccgcagcttgtccatgtggcacgggctcgggacacaggtcagcggggaggagctggatgtccccctggatcttcacacagctgcttccattggccagtatgaagtggtgaaggagtgtgtgcagcgcaaggtgcagagctagaaatgaaagacatccagggctggacagccctcttccactgtaccagcgccgggcaccagcacatggtcaggttcctcttggacagtggagccaatgccaacgtgagggagccgatatgtggatttactcccttgatggaagcagctgctgctggccatgagataatcgtgcagtattttctgaatcacggagtcaaggtggacgcgagagaccacagtggagccacagcccggatgctggccaagcagtacggacacatgaagatcgtggccttgatggacacttactcgccctctctgcccaagagcctctatcggagcccagaaaagtacgaagatctgagctcttctgacgagtcctgccctgctcctcagagacagaggccttgccggaagaagggtgtcagcatccacgagggaccgcgagccctggccaggatcacaggcattggcctgggcggcagagccccacggcctcgctatgagcaggctcctccccgtggctatgtcaccttcaacagcagtggcgagaaccccctggaagaagagggcctctgctgccgggatgtcacctcccccatcaatgagcgggatgtggagagcagcagcagcagcagcagtcgggaggaacatgctttctgtgccaacctggggcccgtccagagcagcagcagcagcgagggcctggccagagcccaggggctcagcagcgaagcttctgtggagagcaacgaggactcggatcatgcctgtaaaagctcagctcgcaaacaagctaaaagttacatgaagaccaagaatcctgacagccagtggcctccccgcgctgcaactgacagggaaggctttctcgctgagtccagcccccagactcagagggccccctactcaggaccccaggaccttgccgcactgctggagcagatcgggtgtctgaagtacctgcaggtgtttgaggagcaggacgtggacctccgcatctttctgaccctcactgagagcgacctgaaggaaattggcatcacgctgtttgggcccaagaggaagatgacgtccgccattgcccgctggcacagcagtgcccgcccacccggggatgccctggagctggcctacgccgaccggctggaggctgagatgcaggagctcgccatccagctgcacaagcgctgcgaggaggtagaggccacgcggggccaggtgtgtcaggagcaggagctgcgcgccgtggtggagagctgcctgctggagcaggaccgcgcccgcgaggacctccaggcccggctgcgggagacgtgggccctggcccgggatgctgccctcgtcctggaccagctgcgagcctgtcaagctgagctgtcatctcgagtgaggcaggaccagccccctggtgcagccactctgggcctagccgtccccccagctgactccaagggctggcaagcgtccctgcaggccatgagcctccccgagctctcgggagccctggaggaccgtgtccgtgagatggggcaagcactgtgcttagtgacccagagcctggagaagctgcaggtgctgaacgggaagaagtggcgggagacctagcctgcgggccgaatctgacgttgggtgattggtccaccctgaagctgtgtgccagggagtgaggaggacagtgagcaggtagctgccatgtgcagcccaggcccagtgggggccagaggatcaggccccgggagcagccggcagacagaggcaagacgggggctgcggccctggctcggcagctcgggccagcactgaggcgggacgagggcctcacccagaacctcgtggtgaggcccagagttcatgggctgccctggcccataccaggcagggccctggggggaaagtgtatccatatacacgcacaggtgccaactgaggtgggaccttaggaatgaggactggggcacctggaaaatgccattttttggaaaataaaatttaagaacagct

SEQ ID NO: 10718 - DNA, 7570 bp, Homo sapiens
gtggcggcgagctgtttggggggggttggcgacggcagcccgagggcggcgcaaggcctgaggcccagcacaggtgggttccgcggcggcccggccccagcacttgccggcacctgcagcccgcctagacccggcgctcgggcgtcccgcgctgcacttgctcgccgcgtgactggaggaccgagcccccacattttctttatgtggttgtggtgggggcacagtaatgccctgtgcgccgtagcgttcctgtggggatgtggccggggggcgtcgggaagcgtcactgctgtgagttacgggtttgtcggccagggacccgccccggggccagtgagctacctttgcgatgcggttccacggggcgagagggggtgcctgggtgctttcacagacctcctctgtgggcgtgacagttaccaccagcatcacatttgttaagatttttaaaaattttttaatttttgtgggtacgtagtaggtgtatatatttatggcgtatatgagagattttgatacaggcatgcagttcgtaataatcacatgtaaaatgggggtctccatcccttcaagcatttatcctttgtgttacaaacaatatgattatactctttgaattatttttaaatgtgcagccgggcgcggtggctcactcacgcctgtaatcctagcactttgggaggcaaaggcgggcggatcacctgaagtcaaggatttgagaccagcctggccaacatggggacacttcgtctctactaaacatacgaaaactaggctggcatggtggctcatacctgtaatctcagctactcgggaagctgaggcaggagaatcgcttgaacccaggaggcggaggttgcattgagccgagatcacgccgctgcactctagcctgggtaacagagtgagattatgtctcaaaaaaaataataataaataaataaaatgtgcaattagattatattgactatagtcaccctgttgtgcggtcaaatactagatctttttttttttttttttttttttgagacggagtctcgctttgtcgcccaggctggagtgcagtggcttgatcaaatactagatcttattcattctgttttttttgtatccattaagcatccccaccctccactacccttcccagccttggttacactagaagtaaccatccttctactttctatgtccatgagttcagttgttttgatttttagataaccacaaataattgagaacatgcaatatttatctttctgtgcctggcttatttcactaaacataacgatctccgcttccatccatgtttttgcaaatgataggatctcattctttttttatggctgaatagtactccattgtgtctaagtaccacattttctttaggattcactgtaaaggtaacagatacttagcattttcagaatggacagaaccaaaaagttgaatgaaaactaaaacgtcttatctctaatgctactttacaccacaccactcgggatgggacattttagttttcactttagtgttttttttttgtttttttttttgagacagaatttcgctctgttgcccaggctggagtgcagtggcttgagctcggctcactgcaatcgcctcccaggctcaagcgattctcttgcctcagcctcctgagtactgagactacaggcgcccaccaccacacccagctaatttttgtaattttagtaaagatgggagttcaccattttggccagggtggtctcgaactcctggcctcaagtggtccgtcacgcttggtctggttctcattgtccttcagacctctggggatgtcagatatgcaagtctccagtaaatagagaacacggcctcaccctgcaggaggcctttggcgtggaagagacatgcccagtgaaggcttgagggaggtatggaagggactctgaactgaccctcagctcgtttggtttcttatccaggcttcgttggccagggctgttagggtgggattctcacctgcaaagtgagggaagggcactgcacgatcttgggctctgctagctgaagaggtggtggctccaggaaggagggctttgcttgccccaccgcacctacacacactcttcaccaagggtctgtgaagtgttcgtctcccacattggtggcttgtttctttagccatcttggctgtcacctggggcttggaagcattctttaatagaaactgaggtcctcatcgcatctattaactaccatagcacctgtaggtcatcacaacctgacaaggcctttgttttcgcctttgctccctttcctacccttgtttcctggcactcttgtacctaaggattctactaggaagctgatgaccttgccttgatttggggattcctggtgtgccgttacccatgtaggcccatctcggggaaagtgttacctcaccagttcaccggcctgttatatttccccccatagctctctcttcaaaggatgcctaagtggattcctattcagttgacggttgctgcgtgccaccagtcacatcctggtttgtctgttggggaattgctttctatttttttcagaaaaatttatttttacttttttgaaattttcaatttcataaccattccagaaaaattaatttatatttaaaatttacaggccaggtgcagtggctcacgcctatatttccaggactttgagaggctgaggcgggcggatcacctgaggtgaggagttcgagaccagcctggccaacatggtgaaacccccgtctctactaaaaatacaaaaattagcctaacatgatggcgcacacctgtaatctcagctattcaggtggctgaggctcaagaagcccttaaacccaggaggcagaggttccagtgagctgaaatcatgccactgcactccagcctgggcaacagagcgagactgtctcaaaaaaataaataaaatttacatacagtaaaattcattttggtgttcagttctgtggtttcataaaggcatggagtcacagatccaccgtcacagtcatacaggtctatcgtcccccaaattccctctctgccccaacctccaaccctttaattttgccttttccagaatgtcatgtaagtgaaattatactgtaggcaggcttcttccatttagcgtaaatcatttgaaattcattcacgtgttgcatgtcaactgttggatccttgtgtttaatgctgagtagcatccattatatggatgtgccaccgtttgtttatccattcttttatgtatcataatagcagcctttttagatatgtccccgttagacagtgaggcactagggattggagttgctaagtagcagagctgcttttttgttgttttttttttttgttttgtttttggagacaaagtcttgctctgtttcccaggctggagtgcaatggcgtgatcttggctcaccgcaacctccgcctcctcagttcaagtgatgctcctacctcagcctcccgagtagctggccttcatgcccagctaatttttgtatttttagtagagacaggatttcaccatgttggccaggctggtcttgaactcttgacctcaagtgatctgcccaccttggcctcccaaagtgctgggattacaggtgtgagccaccgcaccgggtccaagctgaattttgatcaaaccccaaatccagggttcttccccaccacatcaaggaactgattgggttaaacaacccaattagcatttcttcactgcccatccaagaggttgtcaggttcctagagttggtggagaattctcttttacctggtgcctgcggttggaaggaggagcaggtactccacagttaatgcctcaccatatgtgctcctctttactggtgtgatagcaggctcaccagatttagcatggttgggactgcccaaagcatacattatttcagcaaataaatttgtctgagttactcccggggttgactgcactgggttatcagtctgctagtgcagtggtgtagcaggggcaggaccagcctgtttcatgccctggaacaaccagccaggaaagatctaacccttgggccttcctcctcagtgatgtccgagctcagcgatgaagccagcgagccggaactcctgaaccgcagcttgtccatgtggcacgggctcgggacacaggtcagcggggaggagctggatgtccccctggatcttcacacagctgcttccattggccagtatgaagtggtgaaggagtgtgtgcagcggtaagagatctcggggaacttcctctcacattttgagcagcgcagtgatggcttcgatcccacgtgatggggctttgcacacagttgtggatgtttaatgcgtgtagaataggttaacctgcttatctcaggcagctgtcagtaagtattgatgctgagccctgacaaagaggccgtttttattcctaggaagaaaaagagggagtaaactttgatcagaagcttataaacagtcattctttaaccagactaattttattcactaattgcagaaatgcccaaacaaacaagcaaaataaaaataaagacagaaagtgatggcctggtgcggtggctcacacttgtaattccagcactttgggaggctgagatgggcgggtcacttgaggtcaggagtttgagaccattctggataacatgatgaaaccccatctctactaaaaatataaaagttagctgggtgtggtggcatgtacctgtaatcccagctactcaggaggctgaggcaggagaatcgcttgaacccgggaggtggaggttacagtgagctgagattgcgccactgcactctagcctgggcaacagagtgagactctgtctcaaaaacaaaaaaaagaaaaaagaaagtgatccctggccttcttttcccggagggttcattcgatccctgtgatccctgttcccctctagcttctgccatggaggaggagagaggctgggctttcagtgcctctggggaatgacctcccgacgtcactgcccacctgccctttgctaatctgtgtacaatagttagagacaatataaagcccctggcagggtccatggctgcgtcttgcccatagtaggatgtgatcatcttgtttttggaaaagggtcgtctcctcacttccacccccttatgttccacacacagcctaactctgtctcctggttctcatttgatattgtggtgcagcgacctctcttcctctctctgcgtgcctcttccagttcccagtgagccaaagcaaagcattgctgaagccccaggtctccggttcccaagttgtggccctcacttagacatacccagcccatggagtgctggtgcaccttggtacagggtggtctgttgcgctccctccacaggaggctctaggcataggcagctgggtatgcagtcagtacggcccctcaaagggtcacgtttggaattctcaggctcttaagtctttgggtgtcctgttaagatgcagagtccataaccgctccatagaggagcagggggaggcgtttgtgttgtgatgggattttgacactagctgaggtggaggcttgctgatagtaagcacaggatggggcctgaggggagctgggggcatcagaaggaaggggtggggctgaacgaggagtggtaagagagccccagggagatgctctgctgttgtgtaaaggaagatagtgttaggacgagctgggtgcattcgagccctgctgcagaggcatctccatgcagcccccctggccaggggctgccactgaaccctggtatcaggaccttctggaatggctgcccaggtgtgcatcccagagtcactgagggctgccaggcaatggaaggtagttgcctgctgtggtctaatatgtgaatcccggctgggcgcggtggctcacgcctgtaatccagcactttgggaggctaaggcgggtggatcacgaggtcaggagatcgagaccatcctggctaacacggtgaaaccccatctctactaaaaatacaaaaaactagctgggcgtagtggcgggcgcctgtagtcccagctacttgggaggctgaggcaggagaatggcgtgaacttgggaggcggagcttgcagtgagccgagatcgcgccactgcactccagcctgggcgacagagcgagactctgtctcaaaaaaacaacaaaaaagtgaatcccgtaaaagggacagatcctggggttcagtcaccagttgttatcccctctgcaggcaagaactggggaagggaaagaaggcctgtgggcgttaaccatgtaggatcccaggtaaccatgcaagtgggtattattttaaatgtgactcccttgtcccaaccccagagtcgcagctaggaagcccacagttttttcccatgggaaaatgcattgccagaattttaacagcaatcagtgagaaagatgggattctttggtcacagatttttcaagaatgtttctttaaggtgaggtgacaaaggatgaatcagtggcggtgggacttgtccacggtggagtcccttctttcctcactgctcctctccacccagcagtgggctagtagatgccaggcctgtggtggtcagggtttttcaactgtggctgtgttgacaatccaggctggatcattctttgctgtgggggctgtcctggacactgtgggatgtttagcggcagccttggcctccagcagcccttccctgcccagttgtgagaaccaaaaatgccttcacacattgccacatattccctggttgagtgccatctgcctatctggtggtgtgaaagagcatagctggccttgggctaggaggatgcgaaatcagagcaaggagacgaaggctcagggcctcacaaggcagtgtacgagcaactgtcagcatttttctgcctgcctgcctccaatccccacaacgtccagggtggcagataacttctgcttcctgtcaactcatcccgcctggcctagcctcgccaccagctttggtgaaccccacatgcgaggcggctggccatgtctagcatatcttgcgtttgtttaggagagagttagatttgaataagaagaatggtggtggctggaccccgctgatgtatgcctcctacattggccacgacacaatcgtgcacctgctgcttgaggcgggggtgagtgtgaatgtgccgaccccagaagggcagactccactgatgctggcctccagctgtggcaacgagagcatcgcctactttcttctccaggtgagctacgagggaactcaggcccagaaacctgaggggctccgtggccaccctgacagagatgcgaaccactgcaggccacggtgttcgtgtgtgctcgtgtaatcacttctgattcttgcagcatggccgcctggagggcgcccgccccacgcagaggagatgaggccgtaacgcacgttctgtgttctcttgaagcaaggtgcagagctagaaatgaaagacatccagggctggacagccctcttccactgtaccagcgccgggcaccagcacatggtcaggttcctcttggacagtggagccaatgccaacgtgag

SEQ ID NO: 10719 - DNA, 566 bp, Homo sapiens
gtggcggcgagctgtttggggggggttggcgacggcagcccgagggcggcgcaaggcctgaggcccagcacagtgatgtccgagctcagcgatgaagccagcgagccggaactcctgaaccgcagcttgtccatgtggcacgggctcgggacacaggtcagcggggaggagctggatgtccccctggatcttcacacagctgcttccattggccagtatgaagtggtgaaggagtgtgtgcagcggagagagttagatttgaataagaagaatggtggtggctggaccccgctgatgtatgcctcctacattggccacgacacaatcgtgcacctgctgcttgaggcgggggtgagtgtgaatgtgccgaccccagaagggcagactccactgatgctggcctccagctgtggcaacgagagcatcgcctactttcttctccagcaaggtgcagagctagaaatgaaagacatccagggctggacagccctcttccactgtaccagcgccgggcaccagcacatggtcaggttcctcttggacagtggagccaatgccaacgtgag

SEQ ID NO: 10720 - DNA, 1146 bp, Homo sapiens
attccacggcgcccgggagctgtcccggtgccgacccgcgagcttcccggcgtgctccgcgccctcccgcaactacttccggggcgggtgccgggggcggtgccccggcgagggagcgtggcggcgagctgtttggggggggttggcgacggcagcccgagggcggcgcaaggcctgaggcccagcacagtgatgtccgagctcagcgatgaagccagcgagccggaactcctgaaccgcagcttgtccatgtggcacgggctcgggacacaggtcagcggggaggagctggatgtccccctggatcttcacacagctgcttccattggccagtatgaagtggtgaaggagtgtgtgcagcgggagccgatatgtggatttactcccttgatggaagcagctgctgctggccatgagataatcgtgcagtattttctgaatcacggagtcaaggtggacgcgagagaccacagtggagccacagcccggatgctggccaagcagtacggacacatgaagatcgtggccttgatggacacttactcgccctctctgcccaagagcctctatcggagcccagaaaagtacgaagatctgagctcttctgacgagtcctgccctgctcctcagagacagaggccttgccggaagaagggtgtcagcatccacgagggaccgcgagccctggccaggatcacaggcattggcctgggcggcagagccccacggcctcgctatgagcaggctcctccccgtggctatgtcaccttcaacagcagtggcgagaaccccctggaagaagagggcctctgctgccgggatgtcacctcccccatcaatgagcgggatgtggagagcagcagcagcagcagcagtcgggaggaacatgctttctgtgccaacctggggcccgtccagagcagcagcagcagcgagggcctggccagagcccaggggctcagcagcgaagcttctgtggagagcaacgaggactcggatcatgcctgtaaaagctcagctcgcaaacaagctaaaagttacatgaagaccaagaatcctgacagccagtggcctccccgcgctgcaactgacagggaaggctttctcgctgagtccagcccccagactcagagggccccctactca

SEQ ID NO: 10721 - DNA, 1128 bp, Homo sapiens
ggcgggtgccgggggcggtgccccggcgagggagcgtggcggcgagctgtttggggggggttggcgacggcagcccgagggcggcgcaaggcctgaggcccagcacagtgatgtccgagctcagcgatgaagccagcgagccggaactcctgaaccgcagcttgtccatgtggcacgggctcgggacacaggtcagcggggaggagctggatgtccccctggatcttcacacagctgcttccattggccagtatgaagtggtgaaggagtgtgtgcagcggagagagttagatttgaataagaagaatggtggtggctggaccccgctgatgtatgcctcctacattggccacgacacaatcgtgcacctgctgcttgaggcgggggtgagtgtgaatgtgccgaccccagaagggcagactccactgatgctggcctccagctgtggcaacgagagcatcgcctactttcttctccagcatggccgcctggagggcgcccgccccacgcagaggagatgaggccgtaacgcacgttctgtgttctcttgaagcaaggtgcagagctagaaatgaaagacatccagggctggacagccctcttccactgtaccagcgccgggcaccagcacatggtcaggttcctcttggacagtggagccaatgccaacgtgagggagccgatatgtggatttactcccttgatggaagcagctgctgctggccatgagataatcgtgcagtattttctgaatcacggagtcaaggtggacgcgagagaccacagtggagccacagcccggatgctggccaagcagtacggacacatgaagatcgtggccttgatggacacttactcgccctctctgcccaagagcctctatcggagcccagaaaagtacgaagatctgagctcttctgacgagtcctgccctgctcctcagagacagaggccttgccggaagaagggtgtcagcatccacgagggaccgcgagccctggccaggatcacaggcattggcctgggcggcagagccccacggcctcgctatgagcaggctcctccccgtggctatgtcaccttcaacagcagtggcgagaaccccctggaagaagagggcctctgctg

SEQ ID NO: 10722 - DNA, 19972 bp, Homo sapiens
acttgccggcacctgcagcccgcctagacccggcgctcgggcgtcccgcgctgcacttgctcgccgcgtgactggaggaccgagcccccacattttctttatgtggttgtggtgggggcacagtaatgccctgtgcgccgtagcgttcctgtggggatgtggccggggggcgtcgggaagcgtcactgctgtgagttacgggtttgtcggccagggacccgccccggggccagtgagctacctttgcgatgcggttccacggggcgagagggggtgcctgggtgctttcacagacctcctctgtgggcgtgacagttaccaccagcatcacatttgttaagatttttaaaaattttttaatttttgtgggtacgtagtaggtgtatatatttatggcgtatatgagagattttgatacaggcatgcagttcgtaataatcacatgtaaaatgggggtctccatcccttcaagcatttatcctttgtgttacaaacaatatgattatactctttgaattatttttaaatgtgcagccgggcgcggtggctcactcacgcctgtaatcctagcactttgggaggcaaaggcgggcggatcacctgaagtcaaggatttgagaccagcctggccaacatggggacacttcgtctctactaaacatacgaaaactaggctggcatggtggctcatacctgtaatctcagctactcgggaagctgaggcaggagaatcgcttgaacccaggaggcggaggttgcattgagccgagatcacgccgctgcactctagcctgggtaacagagtgagattatgtctcaaaaaaaataataataaataaataaaatgtgcaattagattatattgactatagtcaccctgttgtgcggtcaaatactagatctttttttttttttttttttttttgagacggagtctcgctttgtcgcccaggctggagtgcagtggcttgatcaaatactagatcttattcattctgttttttttgtatccattaagcatccccaccctccactacccttcccagccttggttacactagaagtaaccatccttctactttctatgtccatgagttcagttgttttgatttttagataaccacaaataattgagaacatgcaatatttatctttctgtgcctggcttatttcactaaacataacgatctccgcttccatccatgtttttgcaaatgataggatctcattctttttttatggctgaatagtactccattgtgtctaagtaccacattttctttaggattcactgtaaaggtaacagatacttagcattttcagaatggacagaaccaaaaagttgaatgaaaactaaaacgtcttatctctaatgctactttacaccacaccactcgggatgggacattttagttttcactttagtgttttttttttgtttttttttttgagacagaatttcgctctgttgcccaggctggagtgcagtggcttgagctcggctcactgcaatcgcctcccaggctcaagcgattctcttgcctcagcctcctgagtactgagactacaggcgcccaccaccacacccagctaatttttgtaattttagtaaagatgggagttcaccattttggccagggtggtctcgaactcctggcctcaagtggtccgtcacgcttggtctggttctcattgtccttcagacctctggggatgtcagatatgcaagtctccagtaaatagagaacacggcctcaccctgcaggaggcctttggcgtggaagagacatgcccagtgaaggcttgagggaggtatggaagggactctgaactgaccctcagctcgtttggtttcttatccaggcttcgttggccagggctgttagggtgggattctcacctgcaaagtgagggaagggcactgcacgatcttgggctctgctagctgaagaggtggtggctccaggaaggagggctttgcttgccccaccgcacctacacacactcttcaccaagggtctgtgaagtgttcgtctcccacattggtggcttgtttctttagccatcttggctgtcacctggggcttggaagcattctttaatagaaactgaggtcctcatcgcatctattaactaccatagcacctgtaggtcatcacaacctgacaaggcctttgttttcgcctttgctccctttcctacccttgtttcctggcactcttgtacctaaggattctactaggaagctgatgaccttgccttgatttggggattcctggtgtgccgttacccatgtaggcccatctcggggaaagtgttacctcaccagttcaccggcctgttatatttccccccatagctctctcttcaaaggatgcctaagtggattcctattcagttgacggttgctgcgtgccaccagtcacatcctggtttgtctgttggggaattgctttctatttttttcagaaaaatttatttttacttttttgaaattttcaatttcataaccattccagaaaaattaatttatatttaaaatttacaggccaggtgcagtggctcacgcctatatttccaggactttgagaggctgaggcgggcggatcacctgaggtgaggagttcgagaccagcctggccaacatggtgaaacccccgtctctactaaaaatacaaaaattagcctaacatgatggcgcacacctgtaatctcagctattcaggtggctgaggctcaagaagcccttaaacccaggaggcagaggttccagtgagctgaaatcatgccactgcactccagcctgggcaacagagcgagactgtctcaaaaaaataaataaaatttacatacagtaaaattcattttggtgttcagttctgtggtttcataaaggcatggagtcacagatccaccgtcacagtcatacaggtctatcgtcccccaaattccctctctgccccaacctccaaccctttaattttgccttttccagaatgtcatgtaagtgaaattatactgtaggcaggcttcttccatttagcgtaaatcatttgaaattcattcacgtgttgcatgtcaactgttggatccttgtgtttaatgctgagtagcatccattatatggatgtgccaccgtttgtttatccattcttttatgtatcataatagcagcctttttagatatgtccccgttagacagtgaggcactagggattggagttgctaagtagcagagctgcttttttgttgttttttttttttgttttgtttttggagacaaagtcttgctctgtttcccaggctggagtgcaatggcgtgatcttggctcaccgcaacctccgcctcctcagttcaagtgatgctcctacctcagcctcccgagtagctggccttcatgcccagctaatttttgtatttttagtagagacaggatttcaccatgttggccaggctggtcttgaactcttgacctcaagtgatctgcccaccttggcctcccaaagtgctgggattacaggtgtgagccaccgcaccgggtccaagctgaattttgatcaaaccccaaatccagggttcttccccaccacatcaaggaactgattgggttaaacaacccaattagcatttcttcactgcccatccaagaggttgtcaggttcctagagttggtggagaattctcttttacctggtgcctgcggttggaaggaggagcaggtactccacagttaatgcctcaccatatgtgctcctctttactggtgtgatagcaggctcaccagatttagcatggttgggactgcccaaagcatacattatttcagcaaataaatttgtctgagttactcccggggttgactgcactgggttatcagtctgctagtgcagtggtgtagcaggggcaggaccagcctgtttcatgccctggaacaaccagccaggaaagatctaacccttgggccttcctcctcagtgatgtccgagctcagcgatgaagccagcgagccggaactcctgaaccgcagcttgtccatgtggcacgggctcgggacacaggtcagcggggaggagctggatgtccccctggatcttcacacagctgcttccattggccagtatgaagtggtgaaggagtgtgtgcagcggtaagagatctcggggaacttcctctcacattttgagcagcgcagtgatggcttcgatcccacgtgatggggctttgcacacagttgtggatgtttaatgcgtgtagaataggttaacctgcttatctcaggcagctgtcagtaagtattgatgctgagccctgacaaagaggccgtttttattcctaggaagaaaaagagggagtaaactttgatcagaagcttataaacagtcattctttaaccagactaattttattcactaattgcagaaatgcccaaacaaacaagcaaaataaaaataaagacagaaagtgatggcctggtgcggtggctcacacttgtaattccagcactttgggaggctgagatgggcgggtcacttgaggtcaggagtttgagaccattctggataacatgatgaaaccccatctctactaaaaatataaaagttagctgggtgtggtggcatgtacctgtaatcccagctactcaggaggctgaggcaggagaatcgcttgaacccgggaggtggaggttacagtgagctgagattgcgccactgcactctagcctgggcaacagagtgagactctgtctcaaaaacaaaaaaaagaaaaaagaaagtgatccctggccttcttttcccggagggttcattcgatccctgtgatccctgttcccctctagcttctgccatggaggaggagagaggctgggctttcagtgcctctggggaatgacctcccgacgtcactgcccacctgccctttgctaatctgtgtacaatagttagagacaatataaagcccctggcagggtccatggctgcgtcttgcccatagtaggatgtgatcatcttgtttttggaaaagggtcgtctcctcacttccacccccttatgttccacacacagcctaactctgtctcctggttctcatttgatattgtggtgcagcgacctctcttcctctctctgcgtgcctcttccagttcccagtgagccaaagcaaagcattgctgaagccccaggtctccggttcccaagttgtggccctcacttagacatacccagcccatggagtgctggtgcaccttggtacagggtggtctgttgcgctccctccacaggaggctctaggcataggcagctgggtatgcagtcagtacggcccctcaaagggtcacgtttggaattctcaggctcttaagtctttgggtgtcctgttaagatgcagagtccataaccgctccatagaggagcagggggaggcgtttgtgttgtgatgggattttgacactagctgaggtggaggcttgctgatagtaagcacaggatggggcctgaggggagctgggggcatcagaaggaaggggtggggctgaacgaggagtggtaagagagccccagggagatgctctgctgttgtgtaaaggaagatagtgttaggacgagctgggtgcattcgagccctgctgcagaggcatctccatgcagcccccctggccaggggctgccactgaaccctggtatcaggaccttctggaatggctgcccaggtgtgcatcccagagtcactgagggctgccaggcaatggaaggtagttgcctgctgtggtctaatatgtgaatcccggctgggcgcggtggctcacgcctgtaatccagcactttgggaggctaaggcgggtggatcacgaggtcaggagatcgagaccatcctggctaacacggtgaaaccccatctctactaaaaatacaaaaaactagctgggcgtagtggcgggcgcctgtagtcccagctacttgggaggctgaggcaggagaatggcgtgaacttgggaggcggagcttgcagtgagccgagatcgcgccactgcactccagcctgggcgacagagcgagactctgtctcaaaaaaacaacaaaaaagtgaatcccgtaaaagggacagatcctggggttcagtcaccagttgttatcccctctgcaggcaagaactggggaagggaaagaaggcctgtgggcgttaaccatgtaggatcccaggtaaccatgcaagtgggtattattttaaatgtgactcccttgtcccaaccccagagtcgcagctaggaagcccacagttttttcccatgggaaaatgcattgccagaattttaacagcaatcagtgagaaagatgggattctttggtcacagatttttcaagaatgtttctttaaggtgaggtgacaaaggatgaatcagtggcggtgggacttgtccacggtggagtcccttctttcctcactgctcctctccacccagcagtgggctagtagatgccaggcctgtggtggtcagggtttttcaactgtggctgtgttgacaatccaggctggatcattctttgctgtgggggctgtcctggacactgtgggatgtttagcggcagccttggcctccagcagcccttccctgcccagttgtgagaaccaaaaatgccttcacacattgccacatattccctggttgagtgccatctgcctatctggtggtgtgaaagagcatagctggccttgggctaggaggatgcgaaatcagagcaaggagacgaaggctcagggcctcacaaggcagtgtacgagcaactgtcagcatttttctgcctgcctgcctccaatccccacaacgtccagggtggcagataacttctgcttcctgtcaactcatcccgcctggcctagcctcgccaccagctttggtgaaccccacatgcgaggcggctggccatgtctagcatatcttgcgtttgtttaggagagagttagatttgaataagaagaatggtggtggctggaccccgctgatgtatgcctcctacattggccacgacacaatcgtgcacctgctgcttgaggcgggggtgagtgtgaatgtgccgaccccagaagggcagactccactgatgctggcctccagctgtggcaacgagagcatcgcctactttcttctccaggtgagctacgagggaactcaggcccagaaacctgaggggctccgtggccaccctgacagagatgcgaaccactgcaggccacggtgttcgtgtgtgctcgtgtaatcacttctgattcttgcagcatggccgcctggagggcgcccgccccacgcagaggagatgaggccgtaacgcacgttctgtgttctcttgaagcaaggtgcagagctagaaatgaaagacatccagggctggacagccctcttccactgtaccagcgccgggcaccagcacatggtcaggttcctcttggacagtggagccaatgccaacgtgaggtgattgccacatctttagtggccacaggagtggcctaggtgtcatctgactctaaggagggtggctctggaggcagctaaccagagtttagggccaccctgcttcggcacgagaggctcaagatgaggggtaggaccagagtccttccaggcacaggccttttcgtacatctgtgagatgcatctcttcaagccctctcagcttccttttctttatctgaaacccacctgggtcatacagttgtaagaattacatgttttattgtatgccaggggcctaacatactgaatggcatttaaatgtcatacattacatgcaaattccttccattttcttgctttttgtatggatgaggtgaggtgatgctttgaaacagtcatgaggccgggcgtggtggctcacgcctgtgatcccagctctttgggaggccgaggtaggcagatcacgaggtcaggagatcgagaccatcctggctaacatggtgaaaccccatctctactaaaaatacgaaaaaattagctgggcatggtgacgggcgcctgtagtcccagctactcgggaggctgaggcaagagaatggtgtgaacccgggaggtggagcttgcagtgagccgagattgcaccactgcactccagcctgggtgacagagcaagactccatctcaaaaaaaaaaaaacaaaaacaacagtcatgagttttggccgggctcagtggctcacacctgtaatcctagcactctgggaggccaaggcgggcagatcatgaggtcaggagttcgagaccagtctggccaacatggtgaaaccccgtctctactaaaaatacaaaaattagctgggcgtggtggcaggtgcctgtaatcccagctactcgggagtctgaggcgggagaatcacttgaaaccagaaggcagaggttgcagtgaactgagagatcgtgccactgcactccagcctgagcaacaagagcaaaactctgtctcaaaaacaaacaaaaaaccagtcatgagttttataagttggaagtgggattgttgtctaaagcttgtcatgataataatcacctttgaacaaacgcagcgggtaccaatgcagcacccaccctggctgtcattcattctaagacacctgataattttgtatgccactaagaaagaaaaaatatgctactaattaacattcaactcgcctgttgatttaaagatgttttctgacttgagagatgttaaaatatgaacactgtgtgtcttaagatggatgaaaaccagcatttcccatgcatggttcctgacttccaaaccagcatgagacaaggagggatttggaagccctctgaagacagtgccgagttagcataaccaagcatgaaaagcaagcttcaggagctaagcgtggcaaagatagcttagatcattagtacttgaacttttcagagtgggttcatggaggacgttgaacttgaagccaggatttggatgaatggatgggagatgctggctttctgtgaggaattagaacagctttttgaatatgattgaggtggagatttcagaggtagccagtgggaatagccaacaggtgggacgacaggcagacatctgtctttaggacaaagaccagccctggggacagacaccagaagagtaaatggagctgatgtgttatattcactgttctcatgtcacctgttaattctggaaagggacagtgttctacgcttagggatcggtgactcgtgcactgctcagggtttatcttcagcagggagtttttgcctggcggaacttgtctcttccaatcatctgactgtggcccacatcttgcagggagccgatatgtggatttactcccttgatggaagcagctgctgctggccatgagataatcgtgcagtattttctgaatcacgtaagtgaccctgattattagcatgtaatgtagtcacggcaaatgaggaatcatattactgaagtataagctattacagaattttcctttgcacagaaataactttcattcatttattcaacacattttcattatctattgacgcccggtgttgagtggtgcttaggcattaaggatacagtggtgagtagaaatagacacctattcctgtaataattttgaaaatactatctgaaaattatggaaaaatattttaaaagtaaatagcactcataatcctgtcacttagaaaaattatatagaataagaaggcagagatcctcctctctttttcaacctccctgatgcccacttggtttgagaaagagctgccctaggacttttcctctgctgtggaaagatgtgtctgtaggcaagtgtgtgcacattgctttgtgttttgaacaaagtgggattctacgtatagtctgtaacttagagacatcttatagacatcttatctttgtacagtattccgtgtacaatctgcctcagttaatttaatgagtttcttattagtagaaacttagtttttaacattttgcaattataaacagtgttccgggaatatccttttacacatagctttaatacatttgcagttatttctgtatgttgtatttctgttttattttattaatttatttttttgagacatggtgttgccctgtatcccaggctggagttcagtggcgagatcgtggctcactgcagcttcagcctcctgggctcaagcgatcctcctgcctcagcccccaagtagctgggactacaggtgcatgctaccatgccccggctaattatttaattttttttttttggtagagttgggggtctcagtatgttgtgcaggctagtcttgaattcctgagctcaagcgatcacctcagcctcccaaagtgctgggatcacaggtgcaagcctgtccacacagaaccttgtacataaatattcatagcagtattattcataattgccaaaaagtagaaaaacccacaagtccatctactgaggaattgataaacaaaatatatatctgtatagcaggatattattcggccctacaaagtaatgcagtactgctgcatgctgcggcaggggtgaaccctgatgcgttaggctgggctgggtgcggtggcgcacgccggtaatcccaacactttgggaggctgaggccagagggtcgcttcagccctggagttggaggttgcagtgagctatgattgcgccgccacactccattctgggtcacagagtggatcctgcctcaaaaagaaaaagaaaaggaaaacattcggctcagtgaaagaagccagacacaacaggccacacactaggtgatttcactcataggaaatgtccagaataagcaaatacatagacagaaaatagatgagtggtttcctgggtcttggggaatgggaagattggggtgataaaaatgtgctaaaattgtttgtggtgatggttgaacaactgtgaatatacgagaagccgttgaattgtacattgtaagtgggtgacttgttggtatgtggattatatctttataaggctgttaaacccaatggggggaagtgcaggcggtcctgatgaattcccactaccaaggttgtctgttgtcctgcccaccagtcatagacaaaggtgtccattttctcttgtcctcaccagtcctgatgtcagtcaaccttttgtcaatctggcgggtgaattgtagcgtctcattttagtttgtccttgttagagtagttgaaatttttttctttttttttttttttggagacagaagtcttgtgctgtgtcgcccaggctggaaggctggagtgcagtggcgtgatctcggctcactgcaacctctacctcccaagttcaagcagttcttctgcctcagcctcccgagtagctgggactgcaggcacccgcccgcacacctggctaattttttgtattttagtagagatgaggtttcaccatgttgcccaggctgctcttgaactcctgaactcaggcaatccacccaccttagcctcccaaagtgctaggattacaggcataagccactgcgcccagccagttgaacatttttaaattgatttcttagccatttgtatttcttttttttttttttttttgagactgagtctcactcagtcgcccaggctggagtacagtggcatgatctcagctcactgcaacctccacctcccaggtttaagagattgtcctgcctcagcctcccgagtagctgggactaaaaatacaaaaaatcccggctaattttttgtatttttagtagagacaaggtttcaccgtgttagccaggatggtctcgatctcctgacctcatgatctgcccgccctggcctcccaaagtgctgggattacaggtgtgagccactgtgcccggctggccatttgtatttctcttacgagctgtctatgtttattgcccaattttctattggatagtttgtttttttctcacttattggtgggaatttcttaaatagtgaaaaattcacatggtatctctttttaacaaagaattttgggacacaacatgcacatggtacacatgcagaccagaaggtgggtgcaccgcaggcctgtcccccaccctgcctgcgtctccttggcaccctccccacgggcgactctgggaatacacccacacatgctcatggtcctgccccatgtgcagctgctcccatcttgcattttttaaaaaacttaatcatgaagatttttctatattggtgtataaagagacggggccaggtgcattgtctcgctcctgtaatcccagcactttgagaggccaaggcagacagatcacttgaggtcaggagtttgagaccagcttggccaaggtggtgaaacccgcctctaccaaaaatacaaaaatacaaaatacaggtggctgacgctgtaatcccagctacttgggaggctgagacaggagaatcacttgaacctgggaggcagaggttgcgatgagccaagatgttgccactgcactccagcctgggtgacagagtgagactatctctaaataaataaataaataaataaataaataaatcaataaatcaataaagagatggggtcttgctctgtccctcaggctggagtggagtggtgcagtctcagctcactgcagccttgacctcctggtctcaagtgatcctcctgcctcagcctcccaagtagctgggattacaggtgcgtgccaccacgcccagccaatttttgtattttttttgtagagatggggttttgccacgttgcccaggctggtcttgaactcctgagctcaggcagttcgcctgcctcggtctcccaaagtgctgggattacaggcacgagccaacgcacccagcccctctcttttttttttttttttgagatggcgtcttgctctgttgcccaggctagagtgcagtggcacgatctcggctcactgcaacctcagacttccgggttcacaccattctcctgcctcagcctcccgagtagctgggaccacaggcgcccgccaccatgcccagctaatttttcatatttttagtagagacggggtttcaccgcgttagccaggatggtctcgatctcctgacctcgtgatccgcccaccttggcctcccaaagtgctgggattacaggcgtgagccaccgtgcctggcctctcttttttttttttttttttatggtggcatggtattccctgtagggatgaatcagagtttttttgtttgtttgtttgtttgttttgagatggagtctcgctctgtagccctggctggagtgcagtggcgcaatctcggctcattgcaacctctgcctcccaggttcaagcgattctcctgcctcagcctcctgagtagctgggattacaggcgtgtgccaccacgcccagctaattttgtatttttagtagacagggtttcggcatgttggtcaggatggtcttgaactcctgacctcaagtgatctaccactttggcctcccaaagtgctgagattacaggcatgagccactgcgcctggcctaccgttgacatttcttacacgtctttttaagcacatatgggaatttcttcaggagcttaggatgtgttcttcaaagtagagtctttgttgtgtgaggtgggttcagtcggtagtgggtagtgtaaacttgctttgttccatagtggtcctggttcacacccctccccttagggtgttagacttcttttttttttttgagatggagtctctctctgtcacccaggctggagtgcagtggcgcgatctcggctcactgcaacctctgcctcccaggttcaagcgattttcctgcctcagcctcccgagtagctgggactgtaggcactcgccaccatgcccagctaatttttgtatttttagtagagacagggtttcaccatgttggccaggatggtctcaatctcttgaccttgtgacccgcccgccttggtcttccaaagtgctgggattacaggcgtgagccaccgtgcctggccttttttttttttttttttttggggtggggtcttgctctgtccccaaggctggagtacagtggtgtgatctcagctcagtgcaacttctgactcccaggctcaagcaattcgcctggctcagcctcccgagtagctgggattccaggtgtgtgccaccatatccagctaatttttgtatttttagtggagacagggtttcaccatgttggccaggctggtctcgaactcctgacctcatgatctgtctgcctcagcctcccaaagtgctgggattacaggcgtgagccactgtgcctggccaggatgttagactttttggctccctggccatttgggtttctttttctgcaaataattatttttgtattttttatttattttttttatatagggtcttgctttgtcaccacactagagtgcagtggcctgatcatgggtcattgtagtctcaacctcctgggctgaagtaatccttctgcctcagcctcctcagtagctgggactacaggcacgcactaccacgcctggctgttttttttttgtagagacaaaaatctcactatgttgcccaggctggtcttgaactcctggcctcaagcaatcttcccaccttggcctcccaaagtgctggagttacagacctgagccaccatgcccggccagataattctttgacagataatcctgctgacatgaactagacttccttaagacacatcatagaatcaatagcccagaaccataaagagcctctacttgtaagtttagagtcattttaagtaaggtagaactggagatcataagagatatgtactcttataatttttgattgtatgtttgtttctttttgagacagagtctcactctgtttgcccatgctggagcacagtggcgcgatcatagtttgttgcagcctcaacctcccaggttcaagggatccttgcaactcagcctcctgagtagctgagaccacaagcgcatgctatcacactagctgatttgatttttttgtagagttggggtctcactaagttgcttaggctggtctcaaactcctggctgcaagtggtcctcccaccttggcctcccaaagcgctgggattacaggcaggaaccacggtgcttggccaacaatttgcatgcctttaccacattccccaaatgttaacatttcacctcattttcttatcagtctctttatgtataacatgcatatgttttctgaatcatttaaatgtaaattgtgacataatgccccttttcccctaaatatgtatttcctgagagtaagaatttcattatgtatttcctaaaagcaaaaatgttctctttcccagtcacacaaaattatcagactcaggaactcaacactgagttcttcctccagcacttgacaagaatcaaagtgttggttagtgactgctttgggggatggggcaggactggcagcaggtggcccgatggcctgggtggtttgcctgccagcgatgctggtgggcaagccctgcctggaagctcctctctcccacgtttttcctgccgcccagtagttagaccacctggagccagaggagggggcccacccggtttcccagcctgtccctccagagctgggctccatttctggaggtagagaatggggcaagtctgggcatcttgtgctctttgctaggggaggaaagggctgtggctgctttccttgtcccccatttcccttctgccagtggggccaagccccagcagctcagtcaggagaagaggatatggatctgtctgggcctctctctttaagagaaagttgattcgtgccttccggatagtcttgttccagggtttctaaactttctgatcccaccttcatgttaaaatgagttttgatcatgtgtctctttagtaatatggacattataaaataggaaaaaaaagtctcttaaagcctaagtagttaaaaatttattttcacatcaggcatagtggctcatgccagtaatcccagcacttttagaggccaaagtgggaagatcgcttgaggctggagttggagaccagtctgggcaatacagtgagaccttgtctctaaattaaaaaaaaaaaaaaaaaaaaaattggccaggcatggtggctcatgcctgtaatcccagcactttgggatgccaaggcaggtggatcacctgaggtcaggagttcaagaccagcctggccaacatggtgaaaccccattagcggggcgtggtggcgtgcccctgtagtcccagctacttgggaggctgaggcgggagaatcacttgaacccggaaggcagaggttgcagtgagccgagattgcgccattgcactccagcctgggtgacagagtgagactccgtctcaaaaaaaaaaagccagttgtggtgtgtgtttgtaatcccagggaggctgagaagggaggatcacttgagctggggaggtcagggttgcaatgagccagtgtaatccagcgtgggccacagagtgagattctgcctcaaaaacaaaaccaaaaatatataacgagttaaaatcctacagtaaagaggctactgttttattctggttaaaccttagggttccttctatcaaacttaaactagaattttttttttttcttgagatggagtcgccctctgtcgcccaggctggagtgcagcagcttactgcaatctctgcctcccgtgttgaagcgattctcctgcctcagcctcccgagtagctgggattacaggtgtgtgccaccactcccagctaacttttgtgtttttagtagatacaggctggtctcaaactcctgaccaggctggttgttggccaggctggtctcaaactcctgacctcaagtgatccgcccacctcagcctccaaaagtgctgggattacaggtgtgagcctctgtgcccagccaagaaattattttttatttttgagatagagtcttgcttcgtctgttgcccaggctggtgtgcagtggcgtgatcttggctcattgcaacttccacctcctggactcaggcaattctccttcctcagcttcctgagtagctgggagtacagacgtgtgccaccacgcccggctaatttttgtatttttagtagagatggggttttaccacgttttcccacattggccaggctggtcttgaactcctgacctcaggtgatccacccgtctcggcctaccaaagtgctgggattacaggcttgagccaccgtgcccagcttataaattattgttattatttattattatttttttgagatggaatctcagtctgtcgtcgaggctgtagtgcagtggcgcgatctcagctcactgcaacctccgcctcctggattcaaggatttctcctccctcagcctcctgagtagctgggatacaggcacgcaccaccacacctggctaatttttgtattttttagtagagacggggtttcaccacattgcccaggctggtctcgaactcatgacctatgatccacccaccttggtcccccaaagtgctgggattacaggcgtgagccactgtgcccggcctataaattattttttaaggcacaaagtctcataggtaatttttaatcagagtcaaaagtaggatggggggcactctagaaagtaaaactccttatactttgtgaaaacacagttttttgtcctgtatccctgcccagagaccacctctgcctcccccaccaactacatatgggggtcaaggttgaggccccctggtctaacgggagagacagttgccgtatgggtggtagcaaaactccttaagggttgtgatttttttttttttttttttttttgagttggagtctccgtgtgtcgcccaggctggagtccagtggtgcgatcttggctcactgcaacctccacctcctgggttcaagcgattctcctgcctcagccccccggagtagctgggactgcaggtgcccaccaccacgcccggctaatttctttttgtatttgtagtagagatgaggattcaccctgttggccaggctggtatggaactcctgaccttgtgctccgtccacctcggcctcccaaagtgctgggattacaggcatgagccacggcgcctggctgtgccttttttctcttaatgatgttttgtgcaccctagtccgtgtcaccgcaggtactcccacccaccacgtaaatgggcgggaggcgctctgttttctggatatgctctcacgtagctcattaatctcttattttaagttccttctgattctcactatgctgaatgccacagtgaaaattctaaattgtagtgtatgtcctgcattatttccttaggcgccgctgcacttcagcctgggtaacagagcaagatcctattaaaaaaaaaaaagcaaacatgcttatggtagtacattttaaaaacatagaagattggaaaattggaaaaatccccatcaaaaatagtaaataacttaaaaatagcaacattttgggtatgttaccttccaatattgttttctgtgtaatttttttggtctcattttgccggagttgtaatgtatatgtagttttgtatcatgatccttttttatttttttgagacaaggtctcgctctattgcccaggctggagtacagtggtgcgatctcagctcgctgcagcgtcaagctctgggacttaagtgatcctcctgcctcagcctcctgagtagctgggactacaggcatgtgccgccacaccctgctaattttttattaaagatgctccccctttccggggtcccgcctcctcctctgagctttggctctggcttccctgcctcccccagctgcctggtctgacaggagagaaggacagttacagtgtacagtgacaccaaaaacatgctgtattgattatagtttatttttttttcttgtagaggtgggttcatgctgtgttgcccaggttgttgtccaactcctgagccgagcgatccacctgccttggcctgtcaaatgctgggattacaggcatgagccacctcacttggccatgatcctttttcaacttgatcatacagctgtttgtaaatatcaccatctatggcaataacagaactgactgcttatccccctgagcattcaagttttctctaggtaggttttcattattgtgaatatgctgtgccaaacatcctttttttttttttttttttttttttgagacagagtctcactctgtcttcaggctggagtgcagtggcatgatctcagctcactgcagcctccgcttcccgggttcaagcaattctcctgcctcagcctcccgagtagctgagactataggcgttcaccaccacgcccggctaatttttgtatttttagtagagacggggtttcaccatgttggccaggatggtctcaatctcctgacctcgtgatctgcccacctcggcctcccaaagtgctgggattacaggcatgagccaccgcacccggcctgtgccaaacatctttgtgcactaaagccttttctgtatttagggttatttccttagggtcatggaagtggaattgttgcgctgcaagacctgtaaatacattatagagctttggatcaaagttacgaattctgcttcagaggatggtgctttcattctgactggtttaaaaggctgctttctttgaagacaagcgaagtgagtgggacacagcccaggcgcagaaggtgaaggctgggatctccgcatggtggctgccagccccctgcaagggaggtcatgagcgtgggagatgactccccagcccccagccctcctcatccttgtccctaagaagagagtgagagcaaaacttgtggctgcggtgcagacaagcctgcctctttctcatgcagatgtgatgtttcccacacagggaggcagtcagaaaccagcatatgcccttctgtcttcccagccagcagcccaggaagggcaggtgctttgaaggagaggcccctaaccccctttcacggacattcacagggagtcaaggtggacgcgagagaccacagtg

SEQ ID NO: 10723 - DNA, 580 bp, Homo sapiens
acttgccggcacctgcagcccgcctagacccggcgctcgggcgtcccgcgctgcacttgctcgccgcgtgactggaggaccgagcccccacattttctttatgtggttgtggtgggggcacagtaatgccctgtgcgccgtagcgttcctgtggggatgtggccggggggcgtcgggaagcgtcactgcttgatgtccgagctcagcgatgaagccagcgagccggaactcctgaaccgcagcttgtccatgtggcacgggctcgggacacaggtcagcggggaggagctggatgtccccctggatcttcacacagctgcttccattggccagtatgaagtggtgaaggagtgtgtgcagcgggagccgatatgtggatttactcccttgatggaagcagctgctgctggccatgagataatcgtgcagtattttctgaatcactcgccctctgtcgcccaggctggagtgcagcagcttactgcaatctctgcctcccgtgttgaagcgattctcctgcctcagcctcccgagtagctgggattacagggagtcaaggtggacgcgagagaccacagtg

SEQ ID NO: 10724 - DNA, 2116 bp, Homo sapiens
cggctcagcccggggcacgcccatgcgcagcacctcggtgagggctgcaggcggacgccctgtcttcccgccctcagaggaacatgctttctgtgccaacctggggcccgtccagagcagcagcagcagcgagggcctggccagagcccaggggctcagcagcgaagcttctgtggagagcaacgaggtacggattctttctttcttggtctcccatagccggtccctggctgggatgcctgacatcccccagttactttaagatgagcatgtatgtaagaagcagctgctgcacgtgtgtgctgcactgggacgtgctgtgtccagggtctggcttctcagacgacagcgaacgcaccggaagcccctgtgtggcgggtggggggtttcacgaagcctctcaagcccctgtgtggcgggtgggggtttcaccaaggctctcaagttagcccgcgcactctttcagatgcacgcctctcactgcaggactcggatcatgcctgtaaaagctcagctcgcaaacaagctaaaagttacatgaagaccaagaatcctgacagccagtggcctccccgcgctgcaactgacagggaaggctttctcgctgagtccagcccccagactcagagggccccctactcaggaccccaggtaagaccgcttgtgaaactggaggttacactcagagacggcactttttgtgacttaggaggcatgtgttgtgtatatgacgtgccaggcgctgctaggagaacagaatggcggtggcatccccatggcctgttaggctccacaggctcacagccggctccatggctggcagccccgctgcagcgcttctactctgttcctctccacggaaaggacctgtctccctgctttccatactggagttggcctccctgagcctggggagaagaaaagcacacttgacctcagagctgcctgcaggagtctgacaagatgtggttgaagcagagacaggaactacacacagtgtgtgcttggtgatggttacagctgccaccatcctcctcctttctgtggtccctctgaccacacattaccttagggatcagaggtgtgactcacagctcagctgtctcacctgtgtctgctgagttctcctaccctgtgtgggcagaagaggcacggagaggagaggcagagggaagctctggttggttatttggtttgtttgttcgagacggagtctcgcactgtcatctgggctggagtgcagtggcgcgatctcggctcactgcaacctcctcctcctgggttcaagcgattctcctgcctcagcctcccaagtagctgggattacaggcacccgccaccatgcccatctaattttttgtatttttagtagagacgggatttcactatgttggccaggctggtctcaaattcctgacatcgtgatccgcccgcctcgacctcccaaagtgctgggattacaggcgtgagccaccacacctggcctggtgccatgcccggcctggctggttatttgttaaagcactggctttgctgttcagtagagccttggatttgccggcttctccctgcagcccctggctcagtgagcaggcacacgtctcggtcccttcaacatacgttgagtggagtctggtcagggtagtgtcctaagtatgtttctttcagaaaatagcttgaagaaaatgtcagagtaacatttgtttgtccattaaaagcaataaactctcaaaagtaggatttctggagttgaaaagtaaatgaaatgaaaatatcactagacgagctcacagcagaattgagcaggcagaagagtcagacaacttgtgaacacaggtcacctgagatcatctcgcttgaggaacagaaagaatgagtaaaaaaaattaacagaaatctgtgatcccctcaagcacaccgacaccaccccatacagtggcattccagaaggagagcagaaacgatgggtgagaaacagcctgaccatctcagtggatcagaaacacggatcttacatccagggagctcggtgaactccagacaggtgaactcggagaagagctgcgcttagacaagtggaaatcagaacatccgacactgagactctagaattaga

SEQ ID NO: 10725 - DNA, 555 bp, Homo sapiens
cggctcagcccggggcacgcccatgcgcagcacctcggtgagggctgcaggcggacgccctgtcttcccgccctcagaggaacatgctttctgtgccaacctggggcccgtccagagcagcagcagcagcgagggcctggccagagcccaggggctcagcagcgaagcttctgtggagagcaacgaggactcggatcatgcctgtaaaagctcagctcgcaaacaagctaaaagttacatgaagaccaagaatcctgacagccagtggcctccccgcgctgcaactgacagggaaggctttctcgctgagtccagcccccagactcagagggccccctactcaggaccccagcacaccgacaccaccccatacagtggcattccagaaggagagcagaaacgatgggtgagaaacagcctgaccatctcagtggatcagaaacacggatcttacatccagggagctcggtgaactccagacaggtgaactcggagaagagctgcgcttagacaagtggaaatcagaacatccgacactgagactctagaattaga

SEQ ID NO: 10726 - DNA, 20177 bp, Homo sapiens
agcccgagggcggcgcaaggcctgaggcccagcacaggtgggttccgcggcggcccggccccagcacttgccggcacctgcagcccgcctagacccggcgctcgggcgtcccgcgctgcacttgctcgccgcgtgactggaggaccgagcccccacattttctttatgtggttgtggtgggggcacagtaatgccctgtgcgccgtagcgttcctgtggggatgtggccggggggcgtcgggaagcgtcactgctgtgagttacgggtttgtcggccagggacccgccccggggccagtgagctacctttgcgatgcggttccacggggcgagagggggtgcctgggtgctttcacagacctcctctgtgggcgtgacagttaccaccagcatcacatttgttaagatttttaaaaattttttaatttttgtgggtacgtagtaggtgtatatatttatggcgtatatgagagattttgatacaggcatgcagttcgtaataatcacatgtaaaatgggggtctccatcccttcaagcatttatcctttgtgttacaaacaatatgattatactctttgaattatttttaaatgtgcagccgggcgcggtggctcactcacgcctgtaatcctagcactttgggaggcaaaggcgggcggatcacctgaagtcaaggatttgagaccagcctggccaacatggggacacttcgtctctactaaacatacgaaaactaggctggcatggtggctcatacctgtaatctcagctactcgggaagctgaggcaggagaatcgcttgaacccaggaggcggaggttgcattgagccgagatcacgccgctgcactctagcctgggtaacagagtgagattatgtctcaaaaaaaataataataaataaataaaatgtgcaattagattatattgactatagtcaccctgttgtgcggtcaaatactagatctttttttttttttttttttttttgagacggagtctcgctttgtcgcccaggctggagtgcagtggcttgatcaaatactagatcttattcattctgttttttttgtatccattaagcatccccaccctccactacccttcccagccttggttacactagaagtaaccatccttctactttctatgtccatgagttcagttgttttgatttttagataaccacaaataattgagaacatgcaatatttatctttctgtgcctggcttatttcactaaacataacgatctccgcttccatccatgtttttgcaaatgataggatctcattctttttttatggctgaatagtactccattgtgtctaagtaccacattttctttaggattcactgtaaaggtaacagatacttagcattttcagaatggacagaaccaaaaagttgaatgaaaactaaaacgtcttatctctaatgctactttacaccacaccactcgggatgggacattttagttttcactttagtgttttttttttgtttttttttttgagacagaatttcgctctgttgcccaggctggagtgcagtggcttgagctcggctcactgcaatcgcctcccaggctcaagcgattctcttgcctcagcctcctgagtactgagactacaggcgcccaccaccacacccagctaatttttgtaattttagtaaagatgggagttcaccattttggccagggtggtctcgaactcctggcctcaagtggtccgtcacgcttggtctggttctcattgtccttcagacctctggggatgtcagatatgcaagtctccagtaaatagagaacacggcctcaccctgcaggaggcctttggcgtggaagagacatgcccagtgaaggcttgagggaggtatggaagggactctgaactgaccctcagctcgtttggtttcttatccaggcttcgttggccagggctgttagggtgggattctcacctgcaaagtgagggaagggcactgcacgatcttgggctctgctagctgaagaggtggtggctccaggaaggagggctttgcttgccccaccgcacctacacacactcttcaccaagggtctgtgaagtgttcgtctcccacattggtggcttgtttctttagccatcttggctgtcacctggggcttggaagcattctttaatagaaactgaggtcctcatcgcatctattaactaccatagcacctgtaggtcatcacaacctgacaaggcctttgttttcgcctttgctccctttcctacccttgtttcctggcactcttgtacctaaggattctactaggaagctgatgaccttgccttgatttggggattcctggtgtgccgttacccatgtaggcccatctcggggaaagtgttacctcaccagttcaccggcctgttatatttccccccatagctctctcttcaaaggatgcctaagtggattcctattcagttgacggttgctgcgtgccaccagtcacatcctggtttgtctgttggggaattgctttctatttttttcagaaaaatttatttttacttttttgaaattttcaatttcataaccattccagaaaaattaatttatatttaaaatttacaggccaggtgcagtggctcacgcctatatttccaggactttgagaggctgaggcgggcggatcacctgaggtgaggagttcgagaccagcctggccaacatggtgaaacccccgtctctactaaaaatacaaaaattagcctaacatgatggcgcacacctgtaatctcagctattcaggtggctgaggctcaagaagcccttaaacccaggaggcagaggttccagtgagctgaaatcatgccactgcactccagcctgggcaacagagcgagactgtctcaaaaaaataaataaaatttacatacagtaaaattcattttggtgttcagttctgtggtttcataaaggcatggagtcacagatccaccgtcacagtcatacaggtctatcgtcccccaaattccctctctgccccaacctccaaccctttaattttgccttttccagaatgtcatgtaagtgaaattatactgtaggcaggcttcttccatttagcgtaaatcatttgaaattcattcacgtgttgcatgtcaactgttggatccttgtgtttaatgctgagtagcatccattatatggatgtgccaccgtttgtttatccattcttttatgtatcataatagcagcctttttagatatgtccccgttagacagtgaggcactagggattggagttgctaagtagcagagctgcttttttgttgttttttttttttgttttgtttttggagacaaagtcttgctctgtttcccaggctggagtgcaatggcgtgatcttggctcaccgcaacctccgcctcctcagttcaagtgatgctcctacctcagcctcccgagtagctggccttcatgcccagctaatttttgtatttttagtagagacaggatttcaccatgttggccaggctggtcttgaactcttgacctcaagtgatctgcccaccttggcctcccaaagtgctgggattacaggtgtgagccaccgcaccgggtccaagctgaattttgatcaaaccccaaatccagggttcttccccaccacatcaaggaactgattgggttaaacaacccaattagcatttcttcactgcccatccaagaggttgtcaggttcctagagttggtggagaattctcttttacctggtgcctgcggttggaaggaggagcaggtactccacagttaatgcctcaccatatgtgctcctctttactggtgtgatagcaggctcaccagatttagcatggttgggactgcccaaagcatacattatttcagcaaataaatttgtctgagttactcccggggttgactgcactgggttatcagtctgctagtgcagtggtgtagcaggggcaggaccagcctgtttcatgccctggaacaaccagccaggaaagatctaacccttgggccttcctcctcagtgatgtccgagctcagcgatgaagccagcgagccggaactcctgaaccgcagcttgtccatgtggcacgggctcgggacacaggtcagcggggaggagctggatgtccccctggatcttcacacagctgcttccattggccagtatgaagtggtgaaggagtgtgtgcagcggtaagagatctcggggaacttcctctcacattttgagcagcgcagtgatggcttcgatcccacgtgatggggctttgcacacagttgtggatgtttaatgcgtgtagaataggttaacctgcttatctcaggcagctgtcagtaagtattgatgctgagccctgacaaagaggccgtttttattcctaggaagaaaaagagggagtaaactttgatcagaagcttataaacagtcattctttaaccagactaattttattcactaattgcagaaatgcccaaacaaacaagcaaaataaaaataaagacagaaagtgatggcctggtgcggtggctcacacttgtaattccagcactttgggaggctgagatgggcgggtcacttgaggtcaggagtttgagaccattctggataacatgatgaaaccccatctctactaaaaatataaaagttagctgggtgtggtggcatgtacctgtaatcccagctactcaggaggctgaggcaggagaatcgcttgaacccgggaggtggaggttacagtgagctgagattgcgccactgcactctagcctgggcaacagagtgagactctgtctcaaaaacaaaaaaaagaaaaaagaaagtgatccctggccttcttttcccggagggttcattcgatccctgtgatccctgttcccctctagcttctgccatggaggaggagagaggctgggctttcagtgcctctggggaatgacctcccgacgtcactgcccacctgccctttgctaatctgtgtacaatagttagagacaatataaagcccctggcagggtccatggctgcgtcttgcccatagtaggatgtgatcatcttgtttttggaaaagggtcgtctcctcacttccacccccttatgttccacacacagcctaactctgtctcctggttctcatttgatattgtggtgcagcgacctctcttcctctctctgcgtgcctcttccagttcccagtgagccaaagcaaagcattgctgaagccccaggtctccggttcccaagttgtggccctcacttagacatacccagcccatggagtgctggtgcaccttggtacagggtggtctgttgcgctccctccacaggaggctctaggcataggcagctgggtatgcagtcagtacggcccctcaaagggtcacgtttggaattctcaggctcttaagtctttgggtgtcctgttaagatgcagagtccataaccgctccatagaggagcagggggaggcgtttgtgttgtgatgggattttgacactagctgaggtggaggcttgctgatagtaagcacaggatggggcctgaggggagctgggggcatcagaaggaaggggtggggctgaacgaggagtggtaagagagccccagggagatgctctgctgttgtgtaaaggaagatagtgttaggacgagctgggtgcattcgagccctgctgcagaggcatctccatgcagcccccctggccaggggctgccactgaaccctggtatcaggaccttctggaatggctgcccaggtgtgcatcccagagtcactgagggctgccaggcaatggaaggtagttgcctgctgtggtctaatatgtgaatcccggctgggcgcggtggctcacgcctgtaatccagcactttgggaggctaaggcgggtggatcacgaggtcaggagatcgagaccatcctggctaacacggtgaaaccccatctctactaaaaatacaaaaaactagctgggcgtagtggcgggcgcctgtagtcccagctacttgggaggctgaggcaggagaatggcgtgaacttgggaggcggagcttgcagtgagccgagatcgcgccactgcactccagcctgggcgacagagcgagactctgtctcaaaaaaacaacaaaaaagtgaatcccgtaaaagggacagatcctggggttcagtcaccagttgttatcccctctgcaggcaagaactggggaagggaaagaaggcctgtgggcgttaaccatgtaggatcccaggtaaccatgcaagtgggtattattttaaatgtgactcccttgtcccaaccccagagtcgcagctaggaagcccacagttttttcccatgggaaaatgcattgccagaattttaacagcaatcagtgagaaagatgggattctttggtcacagatttttcaagaatgtttctttaaggtgaggtgacaaaggatgaatcagtggcggtgggacttgtccacggtggagtcccttctttcctcactgctcctctccacccagcagtgggctagtagatgccaggcctgtggtggtcagggtttttcaactgtggctgtgttgacaatccaggctggatcattctttgctgtgggggctgtcctggacactgtgggatgtttagcggcagccttggcctccagcagcccttccctgcccagttgtgagaaccaaaaatgccttcacacattgccacatattccctggttgagtgccatctgcctatctggtggtgtgaaagagcatagctggccttgggctaggaggatgcgaaatcagagcaaggagacgaaggctcagggcctcacaaggcagtgtacgagcaactgtcagcatttttctgcctgcctgcctccaatccccacaacgtccagggtggcagataacttctgcttcctgtcaactcatcccgcctggcctagcctcgccaccagctttggtgaaccccacatgcgaggcggctggccatgtctagcatatcttgcgtttgtttaggagagagttagatttgaataagaagaatggtggtggctggaccccgctgatgtatgcctcctacattggccacgacacaatcgtgcacctgctgcttgaggcgggggtgagtgtgaatgtgccgaccccagaagggcagactccactgatgctggcctccagctgtggcaacgagagcatcgcctactttcttctccaggtgagctacgagggaactcaggcccagaaacctgaggggctccgtggccaccctgacagagatgcgaaccactgcaggccacggtgttcgtgtgtgctcgtgtaatcacttctgattcttgcagcatggccgcctggagggcgcccgccccacgcagaggagatgaggccgtaacgcacgttctgtgttctcttgaagcaaggtgcagagctagaaatgaaagacatccagggctggacagccctcttccactgtaccagcgccgggcaccagcacatggtcaggttcctcttggacagtggagccaatgccaacgtgaggtgattgccacatctttagtggccacaggagtggcctaggtgtcatctgactctaaggagggtggctctggaggcagctaaccagagtttagggccaccctgcttcggcacgagaggctcaagatgaggggtaggaccagagtccttccaggcacaggccttttcgtacatctgtgagatgcatctcttcaagccctctcagcttccttttctttatctgaaacccacctgggtcatacagttgtaagaattacatgttttattgtatgccaggggcctaacatactgaatggcatttaaatgtcatacattacatgcaaattccttccattttcttgctttttgtatggatgaggtgaggtgatgctttgaaacagtcatgaggccgggcgtggtggctcacgcctgtgatcccagctctttgggaggccgaggtaggcagatcacgaggtcaggagatcgagaccatcctggctaacatggtgaaaccccatctctactaaaaatacgaaaaaattagctgggcatggtgacgggcgcctgtagtcccagctactcgggaggctgaggcaagagaatggtgtgaacccgggaggtggagcttgcagtgagccgagattgcaccactgcactccagcctgggtgacagagcaagactccatctcaaaaaaaaaaaaacaaaaacaacagtcatgagttttggccgggctcagtggctcacacctgtaatcctagcactctgggaggccaaggcgggcagatcatgaggtcaggagttcgagaccagtctggccaacatggtgaaaccccgtctctactaaaaatacaaaaattagctgggcgtggtggcaggtgcctgtaatcccagctactcgggagtctgaggcgggagaatcacttgaaaccagaaggcagaggttgcagtgaactgagagatcgtgccactgcactccagcctgagcaacaagagcaaaactctgtctcaaaaacaaacaaaaaaccagtcatgagttttataagttggaagtgggattgttgtctaaagcttgtcatgataataatcacctttgaacaaacgcagcgggtaccaatgcagcacccaccctggctgtcattcattctaagacacctgataattttgtatgccactaagaaagaaaaaatatgctactaattaacattcaactcgcctgttgatttaaagatgttttctgacttgagagatgttaaaatatgaacactgtgtgtcttaagatggatgaaaaccagcatttcccatgcatggttcctgacttccaaaccagcatgagacaaggagggatttggaagccctctgaagacagtgccgagttagcataaccaagcatgaaaagcaagcttcaggagctaagcgtggcaaagatagcttagatcattagtacttgaacttttcagagtgggttcatggaggacgttgaacttgaagccaggatttggatgaatggatgggagatgctggctttctgtgaggaattagaacagctttttgaatatgattgaggtggagatttcagaggtagccagtgggaatagccaacaggtgggacgacaggcagacatctgtctttaggacaaagaccagccctggggacagacaccagaagagtaaatggagctgatgtgttatattcactgttctcatgtcacctgttaattctggaaagggacagtgttctacgcttagggatcggtgactcgtgcactgctcagggtttatcttcagcagggagtttttgcctggcggaacttgtctcttccaatcatctgactgtggcccacatcttgcagggagccgatatgtggatttactcccttgatggaagcagctgctgctggccatgagataatcgtgcagtattttctgaatcacgtaagtgaccctgattattagcatgtaatgtagtcacggcaaatgaggaatcatattactgaagtataagctattacagaattttcctttgcacagaaataactttcattcatttattcaacacattttcattatctattgacgcccggtgttgagtggtgcttaggcattaaggatacagtggtgagtagaaatagacacctattcctgtaataattttgaaaatactatctgaaaattatggaaaaatattttaaaagtaaatagcactcataatcctgtcacttagaaaaattatatagaataagaaggcagagatcctcctctctttttcaacctccctgatgcccacttggtttgagaaagagctgccctaggacttttcctctgctgtggaaagatgtgtctgtaggcaagtgtgtgcacattgctttgtgttttgaacaaagtgggattctacgtatagtctgtaacttagagacatcttatagacatcttatctttgtacagtattccgtgtacaatctgcctcagttaatttaatgagtttcttattagtagaaacttagtttttaacattttgcaattataaacagtgttccgggaatatccttttacacatagctttaatacatttgcagttatttctgtatgttgtatttctgttttattttattaatttatttttttgagacatggtgttgccctgtatcccaggctggagttcagtggcgagatcgtggctcactgcagcttcagcctcctgggctcaagcgatcctcctgcctcagcccccaagtagctgggactacaggtgcatgctaccatgccccggctaattatttaattttttttttttggtagagttgggggtctcagtatgttgtgcaggctagtcttgaattcctgagctcaagcgatcacctcagcctcccaaagtgctgggatcacaggtgcaagcctgtccacacagaaccttgtacataaatattcatagcagtattattcataattgccaaaaagtagaaaaacccacaagtccatctactgaggaattgataaacaaaatatatatctgtatagcaggatattattcggccctacaaagtaatgcagtactgctgcatgctgcggcaggggtgaaccctgatgcgttaggctgggctgggtgcggtggcgcacgccggtaatcccaacactttgggaggctgaggccagagggtcgcttcagccctggagttggaggttgcagtgagctatgattgcgccgccacactccattctgggtcacagagtggatcctgcctcaaaaagaaaaagaaaaggaaaacattcggctcagtgaaagaagccagacacaacaggccacacactaggtgatttcactcataggaaatgtccagaataagcaaatacatagacagaaaatagatgagtggtttcctgggtcttggggaatgggaagattggggtgataaaaatgtgctaaaattgtttgtggtgatggttgaacaactgtgaatatacgagaagccgttgaattgtacattgtaagtgggtgacttgttggtatgtggattatatctttataaggctgttaaacccaatggggggaagtgcaggcggtcctgatgaattcccactaccaaggttgtctgttgtcctgcccaccagtcatagacaaaggtgtccattttctcttgtcctcaccagtcctgatgtcagtcaaccttttgtcaatctggcgggtgaattgtagcgtctcattttagtttgtccttgttagagtagttgaaatttttttctttttttttttttttggagacagaagtcttgtgctgtgtcgcccaggctggaaggctggagtgcagtggcgtgatctcggctcactgcaacctctacctcccaagttcaagcagttcttctgcctcagcctcccgagtagctgggactgcaggcacccgcccgcacacctggctaattttttgtattttagtagagatgaggtttcaccatgttgcccaggctgctcttgaactcctgaactcaggcaatccacccaccttagcctcccaaagtgctaggattacaggcataagccactgcgcccagccagttgaacatttttaaattgatttcttagccatttgtatttcttttttttttttttttttgagactgagtctcactcagtcgcccaggctggagtacagtggcatgatctcagctcactgcaacctccacctcccaggtttaagagattgtcctgcctcagcctcccgagtagctgggactaaaaatacaaaaaatcccggctaattttttgtatttttagtagagacaaggtttcaccgtgttagccaggatggtctcgatctcctgacctcatgatctgcccgccctggcctcccaaagtgctgggattacaggtgtgagccactgtgcccggctggccatttgtatttctcttacgagctgtctatgtttattgcccaattttctattggatagtttgtttttttctcacttattggtgggaatttcttaaatagtgaaaaattcacatggtatctctttttaacaaagaattttgggacacaacatgcacatggtacacatgcagaccagaaggtgggtgcaccgcaggcctgtcccccaccctgcctgcgtctccttggcaccctccccacgggcgactctgggaatacacccacacatgctcatggtcctgccccatgtgcagctgctcccatcttgcattttttaaaaaacttaatcatgaagatttttctatattggtgtataaagagacggggccaggtgcattgtctcgctcctgtaatcccagcactttgagaggccaaggcagacagatcacttgaggtcaggagtttgagaccagcttggccaaggtggtgaaacccgcctctaccaaaaatacaaaaatacaaaatacaggtggctgacgctgtaatcccagctacttgggaggctgagacaggagaatcacttgaacctgggaggcagaggttgcgatgagccaagatgttgccactgcactccagcctgggtgacagagtgagactatctctaaataaataaataaataaataaataaataaatcaataaatcaataaagagatggggtcttgctctgtccctcaggctggagtggagtggtgcagtctcagctcactgcagccttgacctcctggtctcaagtgatcctcctgcctcagcctcccaagtagctgggattacaggtgcgtgccaccacgcccagccaatttttgtattttttttgtagagatggggttttgccacgttgcccaggctggtcttgaactcctgagctcaggcagttcgcctgcctcggtctcccaaagtgctgggattacaggcacgagccaacgcacccagcccctctcttttttttttttttttgagatggcgtcttgctctgttgcccaggctagagtgcagtggcacgatctcggctcactgcaacctcagacttccgggttcacaccattctcctgcctcagcctcccgagtagctgggaccacaggcgcccgccaccatgcccagctaatttttcatatttttagtagagacggggtttcaccgcgttagccaggatggtctcgatctcctgacctcgtgatccgcccaccttggcctcccaaagtgctgggattacaggcgtgagccaccgtgcctggcctctcttttttttttttttttttatggtggcatggtattccctgtagggatgaatcagagtttttttgtttgtttgtttgtttgttttgagatggagtctcgctctgtagccctggctggagtgcagtggcgcaatctcggctcattgcaacctctgcctcccaggttcaagcgattctcctgcctcagcctcctgagtagctgggattacaggcgtgtgccaccacgcccagctaattttgtatttttagtagacagggtttcggcatgttggtcaggatggtcttgaactcctgacctcaagtgatctaccactttggcctcccaaagtgctgagattacaggcatgagccactgcgcctggcctaccgttgacatttcttacacgtctttttaagcacatatgggaatttcttcaggagcttaggatgtgttcttcaaagtagagtctttgttgtgtgaggtgggttcagtcggtagtgggtagtgtaaacttgctttgttccatagtggtcctggttcacacccctccccttagggtgttagacttcttttttttttttgagatggagtctctctctgtcacccaggctggagtgcagtggcgcgatctcggctcactgcaacctctgcctcccaggttcaagcgattttcctgcctcagcctcccgagtagctgggactgtaggcactcgccaccatgcccagctaatttttgtatttttagtagagacagggtttcaccatgttggccaggatggtctcaatctcttgaccttgtgacccgcccgccttggtcttccaaagtgctgggattacaggcgtgagccaccgtgcctggccttttttttttttttttttttggggtggggtcttgctctgtccccaaggctggagtacagtggtgtgatctcagctcagtgcaacttctgactcccaggctcaagcaattcgcctggctcagcctcccgagtagctgggattccaggtgtgtgccaccatatccagctaatttttgtatttttagtggagacagggtttcaccatgttggccaggctggtctcgaactcctgacctcatgatctgtctgcctcagcctcccaaagtgctgggattacaggcgtgagccactgtgcctggccaggatgttagactttttggctccctggccatttgggtttctttttctgcaaataattatttttgtattttttatttattttttttatatagggtcttgctttgtcaccacactagagtgcagtggcctgatcatgggtcattgtagtctcaacctcctgggctgaagtaatccttctgcctcagcctcctcagtagctgggactacaggcacgcactaccacgcctggctgttttttttttgtagagacaaaaatctcactatgttgcccaggctggtcttgaactcctggcctcaagcaatcttcccaccttggcctcccaaagtgctggagttacagacctgagccaccatgcccggccagataattctttgacagataatcctgctgacatgaactagacttccttaagacacatcatagaatcaatagcccagaaccataaagagcctctacttgtaagtttagagtcattttaagtaaggtagaactggagatcataagagatatgtactcttataatttttgattgtatgtttgtttctttttgagacagagtctcactctgtttgcccatgctggagcacagtggcgcgatcatagtttgttgcagcctcaacctcccaggttcaagggatccttgcaactcagcctcctgagtagctgagaccacaagcgcatgctatcacactagctgatttgatttttttgtagagttggggtctcactaagttgcttaggctggtctcaaactcctggctgcaagtggtcctcccaccttggcctcccaaagcgctgggattacaggcaggaaccacggtgcttggccaacaatttgcatgcctttaccacattccccaaatgttaacatttcacctcattttcttatcagtctctttatgtataacatgcatatgttttctgaatcatttaaatgtaaattgtgacataatgccccttttcccctaaatatgtatttcctgagagtaagaatttcattatgtatttcctaaaagcaaaaatgttctctttcccagtcacacaaaattatcagactcaggaactcaacactgagttcttcctccagcacttgacaagaatcaaagtgttggttagtgactgctttgggggatggggcaggactggcagcaggtggcccgatggcctgggtggtttgcctgccagcgatgctggtgggcaagccctgcctggaagctcctctctcccacgtttttcctgccgcccagtagttagaccacctggagccagaggagggggcccacccggtttcccagcctgtccctccagagctgggctccatttctggaggtagagaatggggcaagtctgggcatcttgtgctctttgctaggggaggaaagggctgtggctgctttccttgtcccccatttcccttctgccagtggggccaagccccagcagctcagtcaggagaagaggatatggatctgtctgggcctctctctttaagagaaagttgattcgtgccttccggatagtcttgttccagggtttctaaactttctgatcccaccttcatgttaaaatgagttttgatcatgtgtctctttagtaatatggacattataaaataggaaaaaaaagtctcttaaagcctaagtagttaaaaatttattttcacatcaggcatagtggctcatgccagtaatcccagcacttttagaggccaaagtgggaagatcgcttgaggctggagttggagaccagtctgggcaatacagtgagaccttgtctctaaattaaaaaaaaaaaaaaaaaaaaaattggccaggcatggtggctcatgcctgtaatcccagcactttgggatgccaaggcaggtggatcacctgaggtcaggagttcaagaccagcctggccaacatggtgaaaccccattagcggggcgtggtggcgtgcccctgtagtcccagctacttgggaggctgaggcgggagaatcacttgaacccggaaggcagaggttgcagtgagccgagattgcgccattgcactccagcctgggtgacagagtgagactccgtctcaaaaaaaaaaagccagttgtggtgtgtgtttgtaatcccagggaggctgagaagggaggatcacttgagctggggaggtcagggttgcaatgagccagtgtaatccagcgtgggccacagagtgagattctgcctcaaaaacaaaaccaaaaatatataacgagttaaaatcctacagtaaagaggctactgttttattctggttaaaccttagggttccttctatcaaacttaaactagaattttttttttttcttgagatggagtcgccctctgtcgcccaggctggagtgcagcagcttactgcaatctctgcctcccgtgttgaagcgattctcctgcctcagcctcccgagtagctgggattacaggtgtgtgccaccactcccagctaacttttgtgtttttagtagatacaggctggtctcaaactcctgaccaggctggttgttggccaggctggtctcaaactcctgacctcaagtgatccgcccacctcagcctccaaaagtgctgggattacaggtgtgagcctctgtgcccagccaagaaattattttttatttttgagatagagtcttgcttcgtctgttgcccaggctggtgtgcagtggcgtgatcttggctcattgcaacttccacctcctggactcaggcaattctccttcctcagcttcctgagtagctgggagtacagacgtgtgccaccacgcccggctaatttttgtatttttagtagagatggggttttaccacgttttcccacattggccaggctggtcttgaactcctgacctcaggtgatccacccgtctcggcctaccaaagtgctgggattacaggcttgagccaccgtgcccagcttataaattattgttattatttattattatttttttgagatggaatctcagtctgtcgtcgaggctgtagtgcagtggcgcgatctcagctcactgcaacctccgcctcctggattcaaggatttctcctccctcagcctcctgagtagctgggatacaggcacgcaccaccacacctggctaatttttgtattttttagtagagacggggtttcaccacattgcccaggctggtctcgaactcatgacctatgatccacccaccttggtcccccaaagtgctgggattacaggcgtgagccactgtgcccggcctataaattattttttaaggcacaaagtctcataggtaatttttaatcagagtcaaaagtaggatggggggcactctagaaagtaaaactccttatactttgtgaaaacacagttttttgtcctgtatccctgcccagagaccacctctgcctcccccaccaactacatatgggggtcaaggttgaggccccctggtctaacgggagagacagttgccgtatgggtggtagcaaaactccttaagggttgtgatttttttttttttttttttttttgagttggagtctccgtgtgtcgcccaggctggagtccagtggtgcgatcttggctcactgcaacctccacctcctgggttcaagcgattctcctgcctcagccccccggagtagctgggactgcaggtgcccaccaccacgcccggctaatttctttttgtatttgtagtagagatgaggattcaccctgttggccaggctggtatggaactcctgaccttgtgctccgtccacctcggcctcccaaagtgctgggattacaggcatgagccacggcgcctggctgtgccttttttctcttaatgatgttttgtgcaccctagtccgtgtcaccgcaggtactcccacccaccacgtaaatgggcgggaggcgctctgttttctggatatgctctcacgtagctcattaatctcttattttaagttccttctgattctcactatgctgaatgccacagtgaaaattctaaattgtagtgtatgtcctgcattatttccttaggcgccgctgcacttcagcctgggtaacagagcaagatcctattaaaaaaaaaaaagcaaacatgcttatggtagtacattttaaaaacatagaagattggaaaattggaaaaatccccatcaaaaatagtaaataacttaaaaatagcaacattttgggtatgttaccttccaatattgttttctgtgtaatttttttggtctcattttgccggagttgtaatgtatatgtagttttgtatcatgatccttttttatttttttgagacaaggtctcgctctattgcccaggctggagtacagtggtgcgatctcagctcgctgcagcgtcaagctctgggacttaagtgatcctcctgcctcagcctcctgagtagctgggactacaggcatgtgccgccacaccctgctaattttttattaaagatgctccccctttccggggtcccgcctcctcctctgagctttggctctggcttccctgcctcccccagctgcctggtctgacaggagagaaggacagttacagtgtacagtgacaccaaaaacatgctgtattgattatagtttatttttttttcttgtagaggtgggttcatgctgtgttgcccaggttgttgtccaactcctgagccgagcgatccacctgccttggcctgtcaaatgctgggattacaggcatgagccacctcacttggccatgatcctttttcaacttgatcatacagctgtttgtaaatatcaccatctatggcaataacagaactgactgcttatccccctgagcattcaagttttctctaggtaggttttcattattgtgaatatgctgtgccaaacatcctttttttttttttttttttttttttgagacagagtctcactctgtcttcaggctggagtgcagtggcatgatctcagctcactgcagcctccgcttcccgggttcaagcaattctcctgcctcagcctcccgagtagctgagactataggcgttcaccaccacgcccggctaatttttgtatttttagtagagacggggtttcaccatgttggccaggatggtctcaatctcctgacctcgtgatctgcccacctcggcctcccaaagtgctgggattacaggcatgagccaccgcacccggcctgtgccaaacatctttgtgcactaaagccttttctgtatttagggttatttccttagggtcatggaagtggaattgttgcgctgcaagacctgtaaatacattatagagctttggatcaaagttacgaattctgcttcagaggatggtgctttcattctgactggtttaaaaggctgctttctttgaagacaagcgaagtgagtgggacacagcccaggcgcagaaggtgaaggctgggatctccgcatggtggctgccagccccctgcaagggaggtcatgagcgtgggagatgactccccagcccccagccctcctcatccttgtccctaagaagagagtgagagcaaaacttgtggctgcggtgcagacaagcctgcctctttctcatgcagatgtgatgtttcccacacagggaggcagtcagaaaccagcatatgcccttctgtcttcccagccagcagcccaggaagggcaggtgctttgaaggagaggcccctaaccccctttcacggacattcacagggagtcaaggtggacgcgagagaccacagtggagccacagcccggatgctggccaagcagtacggacacatgaagatcgtggccttgatggacacttactcgccctctctgcccaagagcctctatcggagcccaggtacccacacctgccagccgcgccctgctggggtc

SEQ ID NO: 10727 - DNA, 572 bp, Homo sapiens
agcccgagggcggcgcaaggcctgaggcccagcacagtgatgtccgagctcagcgatgaagccagcgagccggaactcctgaaccgcagcttgtccatgtggcacgggctcgggacacaggtcagcggggaggagctggatgtccccctggatcttcacacagctgcttccattggccagtatgaagtggtgaaggagtgtgtgcagcgggagccgatatgtggatttactcccttgatggaagcagctgctgctggccatgagataatcgtgcagtattttctgaatcacggaggcagtcagaaaccagcatatgcccttctgtcttcccagccagcagcccaggaagggcaggtgctttgaaggagaggcccctaaccccctttcacggacattcacagggagtcaaggtggacgcgagagaccacagtggagccacagcccggatgctggccaagcagtacggacacatgaagatcgtggccttgatggacacttactcgccctctctgcccaagagcctctatcggagcccaggtacccacacctgccagccgcgccctgctggggtc

SEQ ID NO: 10728 - DNA, 2387 bp, Homo sapiens
gggccttcctcctcagtgatgtccgagctcagcgatgaagccagcgagccggaactcctgaaccgcagcttgtccatgtggcacgggctcgggacacaggtcagcggggaggagctggatgtccccctggatcttcacacagctgcttccattggccagtatgaagtggtgaaggagtgtgtgcagcggagagagttagatttgaataagaagaatggtggtggctggaccccgctgatgtatgcctcctacattggccacgacacaatcgtgcacctgctgcttgaggcgggggtgagtgtgaatgtgccgaccccagaagggcagactccactgatgctggcctccagctgtggcaacgagagcatcgcctactttcttctccagcaaggtgcagagctagaaatgaaagacatccagggctggacagccctcttccactgtaccagcgccgggcaccagcacatggtcaggttcctcttggacagtggagccaatgccaacgtgagggagccgatatgtggatttactcccttgatggaagcagctgctgctggccatgagataatcgtgcagtattttctgaatcacggagtcaaggtggacgcgagagaccacagtggagccacagcccggatgctggccaagcagtacggacacatgaagatcgtggccttgatggacacttactcgccctctctgcccaagagcctctatcggagcccagaaaagtacgaagatctgagctcttctgacgagtcctgccctgctcctcagagacagaggccttgccggaagaagggtgtcagcatccacgagggaccgcgagccctggccaggatcacaggcattggcctgggcggcagagccccacggcctcgctatgagcaggctcctccccgtggctatgtcaccttcaacagcagtggcgagaaccccctggaagaagagggcctctgctgccgggatgtcacctcccccatcaatgagcgggatgtggagagcagcagcagcagcagcagtcgggaggaacatgctttctgtgccaacctggggcccgtccagagcagcagcagcagcgagggcctggccagagcccaggggctcagcagcgaagcttctgtggagagcaacgaggactcggatcatgcctgtaaaagctcagctcgcaaacaagctaaaagttacatgaagaccaagaatcctgacagccagtggcctccccgcgctgcaactgacagggaaggctttctcgctgagtccagcccccagactcagagggccccctactcaggaccccaggaccttgccgcactgctggagcagatcgggtgtctgaagtacctgcaggtgtttgaggagcaggacgtggacctccgcatctttctgaccctcactgagagcgacctgaaggaaattggcatcacgctgtttgggcccaagaggaagatgacgtccgccattgcccgctggcacagcagtgcccgcccacccggggatgccctggagctggcctacgccgaccggctggaggctgagatgcaggagctcgccatccagctgcacaagcgctgcgaggaggtagaggccacgcggggccaggtgtgtcaggagcaggagctgcgcgccgtggtggagagctgcctgctggagcaggaccgcgcccgcgaggacctccaggcccggctgcgggagacgtgggccctggcccgggatgctgccctcgtcctggaccagctgcgagcctgtcaagctgagctgtcatctcgagtgaggcaggaccagccccctggtgcagccactctgggcctagccgtccccccagctgactccaagggctggcaagcgtccctgcaggccatgagcctccccgagctctcgggagccctggaggaccgtgtccgtgagatggggcaagcactgtgcttagtgacccagagcctggagaagctgcaggtgctgaacgggaagaagtggcgggagacctagcctgcgggccgaatctgacgttgggtgattggtccaccctgaagctgtgtgccagggagtgaggaggacagtgagcaggtagctgccatgtgcagcccaggcccagtgggggccagaggatcaggccccgggagcagccggcagacagaggcaagacgggggctgcggccctggctcggcagctcgggccagcactgaggcgggacgagggcctcacccagaacctcgtggtgaggcccagagttcatgggctgccctggcccataccaggcagggccctggggggaaagtgtatccatatacacgcacaggtgccaactgaggtgggaccttaggaatgaggactggggcacctggaaaatgccattttttggaaaataaaatttaagaacagctag

SEQ ID NO: 10729 - DNA, 4033 bp, Homo sapiens
gctttcactccggctcgctctccggagagtcctgttccagacttctcagggtttttacagcacaaacaactgcatacggcccgaggggaggctgaaaaggacttgtgtgtggtggttttattgcctgtcatcactttgctggcctcctcccgactggagcctggaggttcacagtggatttctttctgccgaagacaccaaggcactgaggaaggatcccttctccttctgttgactctttctatttttatggtttaagtttatctattcatggggctgaaaagcgtttgcaaatccatcaacggcgaagtgtggcaagccgcccagcgtcacgtcgtcgcctgcctgtggtcaggcattcctcactcccaccaggcagaaggtcaataaaaatggaggcaagctcttctggaatcactaatggaaaaaccaaagtcttccacccagaaggaggtgtggatttgcaaggctaccagctggatatgcaaatactacctgacgggccaaagagtgatgtggacttttcagagattcttaatgcaatacaagaaatggccaaggatgtcaatattctttttgatgaattagaagctgtcagcagtccttgcaaagatgacgattctcttcttcaccctggaaacctgactagtacttcagatgatgccagcagattggaagccgggggagagacagtgccagaaagaaacaaatcaaatggactttactttcgagatggaaagtgtcgaattgactacatccttgtgtacagaaaatccaacccccagactgaaaagagagaagtatttgaaagaaacattagagcagaaggattgcaaatggagaaagagtcctctctaataaatagtgacattatctttgtgaagttgcatgccccatgggaagtccttggaagatatgcagaacaaatgaatgtaagaatgcctttcaggagaaaaatctattacctgccccgccgttacaagttcatgagcaggatcgataaacaaataagcaggtttcggagatggttacctaagaagccaatgaggctggacaaggagacactgccagacctggaggagaatgactgctacactgcccctttcagccagcaaaggatccatcacttcatcatacacaacaaagaaacgttcttcaacaatgccacaagaagtagaatcgtgcatcacattttacaaagaataaaatatgaagaaggaaaaaacaagattggtctgaatcgtttgcttaccaatggctcctatgaagctgcgtttcccctgcatgagggaagttatagaagtaaaaactccattcgaacccatggagcagaaaaccaccgacatctactctatgagtgctgggcctcctggggcgtgtggtataaataccaacctttggatcttgtaaggcggtactttggagagaagattgggttatattttgcctggttgggctggtacaccggcatgctcttcccagctgccttcattggattgtttgtctttttgtatggcgtcaccactctggatcacagccaagtcagtaaagaagtctgccaagctacagatatcatcatgtgtcctgtgtgtgataaatactgtccattcatgaggctgtcagacagctgtgtatatgccaaggtaacccacctttttgacaatggagccactgtcttctttgctgttttcatggcagtctgggcaacagttttcctggagttttggaaaagacggcgagcagtaattgcttatgactgggatttgatagactgggaagaagaggaggaagaaatacgaccccagtttgaagccaagtattccaagaaagagcggatgaatccaatttctggaaagccagaaccttatcaagcatttacagataaatgcagcagacttatcgtttctgcatctggaatattttttatgatctgcgtggtgattgctgccgtgttcgggatcgtcatttaccgggtggtgactgtcagcactttcgctgcctttaagtgggcgttaatcaggaataactctcaggttgcaaccacagggactgctgtgtgcatcaacttctgtatcattatgttgctgaatgtgctctatgaaaaagttgccctgcttctgacgaatttagaacagcctcgcacagagtctgagtgggagaacagcttcaccctgaaaatgtttctttttcagtttgtcaatctgaacagctccacattttacatcgcattcttcctcggaagatttacaggacacccaggtgcctacttgaggctgataaacaggtggagactagaagagtgccaccctagtggatgccttattgatctgtgtatgcaaatgggtattataatggtgctaaagcagacctggaataatttcatggaacttggctacccgttaattcagaattggtggactagaagaaaagtacgacaagaacatggacctgaaaggaaaataagtttcccacaatgggaaaaggactataaccttcagccgatgaatgcctatggactcttcgatgaatacttagaaatgattcttcagtttggattcacaactatctttgtggcagcttttcccctagcaccacttctggccttactgaataacataattgaaattcgacttgatgcttacaaatttgtcacacagtggaggagacctttagcttcaagggccaaagacataggaatttggtatggaattcttgaaggcattggaattctctctgttatcacaaatgcatttgtcatagcgataacatctgactttatccctcgcttggtgtatgcttataagtatggaccttgtgcaggccaaggagaagctgggcaaaagtgcatggttggctatgtgaatgccagcttgtctgtatttcgaatttctgactttgagaaccgatctgagcctgaatctgatggcagtgagttctcggggactcctcttaagtactgcagataccgggactaccgtgacccgcctcattcactggtgccctatggctacacactgcagttttggcatgtcctagctgctcgattagcttttatcattgtctttgagcacctcgtgttttgtataaagcacctcatttcatatctgatcccagacctcccaaaagacctaagggatcgaatgagaagagagaagtacttgattcaggagatgatgtatgaagcagaactggaacgtctccagaaggaacgaaaggagaggaagaagaatggaaaagcacaccacaacgagtggccgtgaccataaaatagtccctttccaggccaaggacctgaattctgtttacttcttctggctgtgcaaaagcacactcaagtgaatgactaaaaatgcaaccacagtgcatgttgcagataccggcggccgcaggaggggcagcatccagtagaggactggcgttggagtcacactgctgtgaaatcacgttgcagtccagcgcacaattgctatctatccatagaccattcttgaccaagcaagcatgcacattatgggcagttacattctcaagtttttaaaatcaaggggaacttgtatactgggcctgtttttcagcctgtttgctaccttttttgcattctatcccatgtgaattttacagacactgggctaaaaagggtattcagacacatggacacacattcctagaatgtcatcatatggtcctaattccatgtcaccaacaacacagacaagaccctgtttacaactttttctttccttttttttaattttagacctttctgagaagattattatatatgacatatctatagctatgtgtatggccatagatgtatttctgtgtgtacatatgtatagtcatgtattcctgcatatgtacatacaaatacagagatatataaagtacatagaaattccttacttgtaaatagccaaaaagtactgacatgagtgaattttcacatttaaatagtcatcaatatgaagccatgattaatgcttgtataatgtgatgcaataaaatttaaaataaatttctgcacatggaa

SEQ ID NO: 10730 - DNA, 3909 bp, Homo sapiens
ctgttccagacttctcagggtttttacagcacaaacaactgcatacggcccgaggggaggctgaaaaggacttgtgtgtggtggttttattgcctgtcatcactttgctggcctcctcccgactggagcctggaggttcacagtggatttctttctgccgaagacaccaaggcactgaggaaggatcccttctccttctgttgactctttctatttttatggtttaagtttatctattcatggggctgaaaagcgtttgcaaatccatcaacggcgaagtgtggcaagccgcccagcgtcacgtcgtcgcctgcctgtggtcaggcattcctcactcccaccaggcagaaggtcaataaaaatggaggcaagctcttctggaatcactaatggaaaaaccaaagtcttccacccagtggccaaggatgtcaatattctttttgatgaattagaagctgtcagcagtccttgcaaagatgacgattctcttcttcaccctggaaacctgactagtacttcagatgatgccagcagattggaagccgggggagagacagtgccagaaagaaacaaatcaaatggactttactttcgagatggaaagtgtcgaattgactacatccttgtgtacagaaaatccaacccccagactgaaaagagagaagtatttgaaagaaacattagagcagaaggattgcaaatggagaaagagtcctctctaataaatagtgacattatctttgtgaagttgcatgccccatgggaagtccttggaagatatgcagaacaaatgaatgtaagaatgcctttcaggagaaaaatctattacctgccccgccgttacaagttcatgagcaggatcgataaacaaataagcaggtttcggagatggttacctaagaagccaatgaggctggacaaggagacactgccagacctggaggagaatgactgctacactgcccctttcagccagcaaaggatccatcacttcatcatacacaacaaagaaacgttcttcaacaatgccacaagaagtagaatcgtgcatcacattttacaaagaataaaatatgaagaaggaaaaaacaagattggtctgaatcgtttgcttaccaatggctcctatgaagctgcgtttcccctgcatgagggaagttatagaagtaaaaactccattcgaacccatggagcagaaaaccaccgacatctactctatgagtgctgggcctcctggggcgtgtggtataaataccaacctttggatcttgtaaggcggtactttggagagaagattgggttatattttgcctggttgggctggtacaccggcatgctcttcccagctgccttcattggattgtttgtctttttgtatggcgtcaccactctggatcacagccaagtcagtaaagaagtctgccaagctacagatatcatcatgtgtcctgtgtgtgataaatactgtccattcatgaggctgtcagacagctgtgtatatgccaaggtaacccacctttttgacaatggagccactgtcttctttgctgttttcatggcagtctgggcaacagttttcctggagttttggaaaagacggcgagcagtaattgcttatgactgggatttgatagactgggaagaagaggaggaagaaatacgaccccagtttgaagccaagtattccaagaaagagcggatgaatccaatttctggaaagccagaaccttatcaagcatttacagataaatgcagcagacttatcgtttctgcatctggaatattttttatgatctgcgtggtgattgctgccgtgttcgggatcgtcatttaccgggtggtgactgtcagcactttcgctgcctttaagtgggcgttaatcaggaataactctcaggttgcaaccacagggactgctgtgtgcatcaacttctgtatcattatgttgctgaatgtgctctatgaaaaagttgccctgcttctgacgaatttagaacagcctcgcacagagtctgagtgggagaacagcttcaccctgaaaatgtttctttttcagtttgtcaatctgaacagctccacattttacatcgcattcttcctcggaagatttacaggacacccaggtgcctacttgaggctgataaacaggtggagactagaagagtgccaccctagtggatgccttattgatctgtgtatgcaaatgggtattataatggtgctaaagcagacctggaataatttcatggaacttggctacccgttaattcagaattggtggactagaagaaaagtacgacaagaacatggacctgaaaggaaaataagtttcccacaatgggaaaaggactataaccttcagccgatgaatgcctatggactcttcgatgaatacttagaaatgattcttcagtttggattcacaactatctttgtggcagcttttcccctagcaccacttctggccttactgaataacataattgaaattcgacttgatgcttacaaatttgtcacacagtggaggagacctttagcttcaagggccaaagacataggaatttggtatggaattcttgaaggcattggaattctctctgttatcacaaatgcatttgtcatagcgataacatctgactttatccctcgcttggtgtatgcttataagtatggaccttgtgcaggccaaggagaagctgggcaaaagtgcatggttggctatgtgaatgccagcttgtctgtatttcgaatttctgactttgagaaccgatctgagcctgaatctgatggcagtgagttctcggggactcctcttaagtactgcagataccgggactaccgtgacccgcctcattcactggtgccctatggctacacactgcagttttggcatgtcctagctgctcgattagcttttatcattgtctttgagcacctcgtgttttgtataaagcacctcatttcatatctgatcccagacctcccaaaagacctaagggatcgaatgagaagagagaagtacttgattcaggagatgatgtatgaagcagaactggaacgtctccagaaggaacgaaaggagaggaagaagaatggaaaagcacaccacaacgagtggccgtgaccataaaatagtccctttccaggccaaggacctgaattctgtttacttcttctggctgtgcaaaagcacactcaagtgaatgactaaaaatgcaaccacagtgcatgttgcagataccggcggccgcaggaggggcagcatccagtagaggactggcgttggagtcacactgctgtgaaatcacgttgcagtccagcgcacaattgctatctatccatagaccattcttgaccaagcaagcatgcacattatgggcagttacattctcaagtttttaaaatcaaggggaacttgtatactgggcctgtttttcagcctgtttgctaccttttttgcattctatcccatgtgaattttacagacactgggctaaaaagggtattcagacacatggacacacattcctagaatgtcatcatatggtcctaattccatgtcaccaacaacacagacaagaccctgtttacaactttttctttccttttttttaattttagacctttctgagaagattattatatatgacatatctatagctatgtgtatggccatagatgtatttctgtgtgtacatatgtatagtcatgtattcctgcatatgtacatacaaatacagagatatataaagtacatagaaattccttacttgtaaatagccaaaaagtactgacatgagtgaattttcacatttaaatagtcatcaatatgaagccatgattaatgcttgtataatgtgatgcaataaaatttaaaataaatttctgcacatggaatattttcagctg

SEQ ID NO: 10731 - DNA, 571 bp, Homo sapiens
tttcactccggctcgctctccggagagtcctgttccagacttctcagggtttttacagcacaaacaactgcatacggcccgaggggaggctgaaaaggacttgtgtgtggtggttttattgcctgtcatcactttgctggcctcctcccgactggagcctggaggttcacagtggatttctttctgccgaagacaccaaggcactgaggaaggatcccttctccttctgttgactctttctatttttatggctccagctcattcctggctttagttgaacttttctgacattcttcatatagcatgcagtccagtggaccttcttctgctgagagcagtattgctggccaggctgtctgggttcaaagctaggctgtgcctcataaacatgacctttggtttaagtttatctattcatggggctgaaaagcgtttgcaaatccatcaacggcgaagtgtggcaagccgcccagcgtcacgtcgtcgcctgcctgtggtcaggcattcctcactcccaccaggcagaaggtcaataaaaatggaggcaagctcttctggaatcactaatgga

SEQ ID NO: 10732 - DNA, 401 bp, Homo sapiens
tggtacaccggcatgctcttcccagctgccttcattggattgtttgtctttttgtatggcgtcaccactctggatcacagccaagtcagtaaagaagtctgccaagctacagatatcatcatgtgtcctgtgtgtgataaatactgtccattcatgaggctgtcagacagctgtgtatatgccaaggtaacccacctttttgacaatggagccactgtcttctttgctgttttcatggcagtctgggatctgcgtggtgattgctgccgtgttcgggatcgtcatttaccgggtggtgactgtcagcactttcgctgcctttaagtgggcgttaatcaggaataactctcaggttgcaaccacagggactgctgtgtgcatcaacttctgtatcattatgt

SEQ ID NO: 10733 - DNA, 1385 bp, Homo sapiens
atggcctccctcaccgcatacgacaaagatgtgagcagcggaagttataacctttcctctgcaacgacgggcagctactacagttgtgtcagccagatcaccataggttatgacgttgcggggcctgtggcaattgggcttacccactggaaaaatccatacgtacaaggcagaccaaccctcccatcagatctgcctctcttcgtctccaaagatgcaggcatccctgtgtaccaccgatccttcacccgcaagactgaccaggccacacctttgtcctgtccagcctcactgtctatcactccagtgccttcttacagcagtagcagccaggaaaccctgagtcaagacacaacaggtttaagtttatctattcatggggctgaaaagcgtttgcaaatccatcaacggcgaagtgtggcaagccgcccagcgtcacgtcgtcgcctgcctgtggtcaggcattcctcactcccaccaggcagaaggtcaataaaaatggaggcaagctcttctggaatcactaatggaaaaaccaaagtcttccacccagaaggaggtgtggatttgcaaggctaccagctggatatgcaaatactacctgacgggccaaagagtgatgtggacttttcagagattcttaatgcaatacaagaaatggccaaggatgtcaatattctttttgatgaattagaagctgtcagcagtccttgcaaagatgacgattctcttcttcaccctggaaacctgactagtacttcagatgatgccagcagattggaagccgggggagagacagtgccagaaagaaacaaatcaaatggactttactttcgagatggaaagtgtcgaattgactacatccttgtgtacagaaaatccaacccccagactgaaaagagagaagtatttgaaagaaacattagagcagaaggattgcaaatggagaaagagtcctctctaataaatagtgacattatctttgtgaagttgcatgccccatgggaagtccttggaagatatgcagaacaaatgaatgtaagaatgcctttcagttcaaactgtaactgacgatgggttttcttctcgactggcttcatttttgctgttcttccaggagaaaaatctattacctgccccgccgttacaagttcatgagcaggatcgataaacaaataagcaggtttcggagatggttacctaagaagccaatgaggctggacaaggagacactgccagacctggaggagaatgactgctacactgcccctttcagccagcaaaggatccatcacttcatcatacacaacaaagaaacgttcttcaacaatgccacaagaagtagaatcgtgcatcacattttacaaagaataaaatatgaagaa

SEQ ID NO: 10734 - DNA, 537 bp, Homo sapiens
ttacagctagagctcttctctgacctcagatgttttccaaacacaaaatgaattttttagaacctacagaatgatcgataaacaaataagcaggtttcggagatggttacctaagaagccaatgaggctggacaaggagacactgccagacctggaggagaatgactgctacactgcccctttcagccagcaaaggatccatcacttcatcatacacaacaaagaaacgttcttcaacaatgccacaagaagtagaatcgtgcatcacattttacaaagaataaaatatgaagaaggaaaaaacaagattggtctgaatcgtttgcttaccaatggctcctatgaagctgcgtttcccctgcatgagggaagttatagaagtaaaaactccattcgaacccatggagcagaaaaccaccgacatctactctatgagtgctgggcctcctggggcgtgtggtataaataccaacctttggatcttgtaaggcggtactttggagagaagattgggttatattttgcctggttgggctg

SEQ ID NO: 10735 - DNA, 2293 bp, Homo sapiens
aacaataccttcctggtcctaaatataactatatccatacacatatgtaacccacctttttgacaatggagccactgtcttctttgctgttttcatggcagtctgggcaacagttttcctggagttttggaaaagacggcgagcagtaattgcttatgactgggatttgatagactgggaagaagaggagatctgcgtggtgattgctgccgtgttcgggatcgtcatttaccgggtggtgactgtcagcactttcgctgcctttaagtgggcgttaatcaggaataactctcaggttgcaaccacagggactgctgtgtgcatcaacttctgtatcattatgttgctgaatgtgctctatgaaaaagttgccctgcttctgacgaatttagaacagcctcgcacagagtctgagtgggagaacagcttcaccctgaaaatgtttctttttcagtttgtcaatctgaacagctccacattttacatcgcattcttcctcggaagatttacaggacacccaggtgcctacttgaggctgataaacaggtggagactagaagagtgccaccctagtggatgccttattgatctgtgtatgcaaatgggtattataatggtgctaaagcagacctggaataatttcatggaacttggctacccgttaattcagaattggtggactagaagaaaagtacgacaagaacatggacctgaaaggaaaataagtttcccacaatgggaaaaggactataaccttcagccgatgaatgcctatggactcttcgatgaatacttagaaatgattcttcagtttggattcacaactatctttgtggcagcttttcccctagcaccacttctggccttactgaataacataattgaaattcgacttgatgcttacaaatttgtcacacagtggaggagacctttagcttcaagggccaaagacataggaatttggtatggaattcttgaaggcattggaattctctctgttatcacaaatgcatttgtcatagcgataacatctgactttatccctcgcttggtgtatgcttataagtatggaccttgtgcaggccaaggagaagctgggcaaaagtgcatggttggctatgtgaatgccagcttgtctgtatttcgaatttctgactttgagaaccgatctgagcctgaatctgatggcagtgagttctcggggactcctcttaagtactgcagataccgggactaccgtgacccgcctcattcactggtgccctatggctacacactgcagttttggcatgtcctagctgctcgattagcttttatcattgtctttgagcacctcgtgttttgtataaagcacctcatttcatatctgatcccagacctcccaaaagacctaagggatcgaatgagaagagagaagtacttgattcaggagatgatgtatgaagcagaactggaacgtctccagaaggaacgaaaggagaggaagaagaatggaaaagcacaccacaacgagtggccgtgaccataaaatagtccctttccaggccaaggacctgaattctgtttacttcttctggctgtgcaaaagcacactcaagtgaatgactaaaaatgcaaccacagtgcatgttgcagataccggcggccgcaggaggggcagcatccagtagaggactggcgttggagtcacactgctgtgaaatcacgttgcagtccagcgcacaattgctatctatccatagaccattcttgaccaagcaagcatgcacattatgggcagttacattctcaagtttttaaaatcaaggggaacttgtatactgggcctgtttttcagcctgtttgctaccttttttgcattctatcccatgtgaattttacagacactgggctaaaaagggtattcagacacatggacacacattcctagaatgtcatcatatggtcctaattccatgtcaccaacaacacagacaagaccctgtttacaactttttctttccttttttttaattttagacctttctgagaagattattatatatgacatatctatagctatgtgtatggccatagatgtatttctgtgtgtacatatgtatagtcatgtattcctgcatatgtacatacaaatacagagatatataaagtacatagaaattccttacttgtaaatagccaaaaagtactgacatgagtgaattttcacatttaaatagtcatcaatatgaagccatgattaatgcttgtataatgtgatgcaataaaatttaaaataaatttctgcacatgg

SEQ ID NO: 10736 - DNA, 554 bp, Homo sapiens
actgatgttctctccggcagttccttccactctaaagagactccttttcatccctcttctcgcctttcctagcccagcctagtgcccaccctcccccgaccatgcctcccctgcacctggggagggggaggaccagtcctgggcgtgatgctctgagacggtggtgaaatccaccaggctgctttcactccggctcgctctccggagagtcctgttccagacttctcagggtttttacagcacaaacaactgcatacggcccgaggggaggctgaaaaggacttgtgtgtggtggttttattgcctgtcatcactttgctggcctcctcccgactggagcctggaggttcacagtggatttctttctgccgaagacaccaaggcactgaggaaggatcccttctccttctgttgactctttctatttttatggaaacctggaggaagacaattcaggactagttcagcagctcaaggaaggcctccaggatacaggcttcttctactgtcctaaacatgtttaagtttatctattcatggggctgaaaagcgtt

SEQ ID NO: 10737 - DNA, 3797 bp, Homo sapiens
atggcctccctcaccgcatacgacaaagatgtgagcagcggaagttataacctttcctctgcaacgacgggcagctactacagttgtgtcagccagatcaccataggttatgacgttgcggggcctgtggcaattgggcttacccactggaaaaatccatacgtacaaggcagaccaaccctcccatcagatctgcctctcttcgtctccaaagatgcaggcatccctgtgtaccaccgatccttcacccgcaagactgaccaggccacacctttgtcctgtccagcctcactgtctatcactccagtgccttcttacagcagtagcagccaggaaaccctgagtcaagacacaacaggtttaagtttatctattcatggggctgaaaagcgtttgcaaatccatcaacggcgaagtgtggcaagccgcccagcgtcacgtcgtcgcctgcctgtggtcaggcattcctcactcccaccaggcagaaggtcaataaaaatggaggcaagctcttctggaatcactaatggaaaaaccaaagtcttccacccagaaggaggtgtggatttgcaaggctaccagctggatatgcaaatactacctgacgggccaaagagtgatgtggacttttcagagattcttaatgcaatacaagaaatggccaaggatgtcaatattctttttgatgaattagaagctgtcagcagtccttgcaaagatgacgattctcttcttcaccctggaaacctgactagtacttcagatgatgccagcagattggaagccgggggagagacagtgccagaaagaaacaaatcaaatggactttactttcgagatggaaagtgtcgaattgactacatccttgtgtacagaaaatccaacccccagactgaaaagagagaagtatttgaaagaaacattagagcagaaggattgcaaatggagaaagagtcctctctaataaatagtgacattatctttgtgaagttgcatgccccatgggaagtccttggaagatatgcagaacaaatgaatgtaagaatgcctttcaggagaaaaatctattacctgccccgccgttacaagttcatgagcaggatcgataaacaaataagcaggtttcggagatggttacctaagaagccaatgaggctggacaaggagacactgccagacctggaggagaatgactgctacactgcccctttcagccagcaaaggatccatcacttcatcatacacaacaaagaaacgttcttcaacaatgccacaagaagtagaatcgtgcatcacattttacaaagaataaaatatgaagaaggaaaaaacaagattggtctgaatcgtttgcttaccaatggctcctatgaagctgcgtttcccctgcatgagggaagttatagaagtaaaaactccattcgaacccatggagcagaaaaccaccgacatctactctatgagtgctgggcctcctggggcgtgtggtataaataccaacctttggatcttgtaaggcggtactttggagagaagattgggttatattttgcctggttgggctggtacaccggcatgctcttcccagctgccttcattggattgtttgtctttttgtatggcgtcaccactctggatcacagccaagtcagtaaagaagtctgccaagctacagatatcatcatgtgtcctgtgtgtgataaatactgtccattcatgaggctgtcagacagctgtgtatatgccaaggtaacccacctttttgacaatggagccactgtcttctttgctgttttcatggcagtctgggcaacagttttcctggagttttggaaaagacggcgagcagtaattgcttatgactgggatttgatagactgggaagaagaggaggaagaaatacgaccccagtttgaagccaagtattccaagaaagagcggatgaatccaatttctggaaagccagaaccttatcaagcatttacagataaatgcagcagacttatcgtttctgcatctggaatattttttatgatctgcgtggtgattgctgccgtgttcgggatcgtcatttaccgggtggtgactgtcagcactttcgctgcctttaagtgggcgttaatcaggaataactctcaggttgcaaccacagggactgctgtgtgcatcaacttctgtatcattatgttgctgaatgtgctctatgaaaaagttgccctgcttctgacgaatttagaacagcctcgcacagagtctgagtgggagaacagcttcaccctgaaaatgtttctttttcagtttgtcaatctgaacagctccacattttacatcgcattcttcctcggaagatttacaggacacccaggtgcctacttgaggctgataaacaggtggagactagaagagtgccaccctagtggatgccttattgatctgtgtatgcaaatgggtattataatggtgctaaagcagacctggaataatttcatggaacttggctacccgttaattcagaattggtggactagaagaaaagtacgacaagaacatggacctgaaaggaaaataagtttcccacaatgggaaaaggactataaccttcagccgatgaatgcctatggactcttcgatgaatacttagaaatgattcttcagtttggattcacaactatctttgtggcagcttttcccctagcaccacttctggccttactgaataacataattgaaattcgacttgatgcttacaaatttgtcacacagtggaggagacctttagcttcaagggccaaagacataggaatttggtatggaattcttgaaggcattggaattctctctgttatcacaaatgcatttgtcatagcgataacatctgactttatccctcgcttggtgtatgcttataagtatggaccttgtgcaggccaaggagaagctgggcaaaagtgcatggttggctatgtgaatgccagcttgtctgtatttcgaatttctgactttgagaaccgatctgagcctgaatctgatggcagtgagttctcggggactcctcttaagtactgcagataccgggactaccgtgacccgcctcattcactggtgccctatggctacacactgcagttttggcatgtcctagctgctcgattagcttttatcattgtctttgagcacctcgtgttttgtataaagcacctcatttcatatctgatcccagacctcccaaaagacctaagggatcgaatgagaagagagaagtacttgattcaggagatgatgtatgaagcagaactggaacgtctccagaaggaacgaaaggagaggaagaagaatggaaaagcacaccacaacgagtggccgtgaccataaaatagtccctttccaggccaaggacctgaattctgtttacttcttctggctgtgcaaaagcacactcaagtgaatgactaaaaatgcaaccacagtgcatgttgcagataccggcggccgcaggaggggcagcatccagtagaggactggcgttggagtcacactgctgtgaaatcacgttgcagtccagcgcacaattgctatctatccatagaccattcttgaccaagcaagcatgcacattatgggcagttacattctcaagtttttaaaatcaaggggaacttgtatactgggcctgtttttcagcctgtttgctaccttttttgcattctatcccatgtgaattttacagacactgggctaaaaagggtattcagacacatggacacacattcctagaatgtcatcatatggtcctaatt

SEQ ID NO: 10738 - DNA, 3738 bp, Homo sapiens
ggctggcgccggtgcctttaagacctcagcgcgcggccctgattgagaaatccgcgcgcagcctccgccgctgcacactgcagcctctgctgaacccctgccgcgccgccgccttcgccagcccggaccggaccggcccgccttcccttcctccgctccagccggcctccggccccgcaacctcctcctcggcgaagtctccctggccgccccatgtcggccgcccccgcctacagcgaagacaagggcggctccgctggccccggggagcccgagtacggccacgaccccgcgagcggcggcatcttctcctccgactacaagcggcatgatgacctgaaggagatgctggacaccaacaaggattctctcaagctggaggccatgaagaggattgtggcgatgattgcccgaggaaagaatgcttcagacctgtttcccgcggtggtgaagaacgtggcctgtaagaacatagaggtgaagaagcttgtctatgtgtacctggtacgctacgctgaggagcagcaagacctggccctgctgtccatctccaccttccaacgtggcctaaaggatcccaaccagctgattcgtgccagtgccctccgtgtcctctctagcatccgtgtgcccatcatagtgcccatcatgatgctagctatcaaggaagccgcctcggacatgtcaccctatgtgcggaaaacagctgcccacgccatccctaaactctacagtttggactctgaccagaaggatcagctgatagaagtcattgagaagcttctggctgacaagaccacgctggtggcgggcagtgtggtgatggcctttgaggaggtctgcccggagcgcatcgacctgattcacaaaaactaccggaaactctgtaacctgctgatcgacgtggaggagtggggccaggtggtcatcatcagcatgctcacccgctacgcccgcacgcagttcctgagccccacccagaacgaatccctactagaggagaacgcggaaaaagccttctacggctcagaggaggacgaggccaagggcgcggggtctgaggagacggccgccgcggccgccccctcccgaaagccctatgtcatggaccccgaccaccggctgctgctgcgcaacaccaaacccctgctgcagagccgcagcgccgcggtggtgatggcggtggcgcagctctacttccacctggcgcccaaggcggaagtgggcgtcatcgccaaggcgctggtgcgcctgctgcgcagccacagtgaggtgcagtacgttgtgctccagaacgtggccaccatgtccatcaagcgccggggtatgtttgagccctacctgaagagcttctacatcaggtccaccgaccccacccagattaagatcctgaagctggaagtgctgaccaacctggccaatgagaccaacattcctactgtcctacgggaattccagacctatattcgcagcatggacaaggactttgtggcagccacaatccaggccattggacgctgtgcaactaacatcggccgagtccgtgacacctgcctcaatggcctggtgcagctgctgtccaaccgtgatgagcttgtggttgcagagtcagtggtcgtcattaagaaattgctacagatgcagccagcacaacatggagagatcatcaaacacttggcaaagcttacagacaacatccaggtgcccatggcccgagccagcatcctgtggctcatcggagagtactgtgagcatgtccccaggattgcacctgatgtcttaagaaaaatggccaagtcattcacagcagaggaggatattgtcaagctgcaggtcatcaacctggcagccaagctctacctgaccaactctaaacagaccaagctgctgacccagtatgtgctgagtctggccaaatatgaccagaactatgatattcgcgaccgggcgcgcttcacccggcagctcatcgtcccttccgagcagggtggggccctcagccgccatgccaagaagctcttcctggcacccaaaccagctccagtcttggagtcatccttcaaagaccgggaccacttccagctgggctcactgtcccacctgcttaatgccaaggccacaggctaccaggagctcccagactggccggaggaagccccagacccatctgtgcgcaacgtggaggtacctgaatggaccaagtgctcaaatcgggagaagagaaaggagaaggaaaaacccttctactcggactctgagggggagtcaggccccacggagtccgcagacagtgaccctgagtctgagagtgaatcggacagtaagagcagcagtgagagcggctctggggagtccagcagtgagtccgacaatgaagaccaggatgaggatgaggagaaagggagaggcagtgagagtgaacagagtgaggaggatggtaagaggaagacaaagaagaaggtgccagagagaaaaggagaagcgtcatcctctgatgagggcagcgattccagcagtagctcatcagagtccgagatgacatcggagtccgaggaggagcagttagaacctgcctcctggagcaggaaaacacctcccagcagcaaaagtgctcctgcaaccaaggagatctccctgcttgatctagaggatttcttatctactcccacagtcacccctcccagtgtccagcctgtgtctcccccagcaattgtgtctaccagtctggctgctgacctggagggcctgacactcacagactccaccctggtaccgtcgcttctgagtccagtatcgggtgttgggcggcaggagctgctgcaccgggtagctggcgaggggctggctgtggactacaccttcagccgccaacctttctccggggatccccacatggtgtccgtgcacatccacttctccaacagctctgatacccccatcaagggcctgcatgtgggcactcccaaactgcctgctggcatcagcatccaagaatttcccgaaattgagtccctggcacctggagaatctgccactgctgtaatgggcattaatttctgtgactcaacccaggcagccaacttccagctgtgcacccagacccgacagttctacgtctccattcagccacctgttggggagctgatggcccctgtgttcatgagtgaaaatgagtttaagaaggaacagggaaagctgatgggcatgaatgagatcacagagaaactcatgctgccagacacctgtcggagtgaccacattgtggtgcagaaagtgactgccactgccaacctgggtcgtgttccttgtgggacatctgatgagtacaggtttgcagggaggacactgactggtggaagcctcgttctgctgaccctggatgcccggccagctggagctgcccagctgactgtcaacagcgagaaaatggtgattggcaccatgctggtaaaggatgtgatacaggctctgacccagtgacttccaaatgctgtgacctgtttggctcccatctatacctccccatgacacctaggctgtcagtctctctcatctttctctctctctctcatcatcctcctcatgccagatagcattcagggtgtcctctctccctctggaggaccaagccctcccctaatgccctccccatggattccttagtgatctgtgcagagagagatggcagccactcccttcagtcctcccagatttctgtagctatttatgtagcaggct

SEQ ID NO: 10739 - DNA, 3254 bp, Homo sapiens
ccttcccttcctccgctccagccggcctccggccccgcaacctcctcctcggcgaagtctccctggccgccccatgtcggccgcccccgcctacagcgaagacaagggcggctccgctggccccggggagcccgagtacggccacgaccccgcgagcggcggcatcttctcctccgactacaagcggcatgatgacctgaaggagatgctggacaccaacaaggattctctcaagctggaggccatgaagaggattgtggcgatgattgcccgaggaaagaatgcttcagacctgtttcccgcggtggtgaagaacgtggcctgtaagaacatagaggatcccaaccagctgattcgtgccagtgccctccgtgtcctctctagcatccgtgtgcccatcatagtgcccatcatgatgctagctatcaaggaagccgcctcggacatgtcaccctatgtgcggaaaacagctgcccacgccatccctaaactctacagtttggactctgaccagaaggatcagctgatagaagtcattgagaagcttctggctgacaagaccacgctggtggcgggcagtgtggtgatggcctttgaggaggtctgcccggagcgcatcgacctgattcacaaaaactaccggaaactctgtaacctgctgatcgacgtggaggagtggggccaggtggtcatcatcagcatgctcacccgctacgcccgcacgcagttcctgagccccacccagaacgaatccctactagaggagaacgcggaaaaagccttctacggctcagaggaggacgaggccaagggcgcggggtctgaggagacggccgccgcggccgccccctcccgaaagccctatgtcatggaccccgaccaccggctgctgctgcgcaacaccaaacccctgctgcagagccgcagcgccgcggtggtgatggcggtggcgcagctctacttccacctggcgcccaaggcggaagtgggcgtcatcgccaaggcgctggtgcgcctgctgcgcagccacagtgaggtgcagtacgttgtgctccagaacgtggccaccatgtccatcaagcgccggggtatgtttgagccctacctgaagagcttctacatcaggtccaccgaccccacccagattaagatcctgaagctggaagtgctgaccaacctggccaatgagaccaacattcctactgtcctacgggaattccagacctatattcgcagcatggacaaggactttgtggcagccacaatccaggccattggacgctgtgcaactaacatcggccgagtccgtgacacctgcctcaatggcctggtgcagctgctgtccaaccgtgatgagcttgtggttgcagagtcagtggtcgtcattaagaaattgctacagatgcagccagcacaacatggagagatcatcaaacacttggcaaagcttacagacaacatccaggtgcccatggcccgagccagcatcctgtggctcatcggagagtactgtgagcatgtccccaggattgcacctgatgtcttaagaaaaatggccaagtcattcacagcagaggaggatattgtcaagctgcaggtcatcaacctggcagccaagctctacctgaccaactctaaacagaccaagctgctgacccagtatgtgctgagtctggccaaatatgaccagaactatgatattcgcgaccgggcgcgcttcacccggcagctcatcgtcccttccgagcagggtggggccctcagccgccatgccaagaagctcttcctggcacccaaaccagctccagtcttggagtcatccttcaaagaccgggaccacttccagctgggctcactgtcccacctgcttaatgccaaggccacaggctaccaggagctcccagactggccggaggaagccccagacccatctgtgcgcaacgtggaggtacctgaatggaccaagtgctcaaatcgggagaagagaaaggagaaggaaaaacccttctactcggactctgagggggagtcaggccccacggagtccgcagacagtgaccctgagtctgagagtgaatcggacagtaagagcagcagtgagagcggctctggggagtccagcagtgagtccgacaatgaagaccaggatgaggatgaggagaaagggagaggcagtgagagtgaacagagtgaggaggatggtaagaggaagacaaagaagaaggtgccagagagaaaaggagaagcgtcatcctctgatgagggcagcgattccagcagtagctcatcagagtccgagatgacatcggagtccgaggaggagcagttagaacctgcctcctggagcaggaaaacacctcccagcagcaaaagtgctcctgcaaccaaggagatctccctgcttgatctagaggatttcacccctcccagtgtccagcctgtgtctcccccagcaattgtgtctaccagtctggctgctgacctggagggcctgacactcacagactccaccctggtaccgtcgcttctgagtccagtatcgggtgttgggcggcaggagctgctgcaccgggtagctggcgaggggctggctgtggactacaccttcagccgccaacctttctccggggatccccacatggtgtccgtgcacatccacttctccaacagctctgatacccccatcaagggcctgcatgtgggcactcccaaactgcctgctggcatcagcatccaagaatttcccgaaattgagtccctggcacctggagaatctgccactgctgtaatgggcattaatttctgtgactcaacccaggcagccaacttccagctgtgcacccagacccgacagttctacgtctccattcagccacctgttggggagctgatggcccctgtgttcatgagtgaaaatgagtttaagaaggaacagggaaagctgatgggcatgaatgagatcacagagaaactcatgctgccagacacctgtcggagtgaccacattgtggtgcagaaagtgactgccactgccaacctgggtcgtgttccttgtgggacatctgatgagtacaggtttgcagggaggacactgactggtggaagcctcgttctgctgaccctggatgcccggccagctggagctgcccagctgactgtcaacagcgagaaaatggtgattggcaccatgctggtaaaggatgtgatacaggctctgacccagtgacttccaaatgctgtgacctgtttggctc

SEQ ID NO: 10740 - DNA, 3754 bp, Homo sapiens
gagaaatccgcgcgcagcctccgccgctgcacactgcagcctctgctgaacccctgccgcgccgccgccttcgccagcccggaccggaccggcccgccttcccttcctccgctccagccggcctccggccccgcaacctcctcctcggcgaagtctccctggccgccccatgtcggccgcccccgcctacagcgaagacaagggcggctccgctggccccggggagcccgagtacggccacgaccccgcgagcggcggcatcttctcctccgactacaagcggcatgatgacctgaaggagatgctggacaccaacaaggattctctcaagctggaggccatgaagaggattgtggcgatgattgcccgaggaaagaatgcttcagacctgtttcccgcggtggtgaagaacgtggcctgtaagaacatagaggtgaagaagcttgtctatgtgtacctggtacgctacgctgaggagcagcaagacctggccctgctgtccatctccaccttccaacgtggcctaaaggatcccaaccagctgattcgtgccagtgccctccgtgtcctctctagcatccgtgtgcccatcatagtgcccatcatgatgctagctatcaaggaagccgcctcggacatgtcaccctatgtgcggaaaacagctgcccacgccatccctaaactctacagtttggactctgaccagaaggatcagctgatagaagtcattgagaagcttctggctgacaagaccacgctggtggcgggcagtgtggtgatggcctttgaggaggtctgcccggagcgcatcgacctgattcacaaaaactaccggaaactctgtaacctgctgatcgacgtggaggagtggggccaggtggtcatcatcagcatgctcacccgctacgcccgcacgcagttcctgagccccacccagaacgaatccctactagaggagaacgcggaaaaagccttctacggctcagaggaggacgaggccaagggcgcggggtctgaggagacggccgccgcggccgccccctcccgaaagccctatgtcatggaccccgaccaccggctgctgctgcgcaacaccaaacccctgctgcagagccgcagcgccgcggtggtgatggcggtggcgcagctctacttccacctggcgcccaaggcggaagtgggcgtcatcgccaaggcgctggtgcgcctgctgcgcagccacagtgaggtgcagtacgttgtgctccagaacgtggccaccatgtccatcaagcgccggggtatgtttgagccctacctgaagagcttctacatcaggtccaccgaccccacccagattaagatcctgaagctggaagtgctgaccaacctggccaatgagaccaacattcctactgtcctacgggaattccagacctatattcgcagcatggacaaggactttgtggcagccacaatccaggccattggacgctgtgcaactaacatcggccgagtccgtgacacctgcctcaatggcctggtgcagctgctgtccaaccgtgatgagcttgtggttgcagagtcagtggtcgtcattaagaaattgctacagatgcagccagcacaacatggagagatcatcaaacacttggcaaagcttacagacaacatccaggtgcccatggcccgagccagcatcctgtggctcatcggagagtactgtgagcatgtccccaggattgcacctgatgtcttaagaaaaatggccaagtcattcacagcagaggaggatattgtcaagctgcaggtcatcaacctggcagccaagctctacctgaccaactctaaacagaccaagctgctgacccagtatgtgctgagtctggccaaatatgaccagaactatgatattcgcgaccgggcgcgcttcacccggcagctcatcgtcccttccgagcagggtggggccctcagccgccatgccaagaagctcttcctggcacccaaaccagctccagtcttggagtcatccttcaaagaccgggaccacttccagctgggctcactgtcccacctgcttaatgccaaggccacaggctaccaggagctcccagactggccggaggaagccccagacccatctgtgcgcaacgtggaggaagaagatctctcccttattgagactcacgtgggcctgttgggcgaatacactgaggtacctgaatggaccaagtgctcaaatcgggagaagagaaaggagaaggaaaaacccttctactcggactctgagggggagtcaggccccacggagtccgcagacagtgaccctgagtctgagagtgaatcggacagtaagagcagcagtgagagcggctctggggagtccagcagtgagtccgacaatgaagaccaggatgaggatgaggagaaagggagaggcagtgagagtgaacagagtgaggaggatggtaagaggaagacaaagaagaaggtgccagagagaaaaggagaagcgtcatcctctgatgagggcagcgattccagcagtagctcatcagagtccgagatgacatcggagtccgaggaggagcagttagaacctgcctcctggagcaggaaaacacctcccagcagcaaaagtgctcctgcaaccaaggagatctccctgcttgatctagaggatttcacccctcccagtgtccagcctgtgtctcccccagcaattgtgtctaccagtctggctgctgacctggagggcctgacactcacagactccaccctggtaccgtcgcttctgagtccagtatcgggtgttgggcggcaggagctgctgcaccgggtagctggcgaggggctggctgtggactacaccttcagccgccaacctttctccggggatccccacatggtgtccgtgcacatccacttctccaacagctctgatacccccatcaagggcctgcatgtgggcactcccaaactgcctgctggcatcagcatccaagaatttcccgaaattgagtccctggcacctggagaatctgccactgctgtaatgggcattaatttctgtgactcaacccaggcagccaacttccagctgtgcacccagacccgacagttctacgtctccattcagccacctgttggggagctgatggcccctgtgttcatgagtgaaaatgagtttaagaaggaacagggaaagctgatgggcatgaatgagatcacagagaaactcatgctgccagacacctgtcggagtgaccacattgtggtgcagaaagtgactgccactgccaacctgggtcgtgttccttgtgggacatctgatgagtacaggtttgcagggaggacactgactggtggaagcctcgttctgctgaccctggatgcccggccagctggagctgcccagctgactgtcaacagcgagaaaatggtgattggcaccatgctggtaaaggatgtgatacaggctctgacccagtgacttccaaatgctgtgacctgtttggctcccatctatacctccccatgacacctaggctgtcagtctctctcatctttctctctctctctcatcatcctcctcatgccagatagcattcagggtgtcctctctccctctggaggaccaagccctcccctaatgccctccccatggattccttagtgatctgtgcagagagagatggcagccactcccttcagtcctcccagatttctgtagctatttatgtagcaggctcaataaaatgtcttctctcta

SEQ ID NO: 10741 - DNA, 4201 bp, Homo sapiens
ccctgattgagaaatccgcgcgcagcctccgccgctgcacactgcagcctctgctgaacccctgccgcgccgccgccttcgccagcccggaccggaccggcccgccttcccttcctccgctccagccggcctccggccccgcaacctcctcctcggcgaagtctccctggccgccccatgtcggccgcccccgcctacagcgaagacaagggcggctccgctggccccggggagcccgagtacggccacgaccccgcgagcggcggcatcttctcctccgactacaagcggcatgatgacctgaaggagatgctggacaccaacaaggattctctcaagctggaggccatgaagaggattgtggcgatgattgcccgaggaaagaatgcttcagacctgtttcccgcggtggtgaagaacgtggcctgtaagaacatagaggtgagcactacctggtgagggattgcttgtccccacctcccccaggaccacactcaagcttggggtgaggaaggaaatgatttagcccctgggggcccgacctgctgagaaatgtctctgagccaggagaagacactgtctccatgtccctgaactggatgtggatcaaggtaaaggacccggatacactcaggggtgctctcccccactgggagagtttgtccccatggaccgcagctggctggggagatgacatcccaggggtaggggggtgggcacaggtgcctgctgagaagcgttctgctgagaaacgtgctctccccaaggtgaagaagcttgtctatgtgtacctggtacgctacgctgaggagcagcaagacctggccctgctgtccatctccaccttccaacgtggcctaaaggatcccaaccagctgattcgtgccagtgccctccgtgtcctctctagcatccgtgtgcccatcatagtgcccatcatgatgctagctatcaaggaagccgcctcggacatgtcaccctatgtgcggaaaacagctgcccacgccatccctaaactctacagtttggactctgaccagaaggatcagctgatagaagtcattgagaagcttctggctgacaagaccacgctggtggcgggcagtgtggtgatggcctttgaggaggtctgcccggagcgcatcgacctgattcacaaaaactaccggaaactctgtaacctgctgatcgacgtggaggagtggggccaggtggtcatcatcagcatgctcacccgctacgcccgcacgcagttcctgagccccacccagaacgaatccctactagaggagaacgcggaaaaagccttctacggctcagaggaggacgaggccaagggcgcggggtctgaggagacggccgccgcggccgccccctcccgaaagccctatgtcatggaccccgaccaccggctgctgctgcgcaacaccaaacccctgctgcagagccgcagcgccgcggtggtgatggcggtggcgcagctctacttccacctggcgcccaaggcggaagtgggcgtcatcgccaaggcgctggtgcgcctgctgcgcagccacagtgaggtgcagtacgttgtgctccagaacgtggccaccatgtccatcaagcgccggggtatgtttgagccctacctgaagagcttctacatcaggtccaccgaccccacccagattaagatcctgaagctggaagtgctgaccaacctggccaatgagaccaacattcctactgtcctacgggaattccagacctatattcgcagcatggacaaggactttgtggcagccacaatccaggccattggacgctgtgcaactaacatcggccgagtccgtgacacctgcctcaatggcctggtgcagctgctgtccaaccgtgatgagcttgtggttgcagagtcagtggtcgtcattaagaaattgctacagatgcagccagcacaacatggagagatcatcaaacacttggcaaagcttacagacaacatccaggtgcccatggcccgagccagcatcctgtggctcatcggagagtactgtgagcatgtccccaggattgcacctgatgtcttaagaaaaatggccaagtcattcacagcagaggaggatattgtcaagctgcaggtcatcaacctggcagccaagctctacctgaccaactctaaacagaccaagctgctgacccagtatgtgctgagtctggccaaatatgaccagaactatgatattcgcgaccgggcgcgcttcacccggcagctcatcgtcccttccgagcagggtggggccctcagccgccatgccaagaagctcttcctggcacccaaaccagctccagtcttggagtcatccttcaaagaccgggaccacttccagctgggctcactgtcccacctgcttaatgccaaggccacaggctaccaggagctcccagactggccggaggaagccccagacccatctgtgcgcaacgtggaggtacctgaatggaccaagtgctcaaatcgggagaagagaaaggagaaggaaaaacccttctactcggactctgagggggagtcaggccccacggagtccgcagacagtgaccctgagtctgagagtgaatcggacagtaagagcagcagtgagagcggctctggggagtccagcagtgagtccgacaatgaagaccaggatgaggatgaggagaaagggagaggcagtgagagtgaacagagtgaggaggatggtaagaggaagacaaagaagaaggtgccagagagaaaaggagaagcgtcatcctctgatgagggcagcgattccagcagtagctcatcagagtccgagatgacatcggagtccgaggaggagcagttagaacctgcctcctggagcaggaaaacacctcccagcagcaaaagtgctcctgcaaccaaggagatctccctgcttgatctagaggatttcacccctcccagtgtccagcctgtgtctcccccagcaattgtgtctaccagtctggctgctgacctggagggcctgacactcacagactccaccctggtaccgtcgcttctgagtccagtatcgggtgttgggcggcaggagctgctgcaccgggtagctggcgaggggctggctgtggactacaccttcagccgccaacctttctccggggatccccacatggtgtccgtgcacatccacttctccaacagctctgatacccccatcaagggcctgcatgtgggcactcccaaactgcctgctggcatcagcatccaagaatttcccgaaattggtgcgaagggctttggatggggtggaggaggaggctcctgggcagagtcagtctttctgtggttgctgataccctccttgtgccaggccaggggccaagctataggggcacagagatagcatctaacatgatcaacactctggtggacaagacagatgatgaaataagcaagttcacatcagggcgggaggtgcttgcagcagcagatttgggccttggttgtttcaggactaacttaaatgtggtgagggtgagtgggggaaagggtgcttagagttcaggaggaaaccgggaacagtctccagcagccaagaaagccaagattctgtagagggctggtcagctgtgacagtggagaggagagtagggctaggctgggttctagacctatcaggtgatggtggccctccctctccccttcactgccttataccacttcagagtccctggcacctggagaatctgccactgctgtaatgggcattaatttctgtgactcaacccaggcagccaacttccagctgtgcacccagacccgacagttctacgtctccattcagccacctgttggggagctgatggcccctgtgttcatgagtgaaaatgagtttaagaaggaacagggaaagctgatgggcatgaatgagatcacagagaaactcatgctgccagacacctgtcggagtgaccacattgtggtgcagaaagtgactgccactgccaacctgggtcgtgttccttgtgggacatctgatgagtacaggtttgcagggaggacactgactggtggaagcctcgttctgctgaccctggatgcccggccagctggagctgcccagctgactgtcaacagcgagaaaatggtgattggcaccatgctggtaaaggatgtgatacaggctctgacccagtgacttccaaa

SEQ ID NO: 10742 - DNA, 24006 bp, Homo sapiens
ggctggcgccggtgcctttaagacctcagcgcgcggccctgattgagaaatccgcgcgcagcctccgccgctgcacactgcagcctctgctgaacccctgccgcgccgccgccttcgccagcccggaccggaccggcccgccttcccttcctccgctccagccggcctccggccccgcaacctcctcctcggcgaagtctccctggccgccccatgtcggccgcccccgcctacagcgaagacaagggcggctccgctggccccggggagcccgagtacggccacgaccccgcgagcggcggcatcttctcctccgactacaagcggtgagggagcccgccaggaagctcgcgggagggttggggccggggaccgggcgaggcgcgcgggcaccatggacagcgcccggccccagcgccggccccgccccggccgcgccgaccggaagcccgcccggccccctcctgcggcctggagccccggcccagcgcgggcagcgctggcaccccggctccaggggccggcctaggacgcggaggggggcagataggggctggcgggggatgggccagctcagtttcgagaggagaaaccctccggttccaggtgtttctccggtttgcggcgttgcgttaggggttcccttcctttttcgtgctaggcgggttggcttcccaaaaatgtgggggaggggtctgagtcagcgaacttgagcttgagcctggggcctcttcaggaaggcgggccctggatgtacttgcacagcctcccagcttggccctgctgcaaattcatttcccctccctctggtccccatctccatctgaccctcacatccctgctcctggcattgcccctgtagttcagctccaccttcacaccctcccccacctttgattcgttcgtttgtttcttcatttgtttattcgtaaattctgcaacaagcatttatgaaaagccaactgtgtcgagtcctgaactagtcacggaatacaactgtgaacatgagacccttcttgtcctcacgatgctctagaggggagcacagatgaagaagcagtcagggacagtcgagtgtaatgggggcagtgggagcagggagaggacctagtctctggcgccggagagaaggaagacaggagcgtgaggtatgttccaggcagaggaaagggctttcaggaaggttgagagccaggccacaatctgtgtgagccactggactgaccagaaaagagggtggggaggactcctgaaggattctaagcaggcgacataatcagatttatattttagaaggacgtcaggctgctgcattgtggagaagagattggaggtgggccagattgaacaagagacaagggaggtgggtcttgaagttcacaggcctggcatgattgtggcctagaccaggggagaggcagaagatttgaggctgtggaagaggtggaagcctcagacctgatgattaattggatattgggtgggggtttagagggacagggggagaagatgaggattttcacgcacgtccatgtgaagagaccaccaaacaggctttgaacaataaagctttttaatcacttgggtgcaggccagctgagtccgaaaaaagagtcagcgaagggaaatggggtgggaccgttttacaggatttgggtaggtagtggaaaattacagtcaaagggggttgttctctggcggtggggggacacaaggtgctcagtgggggagcttttgagccaggatgagccaggagaaggaatttcacaagataatgtcatcagttaaggcaggcacaggccattttcactcttcagttacttcaggccatctggatgtatacgtgcaggtcacaggggatatcatggcttagcttgggctcagaggcctgacattcctgtcttcttttattaataagaaaaataacataaaatagtgttgaagtgttggggcagcaaacattttggcggggggtggtatggagagatactgcttctccatagccttgaagggctgcttcgagcgggattggggtggcgtgggaacctagagtgggagagattaagctgaaggcagattctgtggtaagggatgatattgtggggttgttagaagaaacatttgttgtataggattattggtgatggcctggatacggttttgtatgaattgaaaaactaaatggaataagagaaggagaaaaacaggtattaaaggactaagaattgggaggacccaggacatccaattagagagtgcccaaggaggttcagcatagccctgccagcaaagattatttatttactttaagagggagttaagactggcagtttggggatagcaccaggagatatcagctgtaatggtttggagaaacagtgtaaaccggcagtgtaaacaagagcagggcatgtatgagtagttgagtatggtgaataggagtatgactagtcagaagatagtagggatgacaagttttctggggcacagtccaagttggtctggtgtctggaatgagactggggcctaataaaaaggagcatctatacaggagcttgaatgggctgtaccctgcagcattccgaggacaggcccaaattctgagaagggcaagtggtaaaagtattgtcagtcctttttaagttggtggctgagcttggtgaggtgtgtttttaaaagaccattagtccgttctaccttttctgaagattgaggatggtaaggggtatgaaggtttcactgaataccaggagcctgagaaactgcttgggtgatttgaccagtaaaggctggtctgttattggactatatagaggcgggaaggccaaactgaggaattatgtctgacagaagggaagaaatgaccgcagtggccttctcagaccctgtgggaaaggcctctacccatccagtgaaagtatctacccagaccaagacgtattttagtttcctgactcggggcatgtgagtaaagtcaatttgccagtcctgggcagaggcaaatccccaggcttgatgtgtagggaagggagggggcctgaacaatccctgaggagtagtagaatagcagatggaacactgagaagtgatttccttgaggatagatttccacaatggaaaggaaatgagaggttctaagaggcaggctagcggcttgtaacctacatggaagaggttatgaaatgacgaaagaatagaatgggcctgtgaggctagaaggagatattttccttggtctgagaaccatttgccttgtgtgggaagagattcataggtgtaagtttcattgggggagtaggtaggagtgactgatgagaaggagaaaaactggccatgagggacagaagttggaatgctagctgcttttttagctaccttatcagcataagtgttgccctgagcgatgggatctgatgccttttgatggcccttgcagtgaatgactccagcttcctttggaagtaaagcggccttgagaagagtttttattaaagaggaattaatgatggaggacccttgtgtaatgaggaaagctttttgcccatataacagcatggaggtacaggatatggaaggcatatttagagtcagtataaatattgacacatagtccttttgcaagactgagggctcgagttaaggcaatgagttaagctttctgagaggtagtggaggggggcagaaagtatatgcgtcaggtgtgaggaagaaaatagattttggaagttatgagaactgtagagagtgagttgagcatagtttgtgattttgagggcctctgaaagtattaaagcagcggcagccgctgcacgcagacatgagggctaggccaaaacagtaaggtcaagttgttcggacagaaaggctacagggcgtggtcccagctcttgtgtaagaattccaaccgcacagccctgcactttggctgtgtgtgatgaaaaagggttgggatgaattagggagacctagtgtgagagcagcttctacggctgtttttaaggaatggaaaggagtggcaaaaggatttaggatctgtggggtcagctaggtttgcttttgtgagtttatataatggtttagtcaggatggtaaaactaggtatccaaaggtggaagtacctaaccatcccttgaaaggaaaggagttgttgctttgtagaagggattggggttcgggagattagccggacatgatcagcagggagagcacgtgtgttttcatgagaactatgccaagataggtaatggatgaggaagaaatttgggcttgactgaagtaatgggggctgtccgtgaagccttgcggcagtacagcctaggtagtttgctgagcctgatgggtgtcagggacagtccaagtgaaagcgaagagaggctgagatgaagggtgcaaatgaatagtaaagaaagcatgtttgaaatccagaagagaatgatgggttgtggaggggttgtggagggaggtattgaggaggagagtatatgagtttggcaccacggggtggataggcaaaacaatttggctgacaaggcacagatcctgaactaattgtaagacttgtctggtttttgaacaggtaaaatgggggaattgtaaggagagtttataggctttaaaaggccatgctgtaacaggcgagtgataacaggctttaatccttttaaagcctgctgggggatgggatattgacattgagcacggtaagggtgattaggttttaatgggatggtaaggggtgcatgatcagtcgccaaggagggaatagaggtgtcctatacttgaggattaaggtggggagatacaaggggaggatgtgaaggaggctttgaactgggggaaaaggtggcaatgaggtgtggctgtagcctaggaatagtcagggaagcagataatttaaagtgtctcggcctaataagggaactgcgcaggtggggataactgaaaaggagtgcataaaagagtattgtccaagttggcctcagagttggggagttttgagaggtttagaagcctggccatcaatacccacaacagttatggaggcaaaggaaacaggcctttgaaaagaaggtaatgtggagttggtagcctccgtattgattaagaaggggacggacttaccctccactgtaagagttacccaaagcatctgtgatggtccaggaagcttccaaggcgattgggcagtgtcagtcttcagctgctaagccgagaagatttgggaaggagtcagtcaggcagccttgggccagagttccaggggctctgggagtggctgccaggtgagttggacagtccgatttccagtggggttccacacagatgggacaaggcttaggaagaatcctgggctgtgggcattccttggcccagtggccagatttctggcacttgaagcaagatcctgatggagaaggtcctgtaggaatgcttgactgctgcagcttaggcattttgaagttcttgtgtactggagatgtggctggggtttctctcacagtggaggcaaggaactacaactcagaaatacattgctacttggctgcctttactctattattgtacaccttgaaggcgaggttaattaagtcctgttatggggtttgagggccggaatttaatttttggagttttatttaatgttgggagtggattgggtaataaaatgtatattgagaataagactgccttttgaccttttagggtctagggctgtaaagcgtctcagggttgctgcccaacgagccatgaactgggctgggtttttatatttgatgaaaaagagcctaaatactaactgatttggcagaggtcggataaaggaaaaggagcgttaaccttgactatgcctttagctccagccacctctttaagaggaaattgttgggcaggttggggagggctagtcgcagaacaaaactgtaagccggactgggtgtggggagaggaggtgatagaaggattatagggtggaggagcagaagctgagaaagaattggagtctgattcagcctggtggggagtgacctgaggagcattctggggattaggtgagaggtcagatgggtcggtagaaaaggaagattggaagattgaaaagacgcagcgacgcttggggttgggactgaggggacaggcgggagggaaagaaggaggatttgggatgagtcgcattgggaacagagactagggagggaccgatgtgtaaaagaatgcctggacatcaggcacctcagactgtttgcccattttacaacaagaattatctagatcttgtaggatggaaaaatcgaaagtgccgttttctggctatttggaaccattgttgagtttgtattggggttaagcggcattgcaaagaaaataaggcatttaggttttaggtcaggtgtgagttgaagaggttttaagttcttgagaacacaggctaagagagaagaaggaggaatggagggtggaatgttgcccacagtgaaggaggcaagcccagagaaaagagagggtagagacacggagagaaggggtggggggtgctttgccccccaggaaagtggagagaaaagagagggtagagacacagagagaaggagtcgggggtgcttgtcccccaggaacgtggagagaaaagagagggtagaaacatggagagaaggggtggggggtacttgccccccaaaaagtggtgtttgccactaagggtgaaagatcaaggcaggcatcctcgcggtgatcagacaactctgaaacgtgggtgaataatcaagcaggcgtccccgcagtgattaaacaccaagggaagactgtcttcctgagtccgtgatcggcgccggagttttgggttcacagataaaatgcatttcctgtctctaccagaaaaggaaaggaaccgaaattaagagaagggagagattgaaagatggcaccaagattgaaaggagaaagaggttgagggatagtgagagaggttggagaagagagtaaaaagaggccgcttacctgatttaaaattggtgagatgttcctcaggctggttggtctgaggacccgaggtcattaggtggatctttatcatgaagcaaagagcaggaggacaggggattgatcttccaagggtggtcccccgatccgagtcatggcaccaaatttcacgcacgtccatgtgaagagaccacccaacaggctttgtgtgagcaataaagctttttaatcacctggttgcaggccggctgagtctgaaaaaagagtcaacgaaaggagataggggtggggccattttataggatttgggtaggtagtggacaattacagtcaaaggggggtgttccttggtgggcaggggcgggggacacaaggtgctcagtgggggagcttttgagccaggatgagccaggagaaggaatttcacaaggtaatgtcatcagttaaggcaggaacaggccattttcacttcttttgtgattcttcaattacttcaggccatctggatatatacgtgcaggtcacaggggatatgatggtttagcttgggctcagaggcctgacaaggatgttactcaggttactagttcctgcaactggatggatgatggtgttattcagtgtaattggaaataaagatgttacaagcaaatttgtggaaaattaatgttgagcccagctttggacatattgagattgtaaactctgagggacatattaccctattaggtagctggatattacgatttgggttccaggagagagattagggaattattaacatatgtatgttaattaaagccacagaagtgaagataactcagggaggaggtataaaatgagttcagacactgcacaagtctgaaccctgaagacaccaacattagaagtgaccagagaacagtggaaagtgtttcaaggtacccaagaggtgaactaaaggctgaaagaaaacaatgtaatttcaagaaggagggagtggtcagtagtttcaatgcccattaaggtcaaatcaaacaaggaaaaaaatcatgaccattggttgacaaagaagagctcaattcctttctactctattccccacctcctgccctgggagataaattctggcaaagtaaggagaacaggagctagattatttctttcccagcattctgttgtggatgatttaaaacatacagaaaaatgaaatgaataatacaatgaacacatgtatatcatccatctagattcaactgtcattgacatcgtaccttatttgctttatctaaccatctattcgtatactttttttggttgaaccatgttaagttgcagagatcatgacccttcaaccccacattctaagtcgacatctaaagccagattaaaatgaataaaggagcacacaggtggtaagtagataaaacagtgaatggaaattttgctttcaagaaatttgactgtaaaagagaaagctgctggaggagaacctcactcagttcaaggaagtttgtctattttgttattttgggtttttttttttgtttcttaaaatgtatgactccatatttttgtttattattaatattaggcgggagagcctagagcaagtttaactgctgatgggaaggagcgattggtgggagagaggctgaagggaagaaaggaagtacagaacactgagtgatgggaggggaggcttactgagctgggtgggaggactagcctgggagcagggaggaccaactctgcccagagggaagagggcaggaggagaggagagtataaatgcagatggagactgggtacagtggctcatgcctgtaatcccagcactttgggaggctgaggcgggcaggtcacttgaaatcaagagttcaagactaacctggccaacatgtcaaaaccccgtctctactaaaaatacaaaaattagccagttgtggtaacgcatgtctataatcccagctactcaggaggctgaggcaggagaatcacatgaacccgggaggtggagattacagtgagccgagatggcaccactgcactccagcctgggcaacggagtgagactccatctctaaataaataaataagtaaataaatgcagatggatgggagtctggggcagggggctgcaggggatttcatctaaagactttccctttttcgggaaccaggtggtgaagccataagggcaaggctgggaatggggacttgagggtcaaaggggtttcaaatacaatgaagaaagccaaccaggccaggcgcggtggctcacgcctgtaatcctagcactttgggaggctgaggcaggcatatcacctaaggttgggagtttgagaccagcctgaccaacatggagaaaccccgtctctactaaaaatacaaaaattagccaggtgtggtggtgtatgcctgtaatcccagctacttgggaggctgaggcaggagaattgcttgaacccaggagacggaggttgcagtgagccgagatcacgccattacactccagcctgggcaataagagtgaaactccatctgaaaaaaaaaaaaaaaaaagccacccaccactggcaggccagtggcattggagaccagtgggacaagagggccaaggatgtgagagcagttggagggatagacacaggggttgcgggggagggtgctaggaggaagtagagataagagaaggttgatgggaaggaataaatcaagtattggctctggaaaggcaggtgaggattaagatgcctagggtcagtgagaagagggtatatgagatttctcaggaggctgcagtctaattgtggcagtgggattggagctgaagagggcatctctcacctctctatcaactccactgaccatctagtcccttgcccagagactaggggtaggcttggtctcctgtccctgcccttctttccctctagaggccttgtctctgagcagtgaagaggaaaccggagcatccctccctgccagtgtccggttaccaagttttgggggcgggccatctggtgactgtgacaggagccccagcgccctggccagctcagtccattcctggagaagaacctgatgcagcgattcctgcagctcccgggggccgtggtgaggcctggggtcagaggggcctgcggagctgatcaagaggctgctagccctgtgctggctcccgaaggtgggcccccactccggtaccaggccttggagcctgaggagcttcggtggctgcaggcccaggaggaagacacgaccccagaagcatctctggaaggaccttgcccagaggccagccagagccagagccagccactacggtatagaggaacccacaggaaccccctacccacacagccaggaaggccagggatgggcagttgcactctcagcccagacctcttccggtcccacctcctctgatggaggcttaggctggcatttagggtccaggctgggcggagaaggtggtcaggggcaccgtatgggggctgagggtatgagtgaggagagatgaggggcttaactccctggaggctctgaggggaggaggatagtaaaatatttgagggttgaggtcccaccttgacctctttctccccacaggcccccactggagtgggctctggacgaggtttggggacaggatacagcacagacagggtttggccagccactgcctgccagtggactggaacttaggtggtaagaggtgacagcgaggtgtatatcaagggaggtgagcatgactgacccccagtgccatgccaggccccctggctggctccagccacccccagaagagtcccttaggctaggtcagactaggggtcaggtcagagtgagtgcagcagcgtaaggggatctgactatgggagataatgtttcatggccttagggtgttgtgccttagtccctgcctctgcctcttgggaacagaagttggtgggagtgaggacgagaggcccagggcggtctcacctcaggtggtggctgcggtctgtgtcagtgcatattctgtgtcagtgcatattcgacagtcaatcttacctgtgctggctgctttaggcccagtggtcctgccccctttcattccccttctcctgcaggggcctggaatgtactcactaggctgggtggggaggatgccctggggtgtgtgcatttgacaggcgcatgtggcatttgtgggtgtggtgaggaagggaatacccagagttaaaggagattgggcaaacttggccctccttccacggaagcccagggaaaagccatcccagggtgactcctcagaagatcagaggacccttggggctggatatatttgatcttagaagcctacatttatcatcaaaaatctcaactaggagtccactgaccattttggtgaatgagactggagaggccaagtttggtccaagttatctgtgtattagatgtgatgcggcatgtgtgtgtgtgtgtagggggacgtgtgtggggtgtgtgtgtctctatgagggtgtgggggagcggggagaggtcttgtgatatatgtctgtaggggacatgtatgggatatgtgtgtctataagagggtgtgggagagtggggagaggtctcctggtggtatatgtctggggggtttgtaggtgtgtaggtgagttgtgtgggtggtttatgtgtgtagagtttttctgtgggaggtgtctgtatgtgggggagtgtgtttctctgggcgttgtgtaggcaggattttgtgggtgtgcgtgggtttatgtatggattctactagtgtctgcgggacctgtaggtatgtttgtatgagctgtccgtgaggtgtaggtatgtcgggggacatgggagtgtctgaggtatatgtgggtggtatcaatgtgtagttgtctgtggggtgtgcgtatgaaggatcctgacgtggagtgttgtgcattcatatctcagggaagctggtgcccagctctgtcatttttcctaggccctcggtgctgcccacgcctacccagctcaatggtctgtacctatgaccatgcccctggtgtcctgagctcagcctcctacccactaagaaactcaacagtctggtctgtgtttggcagggtaagagggtgattgtcttctggccctggcctgaccctggaagagtagaaggtgtcctctgatttggggggcatccccccaggtgagggagtttcagataacatgatggggctggatattttcttctgtcctcacatgacagatagcgagggcctcagataatgctggaaggcatcatctttctattttgctttccatcaaaaatctctttgggaaagacagtttctaacattcttgggatagtgacttcttagtgcccctcttcttgtctgacgtcaggtactcacgcatttctgcagccctgtgactaagttgcgtgttctgtctggttcttctcttcctctcagcattcatcacttgtttctcagcattagcagcagtcatttgccactttatgattgttatcatgctctttcctctcctaacagtgctatccccaatttctgattttctgtcatttctaaatgttgcatgtctgtgactaactttgcacacattgattttttttttattttttatttttgagatggagtctcgttctgttgcccaggctggagtgcagtggcgcgatcttggctcactgcaagctccacctcctgggttcacgccattctcctgcctcagcctactgagtagctaggactacagacgcccgccaccacacccggctaattttttttaaattttttagtagagacggggtttcaccatgttagccaggatggtctcgatctcctggccttgtgatccgcctgccttggcctcccaaagtgctgggattacaggcgtgagccaccgtgcccggcctgatttttaatttttatcactgtgatatttctcaagctgggttcttgtgcctgggtcaaagctgtgggttatcagagtgtcatctgggaaattagtgtgtgtgagtccccacacacagctgctcaccacattttggaattgtcttggcaacatatgagtgcatcagtttcacacaattctatcagctatatatagacacatttttttcatgggtttattaacaattctctgatcacttcgtgatcaccagttctgcatcctctgagtatggttagccacattgttcactgcacaagggcatctggccaaggaataccagcccatgctccacacacagaatggggagcaacagctcagggctgtgtctatctgtaggggcatgcagattgaaaatgggcttgtagcagccctgacagtgaatgctgcaaagagaccttatacatgtatatcagttccttttttaaatttttttgagatggagtctcactctgtcacccaggctggagtgcagtggcgcgatctcggctcactgcaatctccgcctcctgggttcaagcgattctcgttcctcagcctcctgagtagctgggattacaggtgtgtgccaccatgcccggctaatttttgtaattttagtagggatggggtttcaccatgttggccaggctaatctcgaactcctgaccttaagtgatctgcccaccttggcctccaaaagtgctggaattacaagcgtgagccaccacacctggcctctatttcgaatattaaactttaatttaccatatcccaaatatttttccttttgttgctattatgggctgaattgtgtccctccaaaatgcatatgttgaagttctagcccccagtacctcagaatgttacctttgaggtgattaagttaaaatgaggttattaaggggggccctaatccaatatgactgatttctttataagaagaggaaatttggatataggcacgcagaaggaagaccatgtgaagacagagaagatggttgtaagagacagaaaaacccaaagtgtgtttctcctactctcatacacaccgctcaccagagagtgcttcacctctggccacaaaaatgggtggagatttctccccaccaacaacctgttctccagcagacactaactgggtgttctctaattcaagtcaatctagtgttagattttttaggttaagggctcagtgccacaagactgctctctgcttcagatgccaattccaagtggtaagttgtcagctatacttctgaccaactggctataaatcaggggttcccatgccaccctccttgggttcaactctgtgagtggctcacagaactcagggaaactttagttatatttacccatttattataaagggtagagacaaacaccagatgaagagatgcatagggagaggtatggaaggaggggtgcagagctcccatgccctctccaggcaccacaccctccaggcaccttcacatgttccacagtctggaagctctcgaaaccctatcctcttgggtttttatgaaggcttcatgattgatcgcatctttggccatgtgatcaactcaaccatcagccccactccccattccccagaggtcaaatagtgggattgaaagtttcaaccctcagctgggcacagcagctcacgcctataatcccagcacttttggaggccaaggcgggtggatcacttgaggtcaggagttcgagaccagcctgaccaacatgatgaaacccatctctattaaaaatacaaaaatttgccaggtgtggtggtgggcaactgtagtcccagctatttggaaggctgaggcaggagaattgcttcaacccagaaggtggaggctgcagtgagccgagattgcctcactgcaccactccagcctgggcgacagagcaagactcagtgtcaaaaaaaaaaaaaaaaaaagaaagaaagaaaaaaagttccaaccatctgataacaaaagatgcttctatcacccaggaaattccaagggatttccatgtcagttgttcctctcactcaggaagttataaaggtcttaggatctctgcgtgaggaactgggtggaagaccaaatattagaacagaagttctcctagcatccctattgtcaagagttttaggagctctgtctcagaaatggggtatagagaccaaatatatatttctttacaatatcacaagaatcatctacaagccaaagaaagaggctatagaagaaaccaaccctgctgacactttaatctcagccttccagcctccagaactgtgagcaaataaatttatgttgtttaagccaccatctgtagtacttcttgtttttttttttttttagagacaggttcttgctctgttgcctaggctggagtgcagtagcacaatcatagctcactgcagcctccaacatcttggtgcaagcgatcctcccacttcagcctcctgagtagctgtgactacaggcatgtgccaccatgcctggctaattttttttatttttgtagaaacaggatctgactatgttgtccaggctggtcccaactcctgagctcaagcaatccttctgcctcagtctcccaaagtgctgggattacaagtgtgagccaccatgcctggcctgtggttctttgttatggtggttctaggaagctagtatagttgccttatttttctcataaatttagtttttagataccaaagtttaaaaattaaacctaggcctggcacagtggctcacacttgtaatcccagcactttgggaggccgaaggaggcaaatcacttgagtccaggagtttgagaccagcctggtcaacatggcgaaaccccaactctactaaaaatacaaaaaatttgccaggcatggtggtgcacacctgtaatctcagctatttaggaggctgaggcatgagaatcacttgaacccaggaggttgaggctgcagtgagccgagattgcgccactgcactccagcctgggcaacagagcgagacttcgtctcaaacagaaaaacgaaaaaaaggcctgggcgcagtggctcacacctgtaatcccagcactttgggaggctgaggtgggcggatcaactgaggtcgggagtttgagaccagcctgaccaacatggagaaacctcatctctactaaaaatacaaaaattagctgggcatggtggcgcatgcctgtaatcccagctattctggaggctgaggcaggagaattgcttgaacccaggaggtggaggttgcagtgagctgagatggcaccattgcactccagcctgggcaacaagaacgaaactctgtctcaaaaaacaaaaacgtaccaattaaacctagccatattgttgctgctaataattttatgaccttaataaaatcttcccttccttcttttgtatttaaaaataattaactgttaagcaaatgcgggatttattttggggtgaaatatgtatacaagttaaattatttgctgctggccaggtgtggtggctcacacctgtaatctcagcgctttgggaggatgaggcgggaagatcacttgaggtcaggagtttgagaccagcctgaccaacatggtgaaaccctgtctctactaaaaatacaaaaattacccgagcgtggtggtgcatgcctgtaatcccagctacttgggaggctgaggcaggagaatcacttgaacccaggaggcagaggtttcagtgacccgagatcgtgccattgcactccagcctgggcaatgagagcaaaattccatctaaaaaaaaaaaaagtgctgcaaagcagttgtcccaatagcatttatttaagtggggcgggggcgggggggtgggggcggggggagattcttattggttcgtaatttatcaagttagaccttttatgaaattccccccatgacctttgaccttctgtttttaacctggtaccaaacagcttttatcatcgtctcgtggtgtttatgttttgaagtccaatagggtgagttgtctatgattgtttccttcttttcccaaaaatattctttggagttcttacctactgattttttttttccagatgaattttgctgtcacttaagtttgacaaaatgttccctttgaaatttcaaatttttgaaatgaagtatgagatctaaaaaaaaaaagaaacctgtgtattggctcagcattacccttattcctctcagccaagtgcaagggatcacttactcaaatctttattcatcccactagagtttaatgacttccttgaatggctgttcaatgttcagtgacaggtctggcttttgttgtgaggccatctatggagtctctgggacccttccagtccctggaatcagtttggtctgagaggtcaggacttggaaacatactggaggcagggcaagggcaccctgctcttgttttggcatctacctcttttccgctggtccttcttatccatccaactagtccttttccctgagccaggtccatactttcccaccccaaacccttcctcttgtttcctggctctctgtttctggctacattcatttcctacactcctgtatcaaaagtaccacaattgcttctcgttcccacagtgcagtgcggctgagcgcctcagagcccgcggggacgctgcggggggattgcggggagggggcgttgggaggtgccgatgttgggctgggcggatgagcgcatctgcgtggtgagccttccaacgtgcgcgagaaggacgtggaagaccttttctacaagtacggccggatccgcaagatcaagcttaagaatgggcactgccttgtgcccttcgccttggtgcgctttgaggacccccgagatgcagaggatgctatttatggaagaaatagttatgattatggccagtgtcggcttcgtgtggagttctccaggacttacgaagtcggggtgggtggccccgtggtgggaggaatgggccttctgcaagaagatctgatttccgagttcttgtttcaggacttcctcaggcagctggcaggacctgaaggatcacatgcgagaagttggggatgtctgttatgccgatgtgcagaaggacggtgtggggatggttgagtatctcagaaaagaagacatggaatatgccctgcataaattggatgacactaaattccactctcatgatagtgaaacttcctacatctgagtttatcctgagagaagcaccagctatggctactcacagtctcggtttgggtcaaggggccgtgactctccatactaaagccggggttccccacaccacttctctcctttcaggccctactgagacaggtgatgggaattttttctttattttttaggttaactgagctgctttgtgctcagaatctgcattccagattgaggatttagcgtcttaggaaattattttaattttttttttttaaagaagaaaaaaaaactacatactttctaccagggccatattagcagtgaaacattttaaactgcagaaattgtggttttggttcagaaacaagttgtatatttttcactcctgaatatgggtaaaaaatcagttccgtctttgtgggttgctctgctatggagatcaacagttactgtgactgagttggcccattctgcttaaaaatatgttttaaacgtttaagaaaaatgctcatcatcactggccatcagagaaatgcaaatcaaaaccacaatgaggtaccatctcacaccagttagaatggcaatcattaaaagtcaggaaacaacaggtgctggagaggatgtggagaaatagaaacatttttacactgttggtgggagtgtaaactagttcacccattgtggaagacagtgtggcgattcctcaaggatctagaactagaaataccatttgacccagtgatcccgttattgggtatatacccaaaggattgtaaatcattctactataaagacacatgcacacgtatgtttattgcagcactgttcacaatagcaaagacttggaaccaacccaaatgtccatcagtgatagactggattaagaacatgtggcatggctgggtgcggtggctcatgcctgtaatcccagcgtggctcatgcctgtaatcccagcactttgggaggccaagacgggtagatcacgaggtcaggagatcgagaccatcctggctaacacggtgaaaccccgtctctactaaaaatacaaacaattagctgggcgtggtggtggcgggtacctgtagtcccagctactcggtaggctgaggcaggagaatggcatgaacccaggaggtggagcttgcagtgagccgagattgcgccactgcactccagcctgggcgacagagcgagactccatctcacaaaaaaaaaaaaaaaaaaaaaaaaaaagaagaagaaaatgtggcacatatacaccatggaatactatgcaaccataaaaaaggatgagttcgtgtcctttgtagggacatggatgaagctggaaaccatcattctgagcaaactactgcaaggacagaaaaccaaacactgcaggttctcactcataggtgggaattgaacaatgagaacacttgaacacggggtggggaacatcacacactggggcctgttgtggcgttgggggaggagggagggatagcattaggaggaatacctaatgtaaatgacgaattaatgggtgcagcacaccaacatggcacatgtatacatatgtaacaaagctgcacgttgtgcacatgtaccctagaacttaaaagtataattaaaaaaaaaaagtttagtaattgaaaaaaaaaagtacaacaattgggttggttggaacagcagaaatgaattgtctcacagctctggaggccaaaagtctgaactcaaggtgtcggcaggaccatgctccctctgaaacccatagggaaatccttctttgccccttctagcttctggttgtttgctggcagtctctggcattccctggcttgtagacgcatctttccaatcgtctgccttcacatggtagtctccctgtgtctgtctctttaagtggctgtcttttgttttttgtgtttttttaatttcaatttaatctattttttgtagacacattgtttcaccatgttgccaggctggtctcgaactccagggctcaagtgatcctcccgtctcagcttcccaaagtgctgggattacaggcgtgagccgccacacccagcccacatggctgtcttcttatgggaaaccagacatgggattagagacccactctattagagtaggattgcatttaactaattacatctgcaacaactctatttccaaataaggttacattctgaggtactaggggttaagacttaaatatatcctttttaggaaggacacagttcaacccacaatattagctggccacatgtttcccctgatctgtactttacttgttccccctggctctggtccctcctcgggtcaggtcctgcctgagcctcccctggccatgtcccttctttgtgcctggaccctcctgattaataccccatccccacccttgtgccctcagctgacttcttgtacctcccaccaggcatgatgacctgaaggagatgctggacaccaacaaggattctctcaagctggaggccatgaagaggattgtggcggtaagaggggaaggaggaggcctccctccgggcggggcctgggtggccaagagcagctctccttagctccttgtagaccttccctctagttagtgctgtgcctctcgctttgtccctcttcccctaccttgaccccaccacccagatgattgcccgaggaaagaatgcttcagacctgtttcccgcggtggtgaagaacgtggcctgtaagaacatagaggtgagcactacctggtgagggattgcttgtccccacctcccccaggaccacactcaagcttggggtgaggaaggaaatgatttagcccctgggggcccgacctgctgagaaatgtctctgagccaggagaagacactgtctccatgtccctgaactggatgtggatcaaggtaaaggacccggatacactcaggggtgctctcccccactgggagagtttgtccccatggaccgcagctggctggggagatgacatcccaggggtaggggggtgggcacaggtgcctgctgagaagcgttctgctgagaaacgtgctctccccaaggtgaagaagcttgtctatgtgtacctggtacgctacgctgaggagcagcaagacctggccctgctgtccatctccaccttccaacgtggcctaaaggtcaggggtctcagtttgcctcccagggcctgggcctcgttggcgctgtatcggaggagtaggcctggggagaggccatgagcatgggagcgggctctgcagaccccttcctacctgcctaaaattgggagggtcacagtcagaagaggccagccagaccctcagagagtggaagctgggctcagaaggggcgtaagagatgaagtgggtacccagggcccctgtctctcttcccaggagcctgtggtaatggctgcttctagtatgaaccacttgagcccccggagagtggagagtctctagcaatggagaacccctcaaccctcacccccctttgtgtaaaggtgtgaattgtggtccacagccaggtagatttcaacctttagcagtggcctgaatcccccacaccattctcaccttttgtttcattttgcccaaggcctctagttggatttacatatgttaggtgcatgtataagtctcccccctaagggcttttctggttagtctaagacatcttgagggtaaagacagccatttcaaggccattctctccatattggatttttcagctctgattacaaccattaactcctctatttttgcatacctttatttatttatttatttatgagacaggttctcactgtgttgcccaggctggagtgcagtggtgcaatcatggctcactggagcctcgacttccctgagctcaggtgattctcccacctctgtctcctgagtagctgcgactactcagcctgcatcaccatgctcggctaatttttttgtagtttttgtagagatggggtttcaccctgttgcctatgctggtcttggactcctgggctcaagtggcctcagcttcccaaagtgctgggattacagggatgagctaatactcctagcctggatacttttagttcaaatttctgtgagagagattgtgaaaggtccagctcatcttttcatatccagaagttctgtaggttgctgggtagacaggattgctgctcaaatccagggcccaccccttgtccaatctgctatggccagcaagaggggttgacagtcggcttctttggggtgagagtagaaagcatggtcacttgaatatacaattcattcatttagtaaatacttgggtgtctctatgccacacattgtgctagatttctttttataagtcaaaaccatggaatccgtcttagattggcaagtaatcttttggtttgagtaagggttaagtataaaaactaatctgaaattgttgtacagattttcacctatagtctctaccaactgaccctgtcccccttttagaaaaccagagctcatttagttcaactcaatgtgataatttctttctgcaaagtgccaaatagtattttaggttttgtaggccttatagtctcaactatgcaactactcaattttgcccttatggtgcaaatgcagccattgacaagtgggcgtggccgtgttccaataaatctatataaaaaacaggcaatagacagattttatccaagggctgtagcatgccagcctttgctctagaacatgtctaacaggtcatcttttctgatagggacctcactccttcataaggcaacttgctccatctcaagacaactaccactatttggggtgttttttaaaccattctcttttgttgaaacctccacaactataatttttaaaaattgatttcaggctgggtgtggtggctcatgcctgtaatcccagcactttgggaggccgaagcaggcaaatcacaaggtcaggagttcaagaccagcctggccaacatggtgaaactccatctctactaaaaatacaaaaaattagcttggcatggtggcgggtgcccataatcccagctactcaggaggctgacgcaggagaatggcttgaacccgggaggcagaggttgcaatgagccgagaacgtgccactgcagtccagcccaggcgacagtgtgagatccatctcaaaaaaaaaaaaaattgatttcaggctgtactgcattatgactgcacctgtgaatagccactgtactccagcctgggcaacatagggagaccctgtatctaaaaaataaaataaaatttactacaggttcacaaaaggcataaagaataatataatgaatatccataagaaatgacacatttctcaaatagccaaagcctcctatatatcttctcttgtttatcattcataggtatgtatttattcctgtgctagtaatttgcatattgttaagcaatataaaatgttttgtaaatggtgtcatcgtactacatatgtattcctttaaaacttgttttcttttttgttgtcactggcttttggtctctcctgcatgttggaaccaatcatttcaatccagccttctcccttctttcaatcctagcccaggctagggccgtgttcactttcttaggagatccctcatggaatcaaacctctgactggcaagcagataatccaggtctccctacatcctgtctttgtacagttggtcccttgaaccccctatgaaaccctactctatttcattttatcagtttagcacagggtccaaaccagggtgattctgaatcttaattatgtccctcctgattttgtgtcttctttcaagatactgataagctatttggaccagggcaaaagactgaggcatagcatgtttccaggttgacactgatctgttaataaaccttctccaagtatatttcaccacgttgtagacccacctgactgtacagacagctggcatttttctatcttgttaggaaggatcttattcaatagca

SEQ ID NO: 10743 - DNA, 3395 bp, Homo sapiens
ggctggcgccggtgcctttaagacctcagcgcgcggccctgattgagaaatccgcgcgcagcctccgccgctgcacactgcagcctctgctgaacccctgccgcgccgccgccttcgccagcccggaccggaccggcccgccttcccttcctccgctccagccggcctccggccccgcaacctcctcctcggcgaagtctccctggccgccccatgtcggccgcccccgcctacagcgaagacaagggcggctccgctggccccggggagcccgagtacggccacgaccccgcgagcggcggcatcttctcctccgactacaagcggcatgatgacctgaaggagatgctggacaccaacaaggattctctcaagctggaggccatgaagaggattgtggcgatgattgcccgaggaaagaatgcttcagacctgtttcccgcggtggtgaagaacgtggcctgtaagaacatagaggtgaagaagcttgtctatgtgtacctggtacgctacgctgaggagcagcaagacctggccctgctgtccatctccaccttccaacgtggcctaaaggtcaggggtctcagtttgcctcccagggcctgggcctcgttggcgctgtatcggaggagtaggcctggggagaggccatgagcatgggagcgggctctgcagaccccttcctacctgcctaaaattgggagggtcacagtcagaagaggccagccagaccctcagagagtggaagctgggctcagaaggggcgtaagagatgaagtgggtacccagggcccctgtctctcttcccaggagcctgtggtaatggctgcttctagtatgaaccacttgagcccccggagagtggagagtctctagcaatggagaacccctcaaccctcacccccctttgtgtaaaggtgtgaattgtggtccacagccaggtagatttcaacctttagcagtggcctgaatcccccacaccattctcaccttttgtttcattttgcccaaggcctctagttggatttacatatgttaggtgcatgtataagtctcccccctaagggcttttctggttagtctaagacatcttgagggtaaagacagccatttcaaggccattctctccatattggatttttcagctctgattacaaccattaactcctctatttttgcatacctttatttatttatttatttatgagacaggttctcactgtgttgcccaggctggagtgcagtggtgcaatcatggctcactggagcctcgacttccctgagctcaggtgattctcccacctctgtctcctgagtagctgcgactactcagcctgcatcaccatgctcggctaatttttttgtagtttttgtagagatggggtttcaccctgttgcctatgctggtcttggactcctgggctcaagtggcctcagcttcccaaagtgctgggattacagggatgagctaatactcctagcctggatacttttagttcaaatttctgtgagagagattgtgaaaggtccagctcatcttttcatatccagaagttctgtaggttgctgggtagacaggattgctgctcaaatccagggcccaccccttgtccaatctgctatggccagcaagaggggttgacagtcggcttctttggggtgagagtagaaagcatggtcacttgaatatacaattcattcatttagtaaatacttgggtgtctctatgccacacattgtgctagatttctttttataagtcaaaaccatggaatccgtcttagattggcaagtaatcttttggtttgagtaagggttaagtataaaaactaatctgaaattgttgtacagattttcacctatagtctctaccaactgaccctgtcccccttttagaaaaccagagctcatttagttcaactcaatgtgataatttctttctgcaaagtgccaaatagtattttaggttttgtaggccttatagtctcaactatgcaactactcaattttgcccttatggtgcaaatgcagccattgacaagtgggcgtggccgtgttccaataaatctatataaaaaacaggcaatagacagattttatccaagggctgtagcatgccagcctttgctctagaacatgtctaacaggtcatcttttctgatagggacctcactccttcataaggcaacttgctccatctcaagacaactaccactatttggggtgttttttaaaccattctcttttgttgaaacctccacaactataatttttaaaaattgatttcaggctgggtgtggtggctcatgcctgtaatcccagcactttgggaggccgaagcaggcaaatcacaaggtcaggagttcaagaccagcctggccaacatggtgaaactccatctctactaaaaatacaaaaaattagcttggcatggtggcgggtgcccataatcccagctactcaggaggctgacgcaggagaatggcttgaacccgggaggcagaggttgcaatgagccgagaacgtgccactgcagtccagcccaggcgacagtgtgagatccatctcaaaaaaaaaaaaaattgatttcaggctgtactgcattatgactgcacctgtgaatagccactgtactccagcctgggcaacatagggagaccctgtatctaaaaaataaaataaaatttactacaggttcacaaaaggcataaagaataatataatgaatatccataagaaatgacacatttctcaaatagccaaagcctcctatatatcttctcttgtttatcattcataggtatgtatttattcctgtgctagtaatttgcatattgttaagcaatataaaatgttttgtaaatggtgtcatcgtactacatatgtattcctttaaaacttgttttcttttttgttgtcactggcttttggtctctcctgcatgttggaaccaatcatttcaatccagccttctcccttctttcaatcctagcccaggctagggccgtgttcactttcttaggagatccctcatggaatcaaacctctgactggcaagcagataatccaggtctccctacatcctgtctttgtacagttggtcccttgaaccccctatgaaaccctactctatttcattttatcagtttagcacagggtccaaaccagggtgattctgaatcttaattatgtccctcctgattttgtgtcttctttcaagatactgataagctatttggaccagggcaaaagactgaggcatagcatgtttccaggttgacactgatctgttaataaaccttctccaagtatatttcaccacgttgtagacccacctgactgtacagacagctggcatttttctatcttgttaggaaggatcttattcaatagca

SEQ ID NO: 10744 - DNA, 3663 bp, Homo sapiens
acctttgattcgttcgtttgtttcttcatttgtttattcgtaaattctgcaacaagcatttatgaaaagccaactgtgtcgagtcctgaactagtcacggaatacaactgtgaacatgagacccttcttgtcctcacgatgctctagaggggagcacagatgaagaagcagtcagggacagtcgagtgtaatgggggcagtgggagcagggagaggacctagtctctggcgccggagagaaggaagacaggagcgtgaggcatgatgacctgaaggagatgctggacaccaacaaggattctctcaagctggaggccatgaagaggattgtggcgatgattgcccgaggaaagaatgcttcagacctgtttcccgcggtggtgaagaacgtggcctgtaagaacatagaggtgaagaagcttgtctatgtgtacctggtacgctacgctgaggagcagcaagacctggccctgctgtccatctccaccttccaacgtggcctaaaggatcccaaccagctgattcgtgccagtgccctccgtgtcctctctagcatccgtgtgcccatcatagtgcccatcatgatgctagctatcaaggaagccgcctcggacatgtcaccctatgtgcggaaaacagctgcccacgccatccctaaactctacagtttggactctgaccagaaggatcagctgatagaagtcattgagaagcttctggctgacaagaccacgctggtggcgggcagtgtggtgatggcctttgaggaggtctgcccggagcgcatcgacctgattcacaaaaactaccggaaactctgtaacctgctgatcgacgtggaggagtggggccaggtggtcatcatcagcatgctcacccgctacgcccgcacgcagttcctgagccccacccagaacgaatccctactagaggagaacgcggaaaaagccttctacggctcagaggaggacgaggccaagggcgcggggtctgaggagacggccgccgcggccgccccctcccgaaagccctatgtcatggaccccgaccaccggctgctgctgcgcaacaccaaacccctgctgcagagccgcagcgccgcggtggtgatggcggtggcgcagctctacttccacctggcgcccaaggcggaagtgggcgtcatcgccaaggcgctggtgcgcctgctgcgcagccacagtgaggtgcagtacgttgtgctccagaacgtggccaccatgtccatcaagcgccggggtatgtttgagccctacctgaagagcttctacatcaggtccaccgaccccacccagattaagatcctgaagctggaagtgctgaccaacctggccaatgagaccaacattcctactgtcctacgggaattccagacctatattcgcagcatggacaaggactttgtggcagccacaatccaggccattggacgctgtgcaactaacatcggccgagtccgtgacacctgcctcaatggcctggtgcagctgctgtccaaccgtgatgagcttgtggttgcagagtcagtggtcgtcattaagaaattgctacagatgcagccagcacaacatggagagatcatcaaacacttggcaaagcttacagacaacatccaggtgcccatggcccgagccagcatcctgtggctcatcggagagtactgtgagcatgtccccaggattgcacctgatgtcttaagaaaaatggccaagtcattcacagcagaggaggatattgtcaagctgcaggtcatcaacctggcagccaagctctacctgaccaactctaaacagaccaagctgctgacccagtatgtgctgagtctggccaaatatgaccagaactatgatattcgcgaccgggcgcgcttcacccggcagctcatcgtcccttccgagcagggtggggccctcagccgccatgccaagaagctcttcctggcacccaaaccagctccagtcttggagtcatccttcaaagaccgggaccacttccagctgggctcactgtcccacctgcttaatgccaaggccacaggctaccaggagctcccagactggccggaggaagccccagacccatctgtgcgcaacgtggaggtacctgaatggaccaagtgctcaaatcgggagaagagaaaggagaaggaaaaacccttctactcggactctgagggggagtcaggccccacggagtccgcagacagtgaccctgagtctgagagtgaatcggacagtaagagcagcagtgagagcggctctggggagtccagcagtgagtccgacaatgaagaccaggatgaggatgaggagaaagggagaggcagtgagagtgaacagagtgaggaggatggtaagaggaagacaaagaagaaggtgccagagagaaaaggagaagcgtcatcctctgatgagggcagcgattccagcagtagctcatcagagtccgagatgacatcggagtccgaggaggagcagttagaacctgcctcctggagcaggaaaacacctcccagcagcaaaagtgctcctgcaaccaaggagatctccctgcttgatctagaggatttcacccctcccagtgtccagcctgtgtctcccccagcaattgtgtctaccagtctggctgctgacctggagggcctgacactcacagactccaccctggtaccgtcgcttctgagtccagtatcgggtgttgggcggcaggagctgctgcaccgggtagctggcgaggggctggctgtggactacaccttcagccgccaacctttctccggggatccccacatggtgtccgtgcacatccacttctccaacagctctgatacccccatcaagggcctgcatgtgggcactcccaaactgcctgctggcatcagcatccaagaatttcccgaaattgagtccctggcacctggagaatctgccactgctgtaatgggcattaatttctgtgactcaacccaggcagccaacttccagctgtgcacccagacccgacagttctacgtctccattcagccacctgttggggagctgatggcccctgtgttcatgagtgaaaatgagtttaagaaggaacagggaaagctgatgggcatgaatgagatcacagagaaactcatgctgccagacacctgtcggagtgaccacattgtggtgcagaaagtgactgccactgccaacctgggtcgtgttccttgtgggacatctgatgagtacaggtttgcagggaggacactgactggtggaagcctcgttctgctgaccctggatgcccggccagctggagctgcccagctgactgtcaacagcgagaaaatggtgattggcaccatgctggtaaaggatgtgatacaggctctgacccagtgacttccaaatgctgtgacctgtttggctcccatctatacctccccatgacacctaggctgtcagtctctctcatctttctctctctctctcatcatcctcctcatgccagatagcattcagggtgtcctctctccctctggaggaccaagccctcccctaatgccctccccatggattccttagtgatctgtgcagagagagatggcagccactcccttcagtcctcccagatttctgtagctatttatgtagcaggctcaataaaatg

SEQ ID NO: 10745 - DNA, 18344 bp, Homo sapiens
tgacagcgaggtgtatatcaagggaggtgagcatgactgacccccagtgccatgccaggccccctggctggctccagccacccccagaagagtcccttaggctaggtcagactaggggtcaggtcagagtgagtgcagcagcgtaaggggatctgactatgggagataatgtttcatggccttagggtgttgtgccttagtccctgcctctgcctcttgggaacagaagttggtgggagtgaggacgagaggcccagggcggtctcacctcaggtggtggctgcggtctgtgtcagtgcatattctgtgtcagtgcatattcgacagtcaatcttacctgtgctggctgctttaggcccagtggtcctgccccctttcattccccttctcctgcaggggcctggaatgtactcactaggctgggtggggaggatgccctggggtgtgtgcatttgacaggcgcatgtggcatttgtgggtgtggtgaggaagggaatacccagagttaaaggagattgggcaaacttggccctccttccacggaagcccagggaaaagccatcccagggtgactcctcagaagatcagaggacccttggggctggatatatttgatcttagaagcctacatttatcatcaaaaatctcaactaggagtccactgaccattttggtgaatgagactggagaggccaagtttggtccaagttatctgtgtattagatgtgatgcggcatgtgtgtgtgtgtgtagggggacgtgtgtggggtgtgtgtgtctctatgagggtgtgggggagcggggagaggtcttgtgatatatgtctgtaggggacatgtatgggatatgtgtgtctataagagggtgtgggagagtggggagaggtctcctggtggtatatgtctggggggtttgtaggtgtgtaggtgagttgtgtgggtggtttatgtgtgtagagtttttctgtgggaggtgtctgtatgtgggggagtgtgtttctctgggcgttgtgtaggcaggattttgtgggtgtgcgtgggtttatgtatggattctactagtgtctgcgggacctgtaggtatgtttgtatgagctgtccgtgaggtgtaggtatgtcgggggacatgggagtgtctgaggtatatgtgggtggtatcaatgtgtagttgtctgtggggtgtgcgtatgaaggatcctgacgtggagtgttgtgcattcatatctcagggaagctggtgcccagctctgtcatttttcctaggccctcggtgctgcccacgcctacccagctcaatggtctgtacctatgaccatgcccctggtgtcctgagctcagcctcctacccactaagaaactcaacagtctggtctgtgtttggcagggtaagagggtgattgtcttctggccctggcctgaccctggaagagtagaaggtgtcctctgatttggggggcatccccccaggtgagggagtttcagataacatgatggggctggatattttcttctgtcctcacatgacagatagcgagggcctcagataatgctggaaggcatcatctttctattttgctttccatcaaaaatctctttgggaaagacagtttctaacattcttgggatagtgacttcttagtgcccctcttcttgtctgacgtcaggtactcacgcatttctgcagccctgtgactaagttgcgtgttctgtctggttcttctcttcctctcagcattcatcacttgtttctcagcattagcagcagtcatttgccactttatgattgttatcatgctctttcctctcctaacagtgctatccccaatttctgattttctgtcatttctaaatgttgcatgtctgtgactaactttgcacacattgattttttttttattttttatttttgagatggagtctcgttctgttgcccaggctggagtgcagtggcgcgatcttggctcactgcaagctccacctcctgggttcacgccattctcctgcctcagcctactgagtagctaggactacagacgcccgccaccacacccggctaattttttttaaattttttagtagagacggggtttcaccatgttagccaggatggtctcgatctcctggccttgtgatccgcctgccttggcctcccaaagtgctgggattacaggcgtgagccaccgtgcccggcctgatttttaatttttatcactgtgatatttctcaagctgggttcttgtgcctgggtcaaagctgtgggttatcagagtgtcatctgggaaattagtgtgtgtgagtccccacacacagctgctcaccacattttggaattgtcttggcaacatatgagtgcatcagtttcacacaattctatcagctatatatagacacatttttttcatgggtttattaacaattctctgatcacttcgtgatcaccagttctgcatcctctgagtatggttagccacattgttcactgcacaagggcatctggccaaggaataccagcccatgctccacacacagaatggggagcaacagctcagggctgtgtctatctgtaggggcatgcagattgaaaatgggcttgtagcagccctgacagtgaatgctgcaaagagaccttatacatgtatatcagttccttttttaaatttttttgagatggagtctcactctgtcacccaggctggagtgcagtggcgcgatctcggctcactgcaatctccgcctcctgggttcaagcgattctcgttcctcagcctcctgagtagctgggattacaggtgtgtgccaccatgcccggctaatttttgtaattttagtagggatggggtttcaccatgttggccaggctaatctcgaactcctgaccttaagtgatctgcccaccttggcctccaaaagtgctggaattacaagcgtgagccaccacacctggcctctatttcgaatattaaactttaatttaccatatcccaaatatttttccttttgttgctattatgggctgaattgtgtccctccaaaatgcatatgttgaagttctagcccccagtacctcagaatgttacctttgaggtgattaagttaaaatgaggttattaaggggggccctaatccaatatgactgatttctttataagaagaggaaatttggatataggcacgcagaaggaagaccatgtgaagacagagaagatggttgtaagagacagaaaaacccaaagtgtgtttctcctactctcatacacaccgctcaccagagagtgcttcacctctggccacaaaaatgggtggagatttctccccaccaacaacctgttctccagcagacactaactgggtgttctctaattcaagtcaatctagtgttagattttttaggttaagggctcagtgccacaagactgctctctgcttcagatgccaattccaagtggtaagttgtcagctatacttctgaccaactggctataaatcaggggttcccatgccaccctccttgggttcaactctgtgagtggctcacagaactcagggaaactttagttatatttacccatttattataaagggtagagacaaacaccagatgaagagatgcatagggagaggtatggaaggaggggtgcagagctcccatgccctctccaggcaccacaccctccaggcaccttcacatgttccacagtctggaagctctcgaaaccctatcctcttgggtttttatgaaggcttcatgattgatcgcatctttggccatgtgatcaactcaaccatcagccccactccccattccccagaggtcaaatagtgggattgaaagtttcaaccctcagctgggcacagcagctcacgcctataatcccagcacttttggaggccaaggcgggtggatcacttgaggtcaggagttcgagaccagcctgaccaacatgatgaaacccatctctattaaaaatacaaaaatttgccaggtgtggtggtgggcaactgtagtcccagctatttggaaggctgaggcaggagaattgcttcaacccagaaggtggaggctgcagtgagccgagattgcctcactgcaccactccagcctgggcgacagagcaagactcagtgtcaaaaaaaaaaaaaaaaaaagaaagaaagaaaaaaagttccaaccatctgataacaaaagatgcttctatcacccaggaaattccaagggatttccatgtcagttgttcctctcactcaggaagttataaaggtcttaggatctctgcgtgaggaactgggtggaagaccaaatattagaacagaagttctcctagcatccctattgtcaagagttttaggagctctgtctcagaaatggggtatagagaccaaatatatatttctttacaatatcacaagaatcatctacaagccaaagaaagaggctatagaagaaaccaaccctgctgacactttaatctcagccttccagcctccagaactgtgagcaaataaatttatgttgtttaagccaccatctgtagtacttcttgtttttttttttttttagagacaggttcttgctctgttgcctaggctggagtgcagtagcacaatcatagctcactgcagcctccaacatcttggtgcaagcgatcctcccacttcagcctcctgagtagctgtgactacaggcatgtgccaccatgcctggctaattttttttatttttgtagaaacaggatctgactatgttgtccaggctggtcccaactcctgagctcaagcaatccttctgcctcagtctcccaaagtgctgggattacaagtgtgagccaccatgcctggcctgtggttctttgttatggtggttctaggaagctagtatagttgccttatttttctcataaatttagtttttagataccaaagtttaaaaattaaacctaggcctggcacagtggctcacacttgtaatcccagcactttgggaggccgaaggaggcaaatcacttgagtccaggagtttgagaccagcctggtcaacatggcgaaaccccaactctactaaaaatacaaaaaatttgccaggcatggtggtgcacacctgtaatctcagctatttaggaggctgaggcatgagaatcacttgaacccaggaggttgaggctgcagtgagccgagattgcgccactgcactccagcctgggcaacagagcgagacttcgtctcaaacagaaaaacgaaaaaaaggcctgggcgcagtggctcacacctgtaatcccagcactttgggaggctgaggtgggcggatcaactgaggtcgggagtttgagaccagcctgaccaacatggagaaacctcatctctactaaaaatacaaaaattagctgggcatggtggcgcatgcctgtaatcccagctattctggaggctgaggcaggagaattgcttgaacccaggaggtggaggttgcagtgagctgagatggcaccattgcactccagcctgggcaacaagaacgaaactctgtctcaaaaaacaaaaacgtaccaattaaacctagccatattgttgctgctaataattttatgaccttaataaaatcttcccttccttcttttgtatttaaaaataattaactgttaagcaaatgcgggatttattttggggtgaaatatgtatacaagttaaattatttgctgctggccaggtgtggtggctcacacctgtaatctcagcgctttgggaggatgaggcgggaagatcacttgaggtcaggagtttgagaccagcctgaccaacatggtgaaaccctgtctctactaaaaatacaaaaattacccgagcgtggtggtgcatgcctgtaatcccagctacttgggaggctgaggcaggagaatcacttgaacccaggaggcagaggtttcagtgacccgagatcgtgccattgcactccagcctgggcaatgagagcaaaattccatctaaaaaaaaaaaaagtgctgcaaagcagttgtcccaatagcatttatttaagtggggcgggggcgggggggtgggggcggggggagattcttattggttcgtaatttatcaagttagaccttttatgaaattccccccatgacctttgaccttctgtttttaacctggtaccaaacagcttttatcatcgtctcgtggtgtttatgttttgaagtccaatagggtgagttgtctatgattgtttccttcttttcccaaaaatattctttggagttcttacctactgattttttttttccagatgaattttgctgtcacttaagtttgacaaaatgttccctttgaaatttcaaatttttgaaatgaagtatgagatctaaaaaaaaaaagaaacctgtgtattggctcagcattacccttattcctctcagccaagtgcaagggatcacttactcaaatctttattcatcccactagagtttaatgacttccttgaatggctgttcaatgttcagtgacaggtctggcttttgttgtgaggccatctatggagtctctgggacccttccagtccctggaatcagtttggtctgagaggtcaggacttggaaacatactggaggcagggcaagggcaccctgctcttgttttggcatctacctcttttccgctggtccttcttatccatccaactagtccttttccctgagccaggtccatactttcccaccccaaacccttcctcttgtttcctggctctctgtttctggctacattcatttcctacactcctgtatcaaaagtaccacaattgcttctcgttcccacagtgcagtgcggctgagcgcctcagagcccgcggggacgctgcggggggattgcggggagggggcgttgggaggtgccgatgttgggctgggcggatgagcgcatctgcgtggtgagccttccaacgtgcgcgagaaggacgtggaagaccttttctacaagtacggccggatccgcaagatcaagcttaagaatgggcactgccttgtgcccttcgccttggtgcgctttgaggacccccgagatgcagaggatgctatttatggaagaaatagttatgattatggccagtgtcggcttcgtgtggagttctccaggacttacgaagtcggggtgggtggccccgtggtgggaggaatgggccttctgcaagaagatctgatttccgagttcttgtttcaggacttcctcaggcagctggcaggacctgaaggatcacatgcgagaagttggggatgtctgttatgccgatgtgcagaaggacggtgtggggatggttgagtatctcagaaaagaagacatggaatatgccctgcataaattggatgacactaaattccactctcatgatagtgaaacttcctacatctgagtttatcctgagagaagcaccagctatggctactcacagtctcggtttgggtcaaggggccgtgactctccatactaaagccggggttccccacaccacttctctcctttcaggccctactgagacaggtgatgggaattttttctttattttttaggttaactgagctgctttgtgctcagaatctgcattccagattgaggatttagcgtcttaggaaattattttaattttttttttttaaagaagaaaaaaaaactacatactttctaccagggccatattagcagtgaaacattttaaactgcagaaattgtggttttggttcagaaacaagttgtatatttttcactcctgaatatgggtaaaaaatcagttccgtctttgtgggttgctctgctatggagatcaacagttactgtgactgagttggcccattctgcttaaaaatatgttttaaacgtttaagaaaaatgctcatcatcactggccatcagagaaatgcaaatcaaaaccacaatgaggtaccatctcacaccagttagaatggcaatcattaaaagtcaggaaacaacaggtgctggagaggatgtggagaaatagaaacatttttacactgttggtgggagtgtaaactagttcacccattgtggaagacagtgtggcgattcctcaaggatctagaactagaaataccatttgacccagtgatcccgttattgggtatatacccaaaggattgtaaatcattctactataaagacacatgcacacgtatgtttattgcagcactgttcacaatagcaaagacttggaaccaacccaaatgtccatcagtgatagactggattaagaacatgtggcatggctgggtgcggtggctcatgcctgtaatcccagcgtggctcatgcctgtaatcccagcactttgggaggccaagacgggtagatcacgaggtcaggagatcgagaccatcctggctaacacggtgaaaccccgtctctactaaaaatacaaacaattagctgggcgtggtggtggcgggtacctgtagtcccagctactcggtaggctgaggcaggagaatggcatgaacccaggaggtggagcttgcagtgagccgagattgcgccactgcactccagcctgggcgacagagcgagactccatctcacaaaaaaaaaaaaaaaaaaaaaaaaaaagaagaagaaaatgtggcacatatacaccatggaatactatgcaaccataaaaaaggatgagttcgtgtcctttgtagggacatggatgaagctggaaaccatcattctgagcaaactactgcaaggacagaaaaccaaacactgcaggttctcactcataggtgggaattgaacaatgagaacacttgaacacggggtggggaacatcacacactggggcctgttgtggcgttgggggaggagggagggatagcattaggaggaatacctaatgtaaatgacgaattaatgggtgcagcacaccaacatggcacatgtatacatatgtaacaaagctgcacgttgtgcacatgtaccctagaacttaaaagtataattaaaaaaaaaaagtttagtaattgaaaaaaaaaagtacaacaattgggttggttggaacagcagaaatgaattgtctcacagctctggaggccaaaagtctgaactcaaggtgtcggcaggaccatgctccctctgaaacccatagggaaatccttctttgccccttctagcttctggttgtttgctggcagtctctggcattccctggcttgtagacgcatctttccaatcgtctgccttcacatggtagtctccctgtgtctgtctctttaagtggctgtcttttgttttttgtgtttttttaatttcaatttaatctattttttgtagacacattgtttcaccatgttgccaggctggtctcgaactccagggctcaagtgatcctcccgtctcagcttcccaaagtgctgggattacaggcgtgagccgccacacccagcccacatggctgtcttcttatgggaaaccagacatgggattagagacccactctattagagtaggattgcatttaactaattacatctgcaacaactctatttccaaataaggttacattctgaggtactaggggttaagacttaaatatatcctttttaggaaggacacagttcaacccacaatattagctggccacatgtttcccctgatctgtactttacttgttccccctggctctggtccctcctcgggtcaggtcctgcctgagcctcccctggccatgtcccttctttgtgcctggaccctcctgattaataccccatccccacccttgtgccctcagctgacttcttgtacctcccaccaggcatgatgacctgaaggagatgctggacaccaacaaggattctctcaagctggaggccatgaagaggattgtggcggtaagaggggaaggaggaggcctccctccgggcggggcctgggtggccaagagcagctctccttagctccttgtagaccttccctctagttagtgctgtgcctctcgctttgtccctcttcccctaccttgaccccaccacccagatgattgcccgaggaaagaatgcttcagacctgtttcccgcggtggtgaagaacgtggcctgtaagaacatagaggtgagcactacctggtgagggattgcttgtccccacctcccccaggaccacactcaagcttggggtgaggaaggaaatgatttagcccctgggggcccgacctgctgagaaatgtctctgagccaggagaagacactgtctccatgtccctgaactggatgtggatcaaggtaaaggacccggatacactcaggggtgctctcccccactgggagagtttgtccccatggaccgcagctggctggggagatgacatcccaggggtaggggggtgggcacaggtgcctgctgagaagcgttctgctgagaaacgtgctctccccaaggtgaagaagcttgtctatgtgtacctggtacgctacgctgaggagcagcaagacctggccctgctgtccatctccaccttccaacgtggcctaaaggtcaggggtctcagtttgcctcccagggcctgggcctcgttggcgctgtatcggaggagtaggcctggggagaggccatgagcatgggagcgggctctgcagaccccttcctacctgcctaaaattgggagggtcacagtcagaagaggccagccagaccctcagagagtggaagctgggctcagaaggggcgtaagagatgaagtgggtacccagggcccctgtctctcttcccaggagcctgtggtaatggctgcttctagtatgaaccacttgagcccccggagagtggagagtctctagcaatggagaacccctcaaccctcacccccctttgtgtaaaggtgtgaattgtggtccacagccaggtagatttcaacctttagcagtggcctgaatcccccacaccattctcaccttttgtttcattttgcccaaggcctctagttggatttacatatgttaggtgcatgtataagtctcccccctaagggcttttctggttagtctaagacatcttgagggtaaagacagccatttcaaggccattctctccatattggatttttcagctctgattacaaccattaactcctctatttttgcatacctttatttatttatttatttatgagacaggttctcactgtgttgcccaggctggagtgcagtggtgcaatcatggctcactggagcctcgacttccctgagctcaggtgattctcccacctctgtctcctgagtagctgcgactactcagcctgcatcaccatgctcggctaatttttttgtagtttttgtagagatggggtttcaccctgttgcctatgctggtcttggactcctgggctcaagtggcctcagcttcccaaagtgctgggattacagggatgagctaatactcctagcctggatacttttagttcaaatttctgtgagagagattgtgaaaggtccagctcatcttttcatatccagaagttctgtaggttgctgggtagacaggattgctgctcaaatccagggcccaccccttgtccaatctgctatggccagcaagaggggttgacagtcggcttctttggggtgagagtagaaagcatggtcacttgaatatacaattcattcatttagtaaatacttgggtgtctctatgccacacattgtgctagatttctttttataagtcaaaaccatggaatccgtcttagattggcaagtaatcttttggtttgagtaagggttaagtataaaaactaatctgaaattgttgtacagattttcacctatagtctctaccaactgaccctgtcccccttttagaaaaccagagctcatttagttcaactcaatgtgataatttctttctgcaaagtgccaaatagtattttaggttttgtaggccttatagtctcaactatgcaactactcaattttgcccttatggtgcaaatgcagccattgacaagtgggcgtggccgtgttccaataaatctatataaaaaacaggcaatagacagattttatccaagggctgtagcatgccagcctttgctctagaacatgtctaacaggtcatcttttctgatagggacctcactccttcataaggcaacttgctccatctcaagacaactaccactatttggggtgttttttaaaccattctcttttgttgaaacctccacaactataatttttaaaaattgatttcaggctgggtgtggtggctcatgcctgtaatcccagcactttgggaggccgaagcaggcaaatcacaaggtcaggagttcaagaccagcctggccaacatggtgaaactccatctctactaaaaatacaaaaaattagcttggcatggtggcgggtgcccataatcccagctactcaggaggctgacgcaggagaatggcttgaacccgggaggcagaggttgcaatgagccgagaacgtgccactgcagtccagcccaggcgacagtgtgagatccatctcaaaaaaaaaaaaaattgatttcaggctgtactgcattatgactgcacctgtgaatagccactgtactccagcctgggcaacatagggagaccctgtatctaaaaaataaaataaaatttactacaggttcacaaaaggcataaagaataatataatgaatatccataagaaatgacacatttctcaaatagccaaagcctcctatatatcttctcttgtttatcattcataggtatgtatttattcctgtgctagtaatttgcatattgttaagcaatataaaatgttttgtaaatggtgtcatcgtactacatatgtattcctttaaaacttgttttcttttttgttgtcactggcttttggtctctcctgcatgttggaaccaatcatttcaatccagccttctcccttctttcaatcctagcccaggctagggccgtgttcactttcttaggagatccctcatggaatcaaacctctgactggcaagcagataatccaggtctccctacatcctgtctttgtacagttggtcccttgaaccccctatgaaaccctactctatttcattttatcagtttagcacagggtccaaaccagggtgattctgaatcttaattatgtccctcctgattttgtgtcttctttcaagatactgataagctatttggaccagggcaaaagactgaggcatagcatgtttccaggttgacactgatctgttaataaaccttctccaagtatatttcaccacgttgtagacccacctgactgtacagacagctggcatttttctatcttgttaggaaggatcttattcaatagcaataaataaataaataaataacacctttcatgtgcaaagggttgtgggtgacacagagataaaacagatgtgaattctgctcttaaaaatgcttggctattaggtgaaacaaaaggcctacctaaaaaatagcaatgcaggaaatgctatgagacttccacaaacatatcactgaaatcaagatactaatatccaccggcctagttaccccatcaaaaaggaaaacacattttttttgataactttctgtgaatctataatcatttcccaaataaaatgctcacacacaaaaaaggaaaacaggtttaagcagatgatgtgactatttgtctctaagaaaacagagactccttccttttcaataaatgtttctaacccatctgtttaaaagtcaattccagaattttgtcaggaattagcatcaattttacctgcaattgtgaggatcttgtcttgtctttttccatttcagaaagtcagggtaatatctacccttctttagtgttctattcccgtcattctctaagagtaatagtacaggcacacctcattgtattgcactttgcagatattgccagatattgcactttttacaaattgagggtttgtggcaaccctacatcaatcaagtctatcagtgccatttttccaacagtatgtgctcacattgtgcctctgtcacattctggtaattctcacaatattccaaactttttaatgattattatatgttatggtgatcagtgatctttgatgttactattgtaattgttttggggtgccacaaaccatgctcagacatgaaagtgaaattaatcaataaatgttgtgtgtgttctgactgttcccccatctccttcaccttgggcctcttcattccctgagacacaacaatattgaaattagatcaattaataaccctacaatggcctctaagtgttcaagtgaaaggaggaaccacacatctctcactttaaatcaaaagctagaaatggttaggcttagtgaggaaggtatgttaaaagctgtgataggctgaaagctaggccacttgctccaaacatttagccaagttgtgaatgcaaagtaaaagttcttgaaggaaattaaaagtgctactccaggctgggcgtggtggctcacacctgtaatcccagcactttgggaggccgaggcaggaggatcacttgagaccaggggttcaagaccgtctctataaaaaatttttttaagttagcctgatgtggtggtacgcacctgtagtcttagctacttgggaggctgaggtgggaggatcacttgaacccagaagtttgaggtgcttctccagtaaacacatgaatgataaagaaagcaagacaggattattgctgatataggaaaatttaagtggtctggatagacgatcaaaccagctaccacattcccttaagccaaagcctaattcataggcaggtcttaaatctctccaattctatgatggctgagagaggtgaggaagctacagaagaaaagacggaagctagtggaggttggttcatgaagtttaagtacagaagccatctccataacaaaaaaatgcaaggtgaagcaaaagtgctgatggagaagctgcagcaagttgtccagaagatctagctaagatcattgatagatgtgactatgttcaacaagagatgctcaatgtaaatgaaacagcctcttactggaagaagatgccatctagcactttcctacctagagagaagtcaatgcctggctttaaaaaacaggctggctcttgttaggggccaatgcagctagtgactttaagttgaggccagtgctcaatgaccattctgaaaatcctggggtccttaagaattatggcagatctcctctgcctgtgctctataaatggaacaacagtgccatgacagcacatctgtttgcagttatggtttactgaattttttaagcccactgttgatacctaccgcttaaagattcctttcataatattactgctcattgacaatgcatttgttcactcaagagctctgatggagaggtacaaggagattaatgatttcatgcctgctaacacaaaatcagttctgcagcctatggatcaatgagtaattttgacttttaagtcttattatttaagaaatacatctcgtaaggctagagctgccatagatagtgattcctctcatggatctggacaaagtaaattgaaaaccttctggaaaggtttatagaaaccttctggaaaggtttaccattatagatgccattaggaacattcatgattcatgggaggaggtcaaaatattaacattaacaggagtttggaagaagttgattctaaactccatggatgactttgaggggttcactacttcagtggaggaagtaactacatatgtggtggaattctacctagaagtagaagtagaattaaaagtggagcctgaagatgtgactgaattgctgcaatctcatgataaaacttgaatggatgaggacttgcttcttatgagtgaacaaagaaagtcctttcttaaaatggaatctgccgggtgcagtggctcacgcctgtaatcccagcattttgggtggccgaggtgggtggatcacgaggtcaggagatcgagaccatcctggctaacacagtgaaaccccgtctctactaaaaacagaaaaattagccaggcatggtggcgggcacctgtagtcccagctactcgggaggctgaggcaggagaatggcgtgaacctgggaggtggagcttgcagtgacccgagatctcgccactgcattccagcctgggcgacagagcgagactccgttacaaaaaaaaaaaaaaaaaaaaaaaaaaaaactcctggtgcagatgctgtgaacattgttgaaatgacaacaaaggatttagaatattacataaacttagttgataaagcagaggcagagtttaagaggactgacttcaattttttttttttttgtagagactggggtctccctatgttgcccaggctggtcttgaactcctaggctcaagcaatcctcctacctcagcctcccaaagtgttgggattacaggcacaagccatcacgcccagcctacattgtttttttaaagacataatgctattgcatgcttagtagactacagtatattgtaaacataactttttttttttttttggagataggatctcactctgttgctcagtctggagtgcagtggcatgaacatatgtagctcacttcagcctccaactccctgggctcaagtgattctcccacttcagcttcccaagcagctgtaactataagcataacttgtatgcaccaggaaacaaaaaatttatgtgactcgttttagtgcgatatttgctttattgttgaggtctagaatcaaacccacaatatctccgaggtatgcctgtaatatatagctgctgctgctgatagtgggaagacagtcctaagccccatgatcacaatacagtgtaaggaatgcttttatacgttctgtataggatgcagtaggaataaagaagaagggcttggggccgggcgtggtggctcacgtctgtaatcccagtactttgggaggccgaggtgggcggatcacttgcggccaggagttcgagaccagcctggccaacacggcgaaacctaatctctactaaaaatacaaaaaattagctgggtgtggtggtgcgcgcctgtagtcccagctacttgggaggctgaggcaggagaatcgcttgaacccaggaggtggaggttgcagtgagccgagattgcaccaccgcactccagcctggcgacagagcgagactccatctcaaaaaaaaaaaaaaaaaaaaaaaggaagggcctacacccctattttgttttaaacactgtggaagaacagcagcttttgcaatgatttctgggagaaaggagtgtaaggttgaactccggaagggagaccagcttgcatctgctgggcggtcacctcaggcattaaaacaggcacctccaaaaaaacccttacaaggaacaggaagtgtttcaggtgtttcagcaattttaggtgttctgaaagtttttcagtgtttctggaagtgaagctacccattgcaacacctgttcaggtgtcagatttctgcaaccagagccaaaattaagtgtcccccagatacccatcactggcacaccatccaggctccagtcaagcggcagggaagcaagagctagtggtcgctggggacagtgacttccaaaggtgtggcctccccccatcagggcacctggtgccctttcatagctctgcctccacctctgcctttaggatcccaaccagctgattcgtgccagtgccctccgtgtcctctctagcatccgtgtgcccatcatagtgcccatcatgatgctagctatcaaggaagccgcctcggacatgtcaccctatgtgcggaaaacagctgcccacgccatccctaaactctacaggtatgccccagccctgtcccacgctccccaggaggctggttcctaagttctcaacccacccctggcctttcctaagtcttgcctgctgcttctcagagggtttgaggagggtagtttgggggactgacagagatggaggagaacaataaggctggggtgcaggaggtgagcatggcttggacagatattgggaaggctggggctgagagtggcaaattcccctcaccgatttctccctcagtttggactctgaccagaaggatcagctgatagaagtcattgagaagcttctggctgacaagaccacggtgcgtgtataggggcgctccgggaggggtggtgaccggcagccggccttccacccttcgcgttcaccctctcgtctttgttctttccccagctggtggcgggcagtgtggtgatggcctttgaggaggtctgcccggagcgcatcgacctgattcacaaaaactaccggaaactctgtaacctgctgatcgacgtggaggagtggggccaggtg

SEQ ID NO: 10746 - DNA, 746 bp, Homo sapiens
tgacagcgaggtgtatatcaagggaggccctcggtgctgcccacgcctacccagctcaatggtctgtacctatgaccatgcccctggtgtcctgagctcagcctcctacccactaagaaactcaacagtctggtctgtgtttggcagggcatgatgacctgaaggagatgctggacaccaacaaggattctctcaagctggaggccatgaagaggattgtggcgatgattgcccgaggaaagaatgcttcagacctgtttcccgcggtggtgaagaacgtggcctgtaagaacatagaggtgaagaagcttgtctatgtgtacctggtacgctacgctgaggagcagcaagacctggccctgctgtccatctccaccttccaacgtggcctaaaggatcccaaccagctgattcgtgccagtgccctccgtgtcctctctagcatccgtgtgcccatcatagtgcccatcatgatgctagctatcaaggaagccgcctcggacatgtcaccctatgtgcggaaaacagctgcccacgccatccctaaactctacagtttggactctgaccagaaggatcagctgatagaagtcattgagaagcttctggctgacaagaccacgctggtggcgggcagtgtggtgatggcctttgaggaggtctgcccggagcgcatcgacctgattcacaaaaactaccggaaactctgtaacctgctgatcgacgtggaggagtggggccaggtg

SEQ ID NO: 10747 - DNA, 24769 bp, Homo sapiens
gcctccgccgctgcacactgcagcctctgctgaacccctgccgcgccgccgccttcgccagcccggaccggaccggcccgccttcccttcctccgctccagccggcctccggccccgcaacctcctcctcggcgaagtctccctggccgccccatgtcggccgcccccgcctacagcgaagacaagggcggctccgctggccccggggagcccgagtacggccacgaccccgcgagcggcggcatcttctcctccgactacaagcggtgagggagcccgccaggaagctcgcgggagggttggggccggggaccgggcgaggcgcgcgggcaccatggacagcgcccggccccagcgccggccccgccccggccgcgccgaccggaagcccgcccggccccctcctgcggcctggagccccggcccagcgcgggcagcgctggcaccccggctccaggggccggcctaggacgcggaggggggcagataggggctggcgggggatgggccagctcagtttcgagaggagaaaccctccggttccaggtgtttctccggtttgcggcgttgcgttaggggttcccttcctttttcgtgctaggcgggttggcttcccaaaaatgtgggggaggggtctgagtcagcgaacttgagcttgagcctggggcctcttcaggaaggcgggccctggatgtacttgcacagcctcccagcttggccctgctgcaaattcatttcccctccctctggtccccatctccatctgaccctcacatccctgctcctggcattgcccctgtagttcagctccaccttcacaccctcccccacctttgattcgttcgtttgtttcttcatttgtttattcgtaaattctgcaacaagcatttatgaaaagccaactgtgtcgagtcctgaactagtcacggaatacaactgtgaacatgagacccttcttgtcctcacgatgctctagaggggagcacagatgaagaagcagtcagggacagtcgagtgtaatgggggcagtgggagcagggagaggacctagtctctggcgccggagagaaggaagacaggagcgtgaggtatgttccaggcagaggaaagggctttcaggaaggttgagagccaggccacaatctgtgtgagccactggactgaccagaaaagagggtggggaggactcctgaaggattctaagcaggcgacataatcagatttatattttagaaggacgtcaggctgctgcattgtggagaagagattggaggtgggccagattgaacaagagacaagggaggtgggtcttgaagttcacaggcctggcatgattgtggcctagaccaggggagaggcagaagatttgaggctgtggaagaggtggaagcctcagacctgatgattaattggatattgggtgggggtttagagggacagggggagaagatgaggattttcacgcacgtccatgtgaagagaccaccaaacaggctttgaacaataaagctttttaatcacttgggtgcaggccagctgagtccgaaaaaagagtcagcgaagggaaatggggtgggaccgttttacaggatttgggtaggtagtggaaaattacagtcaaagggggttgttctctggcggtggggggacacaaggtgctcagtgggggagcttttgagccaggatgagccaggagaaggaatttcacaagataatgtcatcagttaaggcaggcacaggccattttcactcttcagttacttcaggccatctggatgtatacgtgcaggtcacaggggatatcatggcttagcttgggctcagaggcctgacattcctgtcttcttttattaataagaaaaataacataaaatagtgttgaagtgttggggcagcaaacattttggcggggggtggtatggagagatactgcttctccatagccttgaagggctgcttcgagcgggattggggtggcgtgggaacctagagtgggagagattaagctgaaggcagattctgtggtaagggatgatattgtggggttgttagaagaaacatttgttgtataggattattggtgatggcctggatacggttttgtatgaattgaaaaactaaatggaataagagaaggagaaaaacaggtattaaaggactaagaattgggaggacccaggacatccaattagagagtgcccaaggaggttcagcatagccctgccagcaaagattatttatttactttaagagggagttaagactggcagtttggggatagcaccaggagatatcagctgtaatggtttggagaaacagtgtaaaccggcagtgtaaacaagagcagggcatgtatgagtagttgagtatggtgaataggagtatgactagtcagaagatagtagggatgacaagttttctggggcacagtccaagttggtctggtgtctggaatgagactggggcctaataaaaaggagcatctatacaggagcttgaatgggctgtaccctgcagcattccgaggacaggcccaaattctgagaagggcaagtggtaaaagtattgtcagtcctttttaagttggtggctgagcttggtgaggtgtgtttttaaaagaccattagtccgttctaccttttctgaagattgaggatggtaaggggtatgaaggtttcactgaataccaggagcctgagaaactgcttgggtgatttgaccagtaaaggctggtctgttattggactatatagaggcgggaaggccaaactgaggaattatgtctgacagaagggaagaaatgaccgcagtggccttctcagaccctgtgggaaaggcctctacccatccagtgaaagtatctacccagaccaagacgtattttagtttcctgactcggggcatgtgagtaaagtcaatttgccagtcctgggcagaggcaaatccccaggcttgatgtgtagggaagggagggggcctgaacaatccctgaggagtagtagaatagcagatggaacactgagaagtgatttccttgaggatagatttccacaatggaaaggaaatgagaggttctaagaggcaggctagcggcttgtaacctacatggaagaggttatgaaatgacgaaagaatagaatgggcctgtgaggctagaaggagatattttccttggtctgagaaccatttgccttgtgtgggaagagattcataggtgtaagtttcattgggggagtaggtaggagtgactgatgagaaggagaaaaactggccatgagggacagaagttggaatgctagctgcttttttagctaccttatcagcataagtgttgccctgagcgatgggatctgatgccttttgatggcccttgcagtgaatgactccagcttcctttggaagtaaagcggccttgagaagagtttttattaaagaggaattaatgatggaggacccttgtgtaatgaggaaagctttttgcccatataacagcatggaggtacaggatatggaaggcatatttagagtcagtataaatattgacacatagtccttttgcaagactgagggctcgagttaaggcaatgagttaagctttctgagaggtagtggaggggggcagaaagtatatgcgtcaggtgtgaggaagaaaatagattttggaagttatgagaactgtagagagtgagttgagcatagtttgtgattttgagggcctctgaaagtattaaagcagcggcagccgctgcacgcagacatgagggctaggccaaaacagtaaggtcaagttgttcggacagaaaggctacagggcgtggtcccagctcttgtgtaagaattccaaccgcacagccctgcactttggctgtgtgtgatgaaaaagggttgggatgaattagggagacctagtgtgagagcagcttctacggctgtttttaaggaatggaaaggagtggcaaaaggatttaggatctgtggggtcagctaggtttgcttttgtgagtttatataatggtttagtcaggatggtaaaactaggtatccaaaggtggaagtacctaaccatcccttgaaaggaaaggagttgttgctttgtagaagggattggggttcgggagattagccggacatgatcagcagggagagcacgtgtgttttcatgagaactatgccaagataggtaatggatgaggaagaaatttgggcttgactgaagtaatgggggctgtccgtgaagccttgcggcagtacagcctaggtagtttgctgagcctgatgggtgtcagggacagtccaagtgaaagcgaagagaggctgagatgaagggtgcaaatgaatagtaaagaaagcatgtttgaaatccagaagagaatgatgggttgtggaggggttgtggagggaggtattgaggaggagagtatatgagtttggcaccacggggtggataggcaaaacaatttggctgacaaggcacagatcctgaactaattgtaagacttgtctggtttttgaacaggtaaaatgggggaattgtaaggagagtttataggctttaaaaggccatgctgtaacaggcgagtgataacaggctttaatccttttaaagcctgctgggggatgggatattgacattgagcacggtaagggtgattaggttttaatgggatggtaaggggtgcatgatcagtcgccaaggagggaatagaggtgtcctatacttgaggattaaggtggggagatacaaggggaggatgtgaaggaggctttgaactgggggaaaaggtggcaatgaggtgtggctgtagcctaggaatagtcagggaagcagataatttaaagtgtctcggcctaataagggaactgcgcaggtggggataactgaaaaggagtgcataaaagagtattgtccaagttggcctcagagttggggagttttgagaggtttagaagcctggccatcaatacccacaacagttatggaggcaaaggaaacaggcctttgaaaagaaggtaatgtggagttggtagcctccgtattgattaagaaggggacggacttaccctccactgtaagagttacccaaagcatctgtgatggtccaggaagcttccaaggcgattgggcagtgtcagtcttcagctgctaagccgagaagatttgggaaggagtcagtcaggcagccttgggccagagttccaggggctctgggagtggctgccaggtgagttggacagtccgatttccagtggggttccacacagatgggacaaggcttaggaagaatcctgggctgtgggcattccttggcccagtggccagatttctggcacttgaagcaagatcctgatggagaaggtcctgtaggaatgcttgactgctgcagcttaggcattttgaagttcttgtgtactggagatgtggctggggtttctctcacagtggaggcaaggaactacaactcagaaatacattgctacttggctgcctttactctattattgtacaccttgaaggcgaggttaattaagtcctgttatggggtttgagggccggaatttaatttttggagttttatttaatgttgggagtggattgggtaataaaatgtatattgagaataagactgccttttgaccttttagggtctagggctgtaaagcgtctcagggttgctgcccaacgagccatgaactgggctgggtttttatatttgatgaaaaagagcctaaatactaactgatttggcagaggtcggataaaggaaaaggagcgttaaccttgactatgcctttagctccagccacctctttaagaggaaattgttgggcaggttggggagggctagtcgcagaacaaaactgtaagccggactgggtgtggggagaggaggtgatagaaggattatagggtggaggagcagaagctgagaaagaattggagtctgattcagcctggtggggagtgacctgaggagcattctggggattaggtgagaggtcagatgggtcggtagaaaaggaagattggaagattgaaaagacgcagcgacgcttggggttgggactgaggggacaggcgggagggaaagaaggaggatttgggatgagtcgcattgggaacagagactagggagggaccgatgtgtaaaagaatgcctggacatcaggcacctcagactgtttgcccattttacaacaagaattatctagatcttgtaggatggaaaaatcgaaagtgccgttttctggctatttggaaccattgttgagtttgtattggggttaagcggcattgcaaagaaaataaggcatttaggttttaggtcaggtgtgagttgaagaggttttaagttcttgagaacacaggctaagagagaagaaggaggaatggagggtggaatgttgcccacagtgaaggaggcaagcccagagaaaagagagggtagagacacggagagaaggggtggggggtgctttgccccccaggaaagtggagagaaaagagagggtagagacacagagagaaggagtcgggggtgcttgtcccccaggaacgtggagagaaaagagagggtagaaacatggagagaaggggtggggggtacttgccccccaaaaagtggtgtttgccactaagggtgaaagatcaaggcaggcatcctcgcggtgatcagacaactctgaaacgtgggtgaataatcaagcaggcgtccccgcagtgattaaacaccaagggaagactgtcttcctgagtccgtgatcggcgccggagttttgggttcacagataaaatgcatttcctgtctctaccagaaaaggaaaggaaccgaaattaagagaagggagagattgaaagatggcaccaagattgaaaggagaaagaggttgagggatagtgagagaggttggagaagagagtaaaaagaggccgcttacctgatttaaaattggtgagatgttcctcaggctggttggtctgaggacccgaggtcattaggtggatctttatcatgaagcaaagagcaggaggacaggggattgatcttccaagggtggtcccccgatccgagtcatggcaccaaatttcacgcacgtccatgtgaagagaccacccaacaggctttgtgtgagcaataaagctttttaatcacctggttgcaggccggctgagtctgaaaaaagagtcaacgaaaggagataggggtggggccattttataggatttgggtaggtagtggacaattacagtcaaaggggggtgttccttggtgggcaggggcgggggacacaaggtgctcagtgggggagcttttgagccaggatgagccaggagaaggaatttcacaaggtaatgtcatcagttaaggcaggaacaggccattttcacttcttttgtgattcttcaattacttcaggccatctggatatatacgtgcaggtcacaggggatatgatggtttagcttgggctcagaggcctgacaaggatgttactcaggttactagttcctgcaactggatggatgatggtgttattcagtgtaattggaaataaagatgttacaagcaaatttgtggaaaattaatgttgagcccagctttggacatattgagattgtaaactctgagggacatattaccctattaggtagctggatattacgatttgggttccaggagagagattagggaattattaacatatgtatgttaattaaagccacagaagtgaagataactcagggaggaggtataaaatgagttcagacactgcacaagtctgaaccctgaagacaccaacattagaagtgaccagagaacagtggaaagtgtttcaaggtacccaagaggtgaactaaaggctgaaagaaaacaatgtaatttcaagaaggagggagtggtcagtagtttcaatgcccattaaggtcaaatcaaacaaggaaaaaaatcatgaccattggttgacaaagaagagctcaattcctttctactctattccccacctcctgccctgggagataaattctggcaaagtaaggagaacaggagctagattatttctttcccagcattctgttgtggatgatttaaaacatacagaaaaatgaaatgaataatacaatgaacacatgtatatcatccatctagattcaactgtcattgacatcgtaccttatttgctttatctaaccatctattcgtatactttttttggttgaaccatgttaagttgcagagatcatgacccttcaaccccacattctaagtcgacatctaaagccagattaaaatgaataaaggagcacacaggtggtaagtagataaaacagtgaatggaaattttgctttcaagaaatttgactgtaaaagagaaagctgctggaggagaacctcactcagttcaaggaagtttgtctattttgttattttgggtttttttttttgtttcttaaaatgtatgactccatatttttgtttattattaatattaggcgggagagcctagagcaagtttaactgctgatgggaaggagcgattggtgggagagaggctgaagggaagaaaggaagtacagaacactgagtgatgggaggggaggcttactgagctgggtgggaggactagcctgggagcagggaggaccaactctgcccagagggaagagggcaggaggagaggagagtataaatgcagatggagactgggtacagtggctcatgcctgtaatcccagcactttgggaggctgaggcgggcaggtcacttgaaatcaagagttcaagactaacctggccaacatgtcaaaaccccgtctctactaaaaatacaaaaattagccagttgtggtaacgcatgtctataatcccagctactcaggaggctgaggcaggagaatcacatgaacccgggaggtggagattacagtgagccgagatggcaccactgcactccagcctgggcaacggagtgagactccatctctaaataaataaataagtaaataaatgcagatggatgggagtctggggcagggggctgcaggggatttcatctaaagactttccctttttcgggaaccaggtggtgaagccataagggcaaggctgggaatggggacttgagggtcaaaggggtttcaaatacaatgaagaaagccaaccaggccaggcgcggtggctcacgcctgtaatcctagcactttgggaggctgaggcaggcatatcacctaaggttgggagtttgagaccagcctgaccaacatggagaaaccccgtctctactaaaaatacaaaaattagccaggtgtggtggtgtatgcctgtaatcccagctacttgggaggctgaggcaggagaattgcttgaacccaggagacggaggttgcagtgagccgagatcacgccattacactccagcctgggcaataagagtgaaactccatctgaaaaaaaaaaaaaaaaaagccacccaccactggcaggccagtggcattggagaccagtgggacaagagggccaaggatgtgagagcagttggagggatagacacaggggttgcgggggagggtgctaggaggaagtagagataagagaaggttgatgggaaggaataaatcaagtattggctctggaaaggcaggtgaggattaagatgcctagggtcagtgagaagagggtatatgagatttctcaggaggctgcagtctaattgtggcagtgggattggagctgaagagggcatctctcacctctctatcaactccactgaccatctagtcccttgcccagagactaggggtaggcttggtctcctgtccctgcccttctttccctctagaggccttgtctctgagcagtgaagaggaaaccggagcatccctccctgccagtgtccggttaccaagttttgggggcgggccatctggtgactgtgacaggagccccagcgccctggccagctcagtccattcctggagaagaacctgatgcagcgattcctgcagctcccgggggccgtggtgaggcctggggtcagaggggcctgcggagctgatcaagaggctgctagccctgtgctggctcccgaaggtgggcccccactccggtaccaggccttggagcctgaggagcttcggtggctgcaggcccaggaggaagacacgaccccagaagcatctctggaaggaccttgcccagaggccagccagagccagagccagccactacggtatagaggaacccacaggaaccccctacccacacagccaggaaggccagggatgggcagttgcactctcagcccagacctcttccggtcccacctcctctgatggaggcttaggctggcatttagggtccaggctgggcggagaaggtggtcaggggcaccgtatgggggctgagggtatgagtgaggagagatgaggggcttaactccctggaggctctgaggggaggaggatagtaaaatatttgagggttgaggtcccaccttgacctctttctccccacaggcccccactggagtgggctctggacgaggtttggggacaggatacagcacagacagggtttggccagccactgcctgccagtggactggaacttaggtggtaagaggtgacagcgaggtgtatatcaagggaggtgagcatgactgacccccagtgccatgccaggccccctggctggctccagccacccccagaagagtcccttaggctaggtcagactaggggtcaggtcagagtgagtgcagcagcgtaaggggatctgactatgggagataatgtttcatggccttagggtgttgtgccttagtccctgcctctgcctcttgggaacagaagttggtgggagtgaggacgagaggcccagggcggtctcacctcaggtggtggctgcggtctgtgtcagtgcatattctgtgtcagtgcatattcgacagtcaatcttacctgtgctggctgctttaggcccagtggtcctgccccctttcattccccttctcctgcaggggcctggaatgtactcactaggctgggtggggaggatgccctggggtgtgtgcatttgacaggcgcatgtggcatttgtgggtgtggtgaggaagggaatacccagagttaaaggagattgggcaaacttggccctccttccacggaagcccagggaaaagccatcccagggtgactcctcagaagatcagaggacccttggggctggatatatttgatcttagaagcctacatttatcatcaaaaatctcaactaggagtccactgaccattttggtgaatgagactggagaggccaagtttggtccaagttatctgtgtattagatgtgatgcggcatgtgtgtgtgtgtgtagggggacgtgtgtggggtgtgtgtgtctctatgagggtgtgggggagcggggagaggtcttgtgatatatgtctgtaggggacatgtatgggatatgtgtgtctataagagggtgtgggagagtggggagaggtctcctggtggtatatgtctggggggtttgtaggtgtgtaggtgagttgtgtgggtggtttatgtgtgtagagtttttctgtgggaggtgtctgtatgtgggggagtgtgtttctctgggcgttgtgtaggcaggattttgtgggtgtgcgtgggtttatgtatggattctactagtgtctgcgggacctgtaggtatgtttgtatgagctgtccgtgaggtgtaggtatgtcgggggacatgggagtgtctgaggtatatgtgggtggtatcaatgtgtagttgtctgtggggtgtgcgtatgaaggatcctgacgtggagtgttgtgcattcatatctcagggaagctggtgcccagctctgtcatttttcctaggccctcggtgctgcccacgcctacccagctcaatggtctgtacctatgaccatgcccctggtgtcctgagctcagcctcctacccactaagaaactcaacagtctggtctgtgtttggcagggtaagagggtgattgtcttctggccctggcctgaccctggaagagtagaaggtgtcctctgatttggggggcatccccccaggtgagggagtttcagataacatgatggggctggatattttcttctgtcctcacatgacagatagcgagggcctcagataatgctggaaggcatcatctttctattttgctttccatcaaaaatctctttgggaaagacagtttctaacattcttgggatagtgacttcttagtgcccctcttcttgtctgacgtcaggtactcacgcatttctgcagccctgtgactaagttgcgtgttctgtctggttcttctcttcctctcagcattcatcacttgtttctcagcattagcagcagtcatttgccactttatgattgttatcatgctctttcctctcctaacagtgctatccccaatttctgattttctgtcatttctaaatgttgcatgtctgtgactaactttgcacacattgattttttttttattttttatttttgagatggagtctcgttctgttgcccaggctggagtgcagtggcgcgatcttggctcactgcaagctccacctcctgggttcacgccattctcctgcctcagcctactgagtagctaggactacagacgcccgccaccacacccggctaattttttttaaattttttagtagagacggggtttcaccatgttagccaggatggtctcgatctcctggccttgtgatccgcctgccttggcctcccaaagtgctgggattacaggcgtgagccaccgtgcccggcctgatttttaatttttatcactgtgatatttctcaagctgggttcttgtgcctgggtcaaagctgtgggttatcagagtgtcatctgggaaattagtgtgtgtgagtccccacacacagctgctcaccacattttggaattgtcttggcaacatatgagtgcatcagtttcacacaattctatcagctatatatagacacatttttttcatgggtttattaacaattctctgatcacttcgtgatcaccagttctgcatcctctgagtatggttagccacattgttcactgcacaagggcatctggccaaggaataccagcccatgctccacacacagaatggggagcaacagctcagggctgtgtctatctgtaggggcatgcagattgaaaatgggcttgtagcagccctgacagtgaatgctgcaaagagaccttatacatgtatatcagttccttttttaaatttttttgagatggagtctcactctgtcacccaggctggagtgcagtggcgcgatctcggctcactgcaatctccgcctcctgggttcaagcgattctcgttcctcagcctcctgagtagctgggattacaggtgtgtgccaccatgcccggctaatttttgtaattttagtagggatggggtttcaccatgttggccaggctaatctcgaactcctgaccttaagtgatctgcccaccttggcctccaaaagtgctggaattacaagcgtgagccaccacacctggcctctatttcgaatattaaactttaatttaccatatcccaaatatttttccttttgttgctattatgggctgaattgtgtccctccaaaatgcatatgttgaagttctagcccccagtacctcagaatgttacctttgaggtgattaagttaaaatgaggttattaaggggggccctaatccaatatgactgatttctttataagaagaggaaatttggatataggcacgcagaaggaagaccatgtgaagacagagaagatggttgtaagagacagaaaaacccaaagtgtgtttctcctactctcatacacaccgctcaccagagagtgcttcacctctggccacaaaaatgggtggagatttctccccaccaacaacctgttctccagcagacactaactgggtgttctctaattcaagtcaatctagtgttagattttttaggttaagggctcagtgccacaagactgctctctgcttcagatgccaattccaagtggtaagttgtcagctatacttctgaccaactggctataaatcaggggttcccatgccaccctccttgggttcaactctgtgagtggctcacagaactcagggaaactttagttatatttacccatttattataaagggtagagacaaacaccagatgaagagatgcatagggagaggtatggaaggaggggtgcagagctcccatgccctctccaggcaccacaccctccaggcaccttcacatgttccacagtctggaagctctcgaaaccctatcctcttgggtttttatgaaggcttcatgattgatcgcatctttggccatgtgatcaactcaaccatcagccccactccccattccccagaggtcaaatagtgggattgaaagtttcaaccctcagctgggcacagcagctcacgcctataatcccagcacttttggaggccaaggcgggtggatcacttgaggtcaggagttcgagaccagcctgaccaacatgatgaaacccatctctattaaaaatacaaaaatttgccaggtgtggtggtgggcaactgtagtcccagctatttggaaggctgaggcaggagaattgcttcaacccagaaggtggaggctgcagtgagccgagattgcctcactgcaccactccagcctgggcgacagagcaagactcagtgtcaaaaaaaaaaaaaaaaaaagaaagaaagaaaaaaagttccaaccatctgataacaaaagatgcttctatcacccaggaaattccaagggatttccatgtcagttgttcctctcactcaggaagttataaaggtcttaggatctctgcgtgaggaactgggtggaagaccaaatattagaacagaagttctcctagcatccctattgtcaagagttttaggagctctgtctcagaaatggggtatagagaccaaatatatatttctttacaatatcacaagaatcatctacaagccaaagaaagaggctatagaagaaaccaaccctgctgacactttaatctcagccttccagcctccagaactgtgagcaaataaatttatgttgtttaagccaccatctgtagtacttcttgtttttttttttttttagagacaggttcttgctctgttgcctaggctggagtgcagtagcacaatcatagctcactgcagcctccaacatcttggtgcaagcgatcctcccacttcagcctcctgagtagctgtgactacaggcatgtgccaccatgcctggctaattttttttatttttgtagaaacaggatctgactatgttgtccaggctggtcccaactcctgagctcaagcaatccttctgcctcagtctcccaaagtgctgggattacaagtgtgagccaccatgcctggcctgtggttctttgttatggtggttctaggaagctagtatagttgccttatttttctcataaatttagtttttagataccaaagtttaaaaattaaacctaggcctggcacagtggctcacacttgtaatcccagcactttgggaggccgaaggaggcaaatcacttgagtccaggagtttgagaccagcctggtcaacatggcgaaaccccaactctactaaaaatacaaaaaatttgccaggcatggtggtgcacacctgtaatctcagctatttaggaggctgaggcatgagaatcacttgaacccaggaggttgaggctgcagtgagccgagattgcgccactgcactccagcctgggcaacagagcgagacttcgtctcaaacagaaaaacgaaaaaaaggcctgggcgcagtggctcacacctgtaatcccagcactttgggaggctgaggtgggcggatcaactgaggtcgggagtttgagaccagcctgaccaacatggagaaacctcatctctactaaaaatacaaaaattagctgggcatggtggcgcatgcctgtaatcccagctattctggaggctgaggcaggagaattgcttgaacccaggaggtggaggttgcagtgagctgagatggcaccattgcactccagcctgggcaacaagaacgaaactctgtctcaaaaaacaaaaacgtaccaattaaacctagccatattgttgctgctaataattttatgaccttaataaaatcttcccttccttcttttgtatttaaaaataattaactgttaagcaaatgcgggatttattttggggtgaaatatgtatacaagttaaattatttgctgctggccaggtgtggtggctcacacctgtaatctcagcgctttgggaggatgaggcgggaagatcacttgaggtcaggagtttgagaccagcctgaccaacatggtgaaaccctgtctctactaaaaatacaaaaattacccgagcgtggtggtgcatgcctgtaatcccagctacttgggaggctgaggcaggagaatcacttgaacccaggaggcagaggtttcagtgacccgagatcgtgccattgcactccagcctgggcaatgagagcaaaattccatctaaaaaaaaaaaaagtgctgcaaagcagttgtcccaatagcatttatttaagtggggcgggggcgggggggtgggggcggggggagattcttattggttcgtaatttatcaagttagaccttttatgaaattccccccatgacctttgaccttctgtttttaacctggtaccaaacagcttttatcatcgtctcgtggtgtttatgttttgaagtccaatagggtgagttgtctatgattgtttccttcttttcccaaaaatattctttggagttcttacctactgattttttttttccagatgaattttgctgtcacttaagtttgacaaaatgttccctttgaaatttcaaatttttgaaatgaagtatgagatctaaaaaaaaaaagaaacctgtgtattggctcagcattacccttattcctctcagccaagtgcaagggatcacttactcaaatctttattcatcccactagagtttaatgacttccttgaatggctgttcaatgttcagtgacaggtctggcttttgttgtgaggccatctatggagtctctgggacccttccagtccctggaatcagtttggtctgagaggtcaggacttggaaacatactggaggcagggcaagggcaccctgctcttgttttggcatctacctcttttccgctggtccttcttatccatccaactagtccttttccctgagccaggtccatactttcccaccccaaacccttcctcttgtttcctggctctctgtttctggctacattcatttcctacactcctgtatcaaaagtaccacaattgcttctcgttcccacagtgcagtgcggctgagcgcctcagagcccgcggggacgctgcggggggattgcggggagggggcgttgggaggtgccgatgttgggctgggcggatgagcgcatctgcgtggtgagccttccaacgtgcgcgagaaggacgtggaagaccttttctacaagtacggccggatccgcaagatcaagcttaagaatgggcactgccttgtgcccttcgccttggtgcgctttgaggacccccgagatgcagaggatgctatttatggaagaaatagttatgattatggccagtgtcggcttcgtgtggagttctccaggacttacgaagtcggggtgggtggccccgtggtgggaggaatgggccttctgcaagaagatctgatttccgagttcttgtttcaggacttcctcaggcagctggcaggacctgaaggatcacatgcgagaagttggggatgtctgttatgccgatgtgcagaaggacggtgtggggatggttgagtatctcagaaaagaagacatggaatatgccctgcataaattggatgacactaaattccactctcatgatagtgaaacttcctacatctgagtttatcctgagagaagcaccagctatggctactcacagtctcggtttgggtcaaggggccgtgactctccatactaaagccggggttccccacaccacttctctcctttcaggccctactgagacaggtgatgggaattttttctttattttttaggttaactgagctgctttgtgctcagaatctgcattccagattgaggatttagcgtcttaggaaattattttaattttttttttttaaagaagaaaaaaaaactacatactttctaccagggccatattagcagtgaaacattttaaactgcagaaattgtggttttggttcagaaacaagttgtatatttttcactcctgaatatgggtaaaaaatcagttccgtctttgtgggttgctctgctatggagatcaacagttactgtgactgagttggcccattctgcttaaaaatatgttttaaacgtttaagaaaaatgctcatcatcactggccatcagagaaatgcaaatcaaaaccacaatgaggtaccatctcacaccagttagaatggcaatcattaaaagtcaggaaacaacaggtgctggagaggatgtggagaaatagaaacatttttacactgttggtgggagtgtaaactagttcacccattgtggaagacagtgtggcgattcctcaaggatctagaactagaaataccatttgacccagtgatcccgttattgggtatatacccaaaggattgtaaatcattctactataaagacacatgcacacgtatgtttattgcagcactgttcacaatagcaaagacttggaaccaacccaaatgtccatcagtgatagactggattaagaacatgtggcatggctgggtgcggtggctcatgcctgtaatcccagcgtggctcatgcctgtaatcccagcactttgggaggccaagacgggtagatcacgaggtcaggagatcgagaccatcctggctaacacggtgaaaccccgtctctactaaaaatacaaacaattagctgggcgtggtggtggcgggtacctgtagtcccagctactcggtaggctgaggcaggagaatggcatgaacccaggaggtggagcttgcagtgagccgagattgcgccactgcactccagcctgggcgacagagcgagactccatctcacaaaaaaaaaaaaaaaaaaaaaaaaaaagaagaagaaaatgtggcacatatacaccatggaatactatgcaaccataaaaaaggatgagttcgtgtcctttgtagggacatggatgaagctggaaaccatcattctgagcaaactactgcaaggacagaaaaccaaacactgcaggttctcactcataggtgggaattgaacaatgagaacacttgaacacggggtggggaacatcacacactggggcctgttgtggcgttgggggaggagggagggatagcattaggaggaatacctaatgtaaatgacgaattaatgggtgcagcacaccaacatggcacatgtatacatatgtaacaaagctgcacgttgtgcacatgtaccctagaacttaaaagtataattaaaaaaaaaaagtttagtaattgaaaaaaaaaagtacaacaattgggttggttggaacagcagaaatgaattgtctcacagctctggaggccaaaagtctgaactcaaggtgtcggcaggaccatgctccctctgaaacccatagggaaatccttctttgccccttctagcttctggttgtttgctggcagtctctggcattccctggcttgtagacgcatctttccaatcgtctgccttcacatggtagtctccctgtgtctgtctctttaagtggctgtcttttgttttttgtgtttttttaatttcaatttaatctattttttgtagacacattgtttcaccatgttgccaggctggtctcgaactccagggctcaagtgatcctcccgtctcagcttcccaaagtgctgggattacaggcgtgagccgccacacccagcccacatggctgtcttcttatgggaaaccagacatgggattagagacccactctattagagtaggattgcatttaactaattacatctgcaacaactctatttccaaataaggttacattctgaggtactaggggttaagacttaaatatatcctttttaggaaggacacagttcaacccacaatattagctggccacatgtttcccctgatctgtactttacttgttccccctggctctggtccctcctcgggtcaggtcctgcctgagcctcccctggccatgtcccttctttgtgcctggaccctcctgattaataccccatccccacccttgtgccctcagctgacttcttgtacctcccaccaggcatgatgacctgaaggagatgctggacaccaacaaggattctctcaagctggaggccatgaagaggattgtggcggtaagaggggaaggaggaggcctccctccgggcggggcctgggtggccaagagcagctctccttagctccttgtagaccttccctctagttagtgctgtgcctctcgctttgtccctcttcccctaccttgaccccaccacccagatgattgcccgaggaaagaatgcttcagacctgtttcccgcggtggtgaagaacgtggcctgtaagaacatagaggtgagcactacctggtgagggattgcttgtccccacctcccccaggaccacactcaagcttggggtgaggaaggaaatgatttagcccctgggggcccgacctgctgagaaatgtctctgagccaggagaagacactgtctccatgtccctgaactggatgtggatcaaggtaaaggacccggatacactcaggggtgctctcccccactgggagagtttgtccccatggaccgcagctggctggggagatgacatcccaggggtaggggggtgggcacaggtgcctgctgagaagcgttctgctgagaaacgtgctctccccaaggtgaagaagcttgtctatgtgtacctggtacgctacgctgaggagcagcaagacctggccctgctgtccatctccaccttccaacgtggcctaaaggtcaggggtctcagtttgcctcccagggcctgggcctcgttggcgctgtatcggaggagtaggcctggggagaggccatgagcatgggagcgggctctgcagaccccttcctacctgcctaaaattgggagggtcacagtcagaagaggccagccagaccctcagagagtggaagctgggctcagaaggggcgtaagagatgaagtgggtacccagggcccctgtctctcttcccaggagcctgtggtaatggctgcttctagtatgaaccacttgagcccccggagagtggagagtctctagcaatggagaacccctcaaccctcacccccctttgtgtaaaggtgtgaattgtggtccacagccaggtagatttcaacctttagcagtggcctgaatcccccacaccattctcaccttttgtttcattttgcccaaggcctctagttggatttacatatgttaggtgcatgtataagtctcccccctaagggcttttctggttagtctaagacatcttgagggtaaagacagccatttcaaggccattctctccatattggatttttcagctctgattacaaccattaactcctctatttttgcatacctttatttatttatttatttatgagacaggttctcactgtgttgcccaggctggagtgcagtggtgcaatcatggctcactggagcctcgacttccctgagctcaggtgattctcccacctctgtctcctgagtagctgcgactactcagcctgcatcaccatgctcggctaatttttttgtagtttttgtagagatggggtttcaccctgttgcctatgctggtcttggactcctgggctcaagtggcctcagcttcccaaagtgctgggattacagggatgagctaatactcctagcctggatacttttagttcaaatttctgtgagagagattgtgaaaggtccagctcatcttttcatatccagaagttctgtaggttgctgggtagacaggattgctgctcaaatccagggcccaccccttgtccaatctgctatggccagcaagaggggttgacagtcggcttctttggggtgagagtagaaagcatggtcacttgaatatacaattcattcatttagtaaatacttgggtgtctctatgccacacattgtgctagatttctttttataagtcaaaaccatggaatccgtcttagattggcaagtaatcttttggtttgagtaagggttaagtataaaaactaatctgaaattgttgtacagattttcacctatagtctctaccaactgaccctgtcccccttttagaaaaccagagctcatttagttcaactcaatgtgataatttctttctgcaaagtgccaaatagtattttaggttttgtaggccttatagtctcaactatgcaactactcaattttgcccttatggtgcaaatgcagccattgacaagtgggcgtggccgtgttccaataaatctatataaaaaacaggcaatagacagattttatccaagggctgtagcatgccagcctttgctctagaacatgtctaacaggtcatcttttctgatagggacctcactccttcataaggcaacttgctccatctcaagacaactaccactatttggggtgttttttaaaccattctcttttgttgaaacctccacaactataatttttaaaaattgatttcaggctgggtgtggtggctcatgcctgtaatcccagcactttgggaggccgaagcaggcaaatcacaaggtcaggagttcaagaccagcctggccaacatggtgaaactccatctctactaaaaatacaaaaaattagcttggcatggtggcgggtgcccataatcccagctactcaggaggctgacgcaggagaatggcttgaacccgggaggcagaggttgcaatgagccgagaacgtgccactgcagtccagcccaggcgacagtgtgagatccatctcaaaaaaaaaaaaaattgatttcaggctgtactgcattatgactgcacctgtgaatagccactgtactccagcctgggcaacatagggagaccctgtatctaaaaaataaaataaaatttactacaggttcacaaaaggcataaagaataatataatgaatatccataagaaatgacacatttctcaaatagccaaagcctcctatatatcttctcttgtttatcattcataggtatgtatttattcctgtgctagtaatttgcatattgttaagcaatataaaatgttttgtaaatggtgtcatcgtactacatatgtattcctttaaaacttgttttcttttttgttgtcactggcttttggtctctcctgcatgttggaaccaatcatttcaatccagccttctcccttctttcaatcctagcccaggctagggccgtgttcactttcttaggagatccctcatggaatcaaacctctgactggcaagcagataatccaggtctccctacatcctgtctttgtacagttggtcccttgaaccccctatgaaaccctactctatttcattttatcagtttagcacagggtccaaaccagggtgattctgaatcttaattatgtccctcctgattttgtgtcttctttcaagatactgataagctatttggaccagggcaaaagactgaggcatagcatgtttccaggttgacactgatctgttaataaaccttctccaagtatatttcaccacgttgtagacccacctgactgtacagacagctggcatttttctatcttgttaggaaggatcttattcaatagcaataaataaataaataaataacacctttcatgtgcaaagggttgtgggtgacacagagataaaacagatgtgaattctgctcttaaaaatgcttggctattaggtgaaacaaaaggcctacctaaaaaatagcaatgcaggaaatgctatgagacttccacaaacatatcactgaaatcaagatactaatatccaccggcctagttaccccatcaaaaaggaaaacacattttttttgataactttctgtgaatctataatcatttcccaaataaaatgctcacacacaaaaaaggaaaacaggtttaagcagatgatgtgactatttgtctctaagaaaacagagactccttccttttcaataaatgtttctaacccatctgtttaaaagtcaattccagaattttgtcaggaattagcatcaattttacctgcaattgtgaggatcttgtcttgtctttttccatttcagaaagtcagggtaatatctacccttctttagtgttctattcccgtcattctctaagagtaatagtacaggcacacctcattgtattgcactttgcagatattgccagatattgcactttttacaaattgagggtttgtggcaaccctacatcaatcaagtctatcagtgccatttttccaacagtatgtgctcacattgtgcctctgtcacattctggtaattctcacaatattccaaactttttaatgattattatatgttatggtgatcagtgatctttgatgttactattgtaattgttttggggtgccacaaaccatgctcagacatgaaagtgaaattaatcaataaa

SEQ ID NO: 10748 - DNA, 3921 bp, Homo sapiens
gcctccgccgctgcacactgcagcctctgctgaacccctgccgcgccgccgccttcgccagcccggaccggaccggcccgccttcccttcctccgctccagccggcctccggccccgcaacctcctcctcggcgaagtctccctggccgccccatgtcggccgcccccgcctacagcgaagacaagggcggctccgctggccccggggagcccgagtacggccacgaccccgcgagcggcggcatcttctcctccgactacaagcggcatgatgacctgaaggagatgctggacaccaacaaggattctctcaagctggaggccatgaagaggattgtggcgatgattgcccgaggaaagaatgcttcagacctgtttcccgcggtggtgaagaacgtggcctgtaagaacatagaggtgaagaagcttgtctatgtgtacctggtacgctacgctgaggagcagcaagacctggccctgctgtccatctccaccttccaacgtggcctaaaggagcctgtggtaatggctgcttctagtatgaaccacttgagcccccggagagtggagagtctctagcaatggagaacccctcaaccctcacccccctttgtgtaaaggtgtgaattgtggtccacagccaggtagatttcaacctttagcagtggcctgaatcccccacaccattctcaccttttgtttcattttgcccaaggcctctagttggatttacatatgttaggtgcatgtataagtctcccccctaagggcttttctggttagtctaagacatcttgagggtaaagacagccatttcaaggccattctctccatattggatttttcagctctgattacaaccattaactcctctatttttgcatacctttatttatttatttatttatgagacaggttctcactgtgttgcccaggctggagtgcagtggtgcaatcatggctcactggagcctcgacttccctgagctcaggtgattctcccacctctgtctcctgagtagctgcgactactcagcctgcatcaccatgctcggctaatttttttgtagtttttgtagagatggggtttcaccctgttgcctatgctggtcttggactcctgggctcaagtggcctcagcttcccaaagtgctgggattacagggatgagctaatactcctagcctggatacttttagttcaaatttctgtgagagagattgtgaaaggtccagctcatcttttcatatccagaagttctgtaggttgctgggtagacaggattgctgctcaaatccagggcccaccccttgtccaatctgctatggccagcaagaggggttgacagtcggcttctttggggtgagagtagaaagcatggtcacttgaatatacaattcattcatttagtaaatacttgggtgtctctatgccacacattgtgctagatttctttttataagtcaaaaccatggaatccgtcttagattggcaagtaatcttttggtttgagtaagggttaagtataaaaactaatctgaaattgttgtacagattttcacctatagtctctaccaactgaccctgtcccccttttagaaaaccagagctcatttagttcaactcaatgtgataatttctttctgcaaagtgccaaatagtattttaggttttgtaggccttatagtctcaactatgcaactactcaattttgcccttatggtgcaaatgcagccattgacaagtgggcgtggccgtgttccaataaatctatataaaaaacaggcaatagacagattttatccaagggctgtagcatgccagcctttgctctagaacatgtctaacaggtcatcttttctgatagggacctcactccttcataaggcaacttgctccatctcaagacaactaccactatttggggtgttttttaaaccattctcttttgttgaaacctccacaactataatttttaaaaattgatttcaggctgggtgtggtggctcatgcctgtaatcccagcactttgggaggccgaagcaggcaaatcacaaggtcaggagttcaagaccagcctggccaacatggtgaaactccatctctactaaaaatacaaaaaattagcttggcatggtggcgggtgcccataatcccagctactcaggaggctgacgcaggagaatggcttgaacccgggaggcagaggttgcaatgagccgagaacgtgccactgcagtccagcccaggcgacagtgtgagatccatctcaaaaaaaaaaaaaattgatttcaggctgtactgcattatgactgcacctgtgaatagccactgtactccagcctgggcaacatagggagaccctgtatctaaaaaataaaataaaatttactacaggttcacaaaaggcataaagaataatataatgaatatccataagaaatgacacatttctcaaatagccaaagcctcctatatatcttctcttgtttatcattcataggtatgtatttattcctgtgctagtaatttgcatattgttaagcaatataaaatgttttgtaaatggtgtcatcgtactacatatgtattcctttaaaacttgttttcttttttgttgtcactggcttttggtctctcctgcatgttggaaccaatcatttcaatccagccttctcccttctttcaatcctagcccaggctagggccgtgttcactttcttaggagatccctcatggaatcaaacctctgactggcaagcagataatccaggtctccctacatcctgtctttgtacagttggtcccttgaaccccctatgaaaccctactctatttcattttatcagtttagcacagggtccaaaccagggtgattctgaatcttaattatgtccctcctgattttgtgtcttctttcaagatactgataagctatttggaccagggcaaaagactgaggcatagcatgtttccaggttgacactgatctgttaataaaccttctccaagtatatttcaccacgttgtagacccacctgactgtacagacagctggcatttttctatcttgttaggaaggatcttattcaatagcaataaataaataaataaataacacctttcatgtgcaaagggttgtgggtgacacagagataaaacagatgtgaattctgctcttaaaaatgcttggctattaggtgaaacaaaaggcctacctaaaaaatagcaatgcaggaaatgctatgagacttccacaaacatatcactgaaatcaagatactaatatccaccggcctagttaccccatcaaaaaggaaaacacattttttttgataactttctgtgaatctataatcatttcccaaataaaatgctcacacacaaaaaaggaaaacaggtttaagcagatgatgtgactatttgtctctaagaaaacagagactccttccttttcaataaatgtttctaacccatctgtttaaaagtcaattccagaattttgtcaggaattagcatcaattttacctgcaattgtgaggatcttgtcttgtctttttccatttcagaaagtcagggtaatatctacccttctttagtgttctattcccgtcattctctaagagtaatagtacaggcacacctcattgtattgcactttgcagatattgccagatattgcactttttacaaattgagggtttgtggcaaccctacatcaatcaagtctatcagtgccatttttccaacagtatgtgctcacattgtgcctctgtcacattctggtaattctcacaatattccaaactttttaatgattattatatgttatggtgatcagtgatctttgatgttactattgtaattgttttggggtgccacaaaccatgctcagacatgaaagtgaaattaatcaataaa

SEQ ID NO: 10749 - DNA, 4168 bp, Homo sapiens
ggtgcctttaagacctcagcgcgcggccctgattgagaaatccgcgcgcagcctccgccgctgcacactgcagcctctgctgaacccctgccgcgccgccgccttcgccagcccggaccggaccggcccgccttcccttcctccgctccagccggcctccggccccgcaacctcctcctcggcgaagtctccctggccgccccatgtcggccgcccccgcctacagcgaagacaagggcggctccgctggccccggggagcccgagtacggccacgaccccgcgagcggcggcatcttctcctccgactacaagcggcatgatgacctgaaggagatgctggacaccaacaaggattctctcaagctggaggccatgaagaggattgtggcgatgattgcccgaggaaagaatgcttcagacctgtttcccgcggtggtgaagaacgtggcctgtaagaacatagaggtgaagaagcttgtctatgtgtacctggtacgctacgctgaggagcagcaagacctggccctgctgtccatctccaccttccaacgtggcctaaaggatcccaaccagctgattcgtgccagtgccctccgtgtcctctctagcatccgtgtgcccatcatagtgcccatcatgatgctagctatcaaggaagccgcctcggacatgtcaccctatgtgcggaaaacagctgcccacgccatccctaaactctacagtttggactctgaccagaaggatcagctgatagaagtcattgagaagcttctggctgacaagaccacgctggtggcgggcagtgtggtgatggcctttgaggaggtctgcccggagcgcatcgacctgattcacaaaaactaccggaaactctgtaacctgctgatcgacgtggaggagtggggccaggtggtcatcatcagcatgctcacccgctacgcccgcacgcagttcctgagccccacccagaacgaatccctactagaggagaacgcggaaaaagccttctacggctcagaggaggacgaggccaagggcgcggggtctgaggagacggccgccgcggccgccccctcccgaaagccctatgtcatggaccccgaccaccggctgctgctgcgcaacaccaaacccctgctgcagagccgcagcgccgcggtggtgatggcggtggcgcagctctacttccacctggcgcccaaggcggaagtgggcgtcatcgccaaggcgctggtgcgcctgctgcgcagccacagtgaggtgcagtacgttgtgctccagaacgtggccaccatgtccatcaagcgccggggtatgtttgagccctacctgaagagcttctacatcaggtccaccgaccccacccagattaagatcctgaagctggaagtgctgaccaacctggccaatgagaccaacattcctactgtcctacgggaattccagacctatattcgcagcatggacaaggactttgtggcagccacaatccaggccattggacgctgtgcaactaacatcggccgagtccgtgacacctgcctcaatggcctggtgcagctgctgtccaaccgtgatgagcttgtggttgcagagtcagtggtcgtcattaagaaattgctacagatgcagccagcacaacatggagagatcatcaaacacttggcaaagcttacagacaacatccaggtgcccatggcccgagccagcatcctgtggctcatcggagagtactgtgagcatgtccccaggattgcacctgatgtcttaagaaaaatggccaagtcattcacagcagaggaggatattgtcaagctgcaggtcatcaacctggcagccaagctctacctgaccaactctaaacagaccaagctgctgacccagtatgtgctgagtctggccaaatatgaccagaactatgatattcgcgaccgggcgcgcttcacccggcagctcatcgtcccttccgagcagggtggggccctcagccgccatgccaagaagctcttcctggcacccaaaccagctccagtcttggagtcatccttcaaagaccgggaccacttccagctgggctcactgtcccacctgcttaatgccaaggccacaggctaccaggagctcccagactggccggaggaagccccagacccatctgtgcgcaacgtggaggtacctgaatggaccaagtgctcaaatcgggagaagagaaaggagaaggaaaaacccttctactcggactctgagggggagtcaggccccacggagtccgcagacagtgaccctgagtctgagagtgaatcggacagtaagagcagcagtgagagcggctctggggagtccagcagtgagtccgacaatgaagaccaggatgaggatgaggagaaagggagaggcagtgagagtgaacagagtgaggaggatggtaagaggaagacaaagaagaaggtgccagagagaaaaggagaagcgtcatcctctgatgagggcagcgattccagcagtagctcatcagagtccgagatgacatcggagtccgaggaggagcagttagaacctgcctcctggagcaggaaaacacctcccagcagcaaaagtgctcctgcaaccaaggagatctccctgcttgatctagaggatttcacccctcccagtgtccagcctgtgtctcccccagcaattgtgtctaccagtctggctgctgacctggagggcctgacactcacagactccaccctggtaccgtcgcttctgagtccagtatcgggtgttgggcggcaggagctgctgcaccgggtagctggcgaggggctggctgtggactacaccttcagccgccaacctttctccggggatccccacatggtgtccgtgcacatccacttctccaacagctctgatacccccatcaagggcctgcatgtgggcactcccaaactgcctgctggcatcagcatccaagaatttcccgaaattggtgcgaagggctttggatggggtggaggaggaggctcctgggcagagtcagtctttctgtggttgctgataccctccttgtgccaggccaggggccaagctataggggcacagagatagcatctaacatgatcaacactctggtggacaagacagatgatgaaataagcaagttcacatcagggcgggaggtgcttgcagcagcagatttgggccttggttgtttcaggactaacttaaatgtggtgagggtgagtgggggaaagggtgcttagagttcaggaggaaaccgggaacagtctccagcagccaagaaagccaagattctgtagagggctggtcagctgtgacagtggagaggagagtagggctaggctgggttctagacctatcaggtgatggtggccctccctctccccttcactgccttataccacttcagagtccctggcacctggagaatctgccactgctgtaatgggcattaatttctgtgactcaacccaggcagccaacttccagctgtgcacccagacccgacagttctacgtctccattcagccacctgttggggagctgatggcccctgtgttcatgagtgaaaatgagtttaagaaggaacagggaaagctgatgggcatgaatgagatcacagagaaactcatgctgccagacacctgtcggagtgaccacattgtggtgcagaaagtgactgccactgccaacctgggtcgtgttccttgtgggacatctgatgagtacaggtttgcagggaggacactgactggtggaagcctcgttctgctgaccctggatgcccggccagctggagctgcccagctgactgtcaacagcgagaaaatggtgattggcaccatgctggtaaaggatgtgatacaggctctgacccagtgacttccaaatgctgtgacctgtttggctcccatctatacctccccatgacacctaggctgtcagtctctctcatctttctctctctctctcatcatcctcctcatgccagatagcattcagggtgtcctctctccctctggaggaccaagccctcccctaatgccctccccatggattccttagtgatctgtgcagagagagatggcagccactcccttcagtcctcccagatttctgtagctatttatgtagcaggctcaataaaatgtcttctc

SEQ ID NO: 10750 - DNA, 870 bp, Homo sapiens
tgcctccacctctgcctttaggatcccaaccagctgattcgtgccagtgccctccgtgtcctctctagcatccgtgtgcccatcatagtgcccatcatgatgctagctatcaaggaagccgcctcggacatgtcaccctatgtgcggaaaacagctgcccacgccatccctaaactctacaggtatgccccagccctgtcccacgctccccaggaggctggttcctaagttctcaacccacccctggcctttcctaagtcttgcctgctgcttctcagagggtttgaggagggtagtttgggggactgacagagatggaggagaacaataaggctggggtgcaggaggtgagcatggcttggacagatattgggaaggctggggctgagagtggcaaattcccctcaccgatttctccctcagtttggactctgaccagaaggatcagctgatagaagtcattgagaagcttctggctgacaagaccacggtgcgtgtataggggcgctccgggaggggtggtgaccggcagccggccttccacccttcgcgttcaccctctcgtctttgttctttccccagctggtggcgggcagtgtggtgatggcctttgaggaggtctgcccggagcgcatcgacctgattcacaaaaactaccggaaactctgtaacctgctgatcgacgtggaggagtggggccaggtggtcatcatcagcatgctcacccgctacgcccgcacgcagttcctgagccccacccagaacgtaagtgggcccagcccaggcagagcgggccgaagtgtgtcccggggaggcgcccacagacccgtcggtctccccgtccaggaatccctactagaggagaacgcg

SEQ ID NO: 10751 - DNA, 456 bp, Homo sapiens
tgcctccacctctgcctttaggatcccaaccagctgattcgtgccagtgccctccgtgtcctctctagcatccgtgtgcccatcatagtgcccatcatgatgctagctatcaaggaagccgcctcggacatgtcaccctatgtgcggaaaacagctgcccacgccatccctaaactctacagtttggactctgaccagaaggatcagctgatagaagtcattgagaagcttctggctgacaagaccacgctggtggcgggcagtgtggtgatggcctttgaggaggtctgcccggagcgcatcgacctgattcacaaaaactaccggaaactctgtaacctgctgatcgacgtggaggagtggggccaggtggtcatcatcagcatgctcacccgctacgcccgcacgcagttcctgagccccacccagaacgaatccctactagaggagaacgcg

SEQ ID NO: 10752 - DNA, 20466 bp, Homo sapiens
cgcgcagcctccgccgctgcacactgcagcctctgctgaacccctgccgcgccgccgccttcgccagcccggaccggaccggcccgccttcccttcctccgctccagccggcctccggccccgcaacctcctcctcggcgaagtctccctggccgccccatgtcggccgcccccgcctacagcgaagacaagggcggctccgctggccccggggagcccgagtacggccacgaccccgcgagcggcggcatcttctcctccgactacaagcggtgagggagcccgccaggaagctcgcgggagggttggggccggggaccgggcgaggcgcgcgggcaccatggacagcgcccggccccagcgccggccccgccccggccgcgccgaccggaagcccgcccggccccctcctgcggcctggagccccggcccagcgcgggcagcgctggcaccccggctccaggggccggcctaggacgcggaggggggcagataggggctggcgggggatgggccagctcagtttcgagaggagaaaccctccggttccaggtgtttctccggtttgcggcgttgcgttaggggttcccttcctttttcgtgctaggcgggttggcttcccaaaaatgtgggggaggggtctgagtcagcgaacttgagcttgagcctggggcctcttcaggaaggcgggccctggatgtacttgcacagcctcccagcttggccctgctgcaaattcatttcccctccctctggtccccatctccatctgaccctcacatccctgctcctggcattgcccctgtagttcagctccaccttcacaccctcccccacctttgattcgttcgtttgtttcttcatttgtttattcgtaaattctgcaacaagcatttatgaaaagccaactgtgtcgagtcctgaactagtcacggaatacaactgtgaacatgagacccttcttgtcctcacgatgctctagaggggagcacagatgaagaagcagtcagggacagtcgagtgtaatgggggcagtgggagcagggagaggacctagtctctggcgccggagagaaggaagacaggagcgtgaggtatgttccaggcagaggaaagggctttcaggaaggttgagagccaggccacaatctgtgtgagccactggactgaccagaaaagagggtggggaggactcctgaaggattctaagcaggcgacataatcagatttatattttagaaggacgtcaggctgctgcattgtggagaagagattggaggtgggccagattgaacaagagacaagggaggtgggtcttgaagttcacaggcctggcatgattgtggcctagaccaggggagaggcagaagatttgaggctgtggaagaggtggaagcctcagacctgatgattaattggatattgggtgggggtttagagggacagggggagaagatgaggattttcacgcacgtccatgtgaagagaccaccaaacaggctttgaacaataaagctttttaatcacttgggtgcaggccagctgagtccgaaaaaagagtcagcgaagggaaatggggtgggaccgttttacaggatttgggtaggtagtggaaaattacagtcaaagggggttgttctctggcggtggggggacacaaggtgctcagtgggggagcttttgagccaggatgagccaggagaaggaatttcacaagataatgtcatcagttaaggcaggcacaggccattttcactcttcagttacttcaggccatctggatgtatacgtgcaggtcacaggggatatcatggcttagcttgggctcagaggcctgacattcctgtcttcttttattaataagaaaaataacataaaatagtgttgaagtgttggggcagcaaacattttggcggggggtggtatggagagatactgcttctccatagccttgaagggctgcttcgagcgggattggggtggcgtgggaacctagagtgggagagattaagctgaaggcagattctgtggtaagggatgatattgtggggttgttagaagaaacatttgttgtataggattattggtgatggcctggatacggttttgtatgaattgaaaaactaaatggaataagagaaggagaaaaacaggtattaaaggactaagaattgggaggacccaggacatccaattagagagtgcccaaggaggttcagcatagccctgccagcaaagattatttatttactttaagagggagttaagactggcagtttggggatagcaccaggagatatcagctgtaatggtttggagaaacagtgtaaaccggcagtgtaaacaagagcagggcatgtatgagtagttgagtatggtgaataggagtatgactagtcagaagatagtagggatgacaagttttctggggcacagtccaagttggtctggtgtctggaatgagactggggcctaataaaaaggagcatctatacaggagcttgaatgggctgtaccctgcagcattccgaggacaggcccaaattctgagaagggcaagtggtaaaagtattgtcagtcctttttaagttggtggctgagcttggtgaggtgtgtttttaaaagaccattagtccgttctaccttttctgaagattgaggatggtaaggggtatgaaggtttcactgaataccaggagcctgagaaactgcttgggtgatttgaccagtaaaggctggtctgttattggactatatagaggcgggaaggccaaactgaggaattatgtctgacagaagggaagaaatgaccgcagtggccttctcagaccctgtgggaaaggcctctacccatccagtgaaagtatctacccagaccaagacgtattttagtttcctgactcggggcatgtgagtaaagtcaatttgccagtcctgggcagaggcaaatccccaggcttgatgtgtagggaagggagggggcctgaacaatccctgaggagtagtagaatagcagatggaacactgagaagtgatttccttgaggatagatttccacaatggaaaggaaatgagaggttctaagaggcaggctagcggcttgtaacctacatggaagaggttatgaaatgacgaaagaatagaatgggcctgtgaggctagaaggagatattttccttggtctgagaaccatttgccttgtgtgggaagagattcataggtgtaagtttcattgggggagtaggtaggagtgactgatgagaaggagaaaaactggccatgagggacagaagttggaatgctagctgcttttttagctaccttatcagcataagtgttgccctgagcgatgggatctgatgccttttgatggcccttgcagtgaatgactccagcttcctttggaagtaaagcggccttgagaagagtttttattaaagaggaattaatgatggaggacccttgtgtaatgaggaaagctttttgcccatataacagcatggaggtacaggatatggaaggcatatttagagtcagtataaatattgacacatagtccttttgcaagactgagggctcgagttaaggcaatgagttaagctttctgagaggtagtggaggggggcagaaagtatatgcgtcaggtgtgaggaagaaaatagattttggaagttatgagaactgtagagagtgagttgagcatagtttgtgattttgagggcctctgaaagtattaaagcagcggcagccgctgcacgcagacatgagggctaggccaaaacagtaaggtcaagttgttcggacagaaaggctacagggcgtggtcccagctcttgtgtaagaattccaaccgcacagccctgcactttggctgtgtgtgatgaaaaagggttgggatgaattagggagacctagtgtgagagcagcttctacggctgtttttaaggaatggaaaggagtggcaaaaggatttaggatctgtggggtcagctaggtttgcttttgtgagtttatataatggtttagtcaggatggtaaaactaggtatccaaaggtggaagtacctaaccatcccttgaaaggaaaggagttgttgctttgtagaagggattggggttcgggagattagccggacatgatcagcagggagagcacgtgtgttttcatgagaactatgccaagataggtaatggatgaggaagaaatttgggcttgactgaagtaatgggggctgtccgtgaagccttgcggcagtacagcctaggtagtttgctgagcctgatgggtgtcagggacagtccaagtgaaagcgaagagaggctgagatgaagggtgcaaatgaatagtaaagaaagcatgtttgaaatccagaagagaatgatgggttgtggaggggttgtggagggaggtattgaggaggagagtatatgagtttggcaccacggggtggataggcaaaacaatttggctgacaaggcacagatcctgaactaattgtaagacttgtctggtttttgaacaggtaaaatgggggaattgtaaggagagtttataggctttaaaaggccatgctgtaacaggcgagtgataacaggctttaatccttttaaagcctgctgggggatgggatattgacattgagcacggtaagggtgattaggttttaatgggatggtaaggggtgcatgatcagtcgccaaggagggaatagaggtgtcctatacttgaggattaaggtggggagatacaaggggaggatgtgaaggaggctttgaactgggggaaaaggtggcaatgaggtgtggctgtagcctaggaatagtcagggaagcagataatttaaagtgtctcggcctaataagggaactgcgcaggtggggataactgaaaaggagtgcataaaagagtattgtccaagttggcctcagagttggggagttttgagaggtttagaagcctggccatcaatacccacaacagttatggaggcaaaggaaacaggcctttgaaaagaaggtaatgtggagttggtagcctccgtattgattaagaaggggacggacttaccctccactgtaagagttacccaaagcatctgtgatggtccaggaagcttccaaggcgattgggcagtgtcagtcttcagctgctaagccgagaagatttgggaaggagtcagtcaggcagccttgggccagagttccaggggctctgggagtggctgccaggtgagttggacagtccgatttccagtggggttccacacagatgggacaaggcttaggaagaatcctgggctgtgggcattccttggcccagtggccagatttctggcacttgaagcaagatcctgatggagaaggtcctgtaggaatgcttgactgctgcagcttaggcattttgaagttcttgtgtactggagatgtggctggggtttctctcacagtggaggcaaggaactacaactcagaaatacattgctacttggctgcctttactctattattgtacaccttgaaggcgaggttaattaagtcctgttatggggtttgagggccggaatttaatttttggagttttatttaatgttgggagtggattgggtaataaaatgtatattgagaataagactgccttttgaccttttagggtctagggctgtaaagcgtctcagggttgctgcccaacgagccatgaactgggctgggtttttatatttgatgaaaaagagcctaaatactaactgatttggcagaggtcggataaaggaaaaggagcgttaaccttgactatgcctttagctccagccacctctttaagaggaaattgttgggcaggttggggagggctagtcgcagaacaaaactgtaagccggactgggtgtggggagaggaggtgatagaaggattatagggtggaggagcagaagctgagaaagaattggagtctgattcagcctggtggggagtgacctgaggagcattctggggattaggtgagaggtcagatgggtcggtagaaaaggaagattggaagattgaaaagacgcagcgacgcttggggttgggactgaggggacaggcgggagggaaagaaggaggatttgggatgagtcgcattgggaacagagactagggagggaccgatgtgtaaaagaatgcctggacatcaggcacctcagactgtttgcccattttacaacaagaattatctagatcttgtaggatggaaaaatcgaaagtgccgttttctggctatttggaaccattgttgagtttgtattggggttaagcggcattgcaaagaaaataaggcatttaggttttaggtcaggtgtgagttgaagaggttttaagttcttgagaacacaggctaagagagaagaaggaggaatggagggtggaatgttgcccacagtgaaggaggcaagcccagagaaaagagagggtagagacacggagagaaggggtggggggtgctttgccccccaggaaagtggagagaaaagagagggtagagacacagagagaaggagtcgggggtgcttgtcccccaggaacgtggagagaaaagagagggtagaaacatggagagaaggggtggggggtacttgccccccaaaaagtggtgtttgccactaagggtgaaagatcaaggcaggcatcctcgcggtgatcagacaactctgaaacgtgggtgaataatcaagcaggcgtccccgcagtgattaaacaccaagggaagactgtcttcctgagtccgtgatcggcgccggagttttgggttcacagataaaatgcatttcctgtctctaccagaaaaggaaaggaaccgaaattaagagaagggagagattgaaagatggcaccaagattgaaaggagaaagaggttgagggatagtgagagaggttggagaagagagtaaaaagaggccgcttacctgatttaaaattggtgagatgttcctcaggctggttggtctgaggacccgaggtcattaggtggatctttatcatgaagcaaagagcaggaggacaggggattgatcttccaagggtggtcccccgatccgagtcatggcaccaaatttcacgcacgtccatgtgaagagaccacccaacaggctttgtgtgagcaataaagctttttaatcacctggttgcaggccggctgagtctgaaaaaagagtcaacgaaaggagataggggtggggccattttataggatttgggtaggtagtggacaattacagtcaaaggggggtgttccttggtgggcaggggcgggggacacaaggtgctcagtgggggagcttttgagccaggatgagccaggagaaggaatttcacaaggtaatgtcatcagttaaggcaggaacaggccattttcacttcttttgtgattcttcaattacttcaggccatctggatatatacgtgcaggtcacaggggatatgatggtttagcttgggctcagaggcctgacaaggatgttactcaggttactagttcctgcaactggatggatgatggtgttattcagtgtaattggaaataaagatgttacaagcaaatttgtggaaaattaatgttgagcccagctttggacatattgagattgtaaactctgagggacatattaccctattaggtagctggatattacgatttgggttccaggagagagattagggaattattaacatatgtatgttaattaaagccacagaagtgaagataactcagggaggaggtataaaatgagttcagacactgcacaagtctgaaccctgaagacaccaacattagaagtgaccagagaacagtggaaagtgtttcaaggtacccaagaggtgaactaaaggctgaaagaaaacaatgtaatttcaagaaggagggagtggtcagtagtttcaatgcccattaaggtcaaatcaaacaaggaaaaaaatcatgaccattggttgacaaagaagagctcaattcctttctactctattccccacctcctgccctgggagataaattctggcaaagtaaggagaacaggagctagattatttctttcccagcattctgttgtggatgatttaaaacatacagaaaaatgaaatgaataatacaatgaacacatgtatatcatccatctagattcaactgtcattgacatcgtaccttatttgctttatctaaccatctattcgtatactttttttggttgaaccatgttaagttgcagagatcatgacccttcaaccccacattctaagtcgacatctaaagccagattaaaatgaataaaggagcacacaggtggtaagtagataaaacagtgaatggaaattttgctttcaagaaatttgactgtaaaagagaaagctgctggaggagaacctcactcagttcaaggaagtttgtctattttgttattttgggtttttttttttgtttcttaaaatgtatgactccatatttttgtttattattaatattaggcgggagagcctagagcaagtttaactgctgatgggaaggagcgattggtgggagagaggctgaagggaagaaaggaagtacagaacactgagtgatgggaggggaggcttactgagctgggtgggaggactagcctgggagcagggaggaccaactctgcccagagggaagagggcaggaggagaggagagtataaatgcagatggagactgggtacagtggctcatgcctgtaatcccagcactttgggaggctgaggcgggcaggtcacttgaaatcaagagttcaagactaacctggccaacatgtcaaaaccccgtctctactaaaaatacaaaaattagccagttgtggtaacgcatgtctataatcccagctactcaggaggctgaggcaggagaatcacatgaacccgggaggtggagattacagtgagccgagatggcaccactgcactccagcctgggcaacggagtgagactccatctctaaataaataaataagtaaataaatgcagatggatgggagtctggggcagggggctgcaggggatttcatctaaagactttccctttttcgggaaccaggtggtgaagccataagggcaaggctgggaatggggacttgagggtcaaaggggtttcaaatacaatgaagaaagccaaccaggccaggcgcggtggctcacgcctgtaatcctagcactttgggaggctgaggcaggcatatcacctaaggttgggagtttgagaccagcctgaccaacatggagaaaccccgtctctactaaaaatacaaaaattagccaggtgtggtggtgtatgcctgtaatcccagctacttgggaggctgaggcaggagaattgcttgaacccaggagacggaggttgcagtgagccgagatcacgccattacactccagcctgggcaataagagtgaaactccatctgaaaaaaaaaaaaaaaaaagccacccaccactggcaggccagtggcattggagaccagtgggacaagagggccaaggatgtgagagcagttggagggatagacacaggggttgcgggggagggtgctaggaggaagtagagataagagaaggttgatgggaaggaataaatcaagtattggctctggaaaggcaggtgaggattaagatgcctagggtcagtgagaagagggtatatgagatttctcaggaggctgcagtctaattgtggcagtgggattggagctgaagagggcatctctcacctctctatcaactccactgaccatctagtcccttgcccagagactaggggtaggcttggtctcctgtccctgcccttctttccctctagaggccttgtctctgagcagtgaagaggaaaccggagcatccctccctgccagtgtccggttaccaagttttgggggcgggccatctggtgactgtgacaggagccccagcgccctggccagctcagtccattcctggagaagaacctgatgcagcgattcctgcagctcccgggggccgtggtgaggcctggggtcagaggggcctgcggagctgatcaagaggctgctagccctgtgctggctcccgaaggtgggcccccactccggtaccaggccttggagcctgaggagcttcggtggctgcaggcccaggaggaagacacgaccccagaagcatctctggaaggaccttgcccagaggccagccagagccagagccagccactacggtatagaggaacccacaggaaccccctacccacacagccaggaaggccagggatgggcagttgcactctcagcccagacctcttccggtcccacctcctctgatggaggcttaggctggcatttagggtccaggctgggcggagaaggtggtcaggggcaccgtatgggggctgagggtatgagtgaggagagatgaggggcttaactccctggaggctctgaggggaggaggatagtaaaatatttgagggttgaggtcccaccttgacctctttctccccacaggcccccactggagtgggctctggacgaggtttggggacaggatacagcacagacagggtttggccagccactgcctgccagtggactggaacttaggtggtaagaggtgacagcgaggtgtatatcaagggaggtgagcatgactgacccccagtgccatgccaggccccctggctggctccagccacccccagaagagtcccttaggctaggtcagactaggggtcaggtcagagtgagtgcagcagcgtaaggggatctgactatgggagataatgtttcatggccttagggtgttgtgccttagtccctgcctctgcctcttgggaacagaagttggtgggagtgaggacgagaggcccagggcggtctcacctcaggtggtggctgcggtctgtgtcagtgcatattctgtgtcagtgcatattcgacagtcaatcttacctgtgctggctgctttaggcccagtggtcctgccccctttcattccccttctcctgcaggggcctggaatgtactcactaggctgggtggggaggatgccctggggtgtgtgcatttgacaggcgcatgtggcatttgtgggtgtggtgaggaagggaatacccagagttaaaggagattgggcaaacttggccctccttccacggaagcccagggaaaagccatcccagggtgactcctcagaagatcagaggacccttggggctggatatatttgatcttagaagcctacatttatcatcaaaaatctcaactaggagtccactgaccattttggtgaatgagactggagaggccaagtttggtccaagttatctgtgtattagatgtgatgcggcatgtgtgtgtgtgtgtagggggacgtgtgtggggtgtgtgtgtctctatgagggtgtgggggagcggggagaggtcttgtgatatatgtctgtaggggacatgtatgggatatgtgtgtctataagagggtgtgggagagtggggagaggtctcctggtggtatatgtctggggggtttgtaggtgtgtaggtgagttgtgtgggtggtttatgtgtgtagagtttttctgtgggaggtgtctgtatgtgggggagtgtgtttctctgggcgttgtgtaggcaggattttgtgggtgtgcgtgggtttatgtatggattctactagtgtctgcgggacctgtaggtatgtttgtatgagctgtccgtgaggtgtaggtatgtcgggggacatgggagtgtctgaggtatatgtgggtggtatcaatgtgtagttgtctgtggggtgtgcgtatgaaggatcctgacgtggagtgttgtgcattcatatctcagggaagctggtgcccagctctgtcatttttcctaggccctcggtgctgcccacgcctacccagctcaatggtctgtacctatgaccatgcccctggtgtcctgagctcagcctcctacccactaagaaactcaacagtctggtctgtgtttggcagggtaagagggtgattgtcttctggccctggcctgaccctggaagagtagaaggtgtcctctgatttggggggcatccccccaggtgagggagtttcagataacatgatggggctggatattttcttctgtcctcacatgacagatagcgagggcctcagataatgctggaaggcatcatctttctattttgctttccatcaaaaatctctttgggaaagacagtttctaacattcttgggatagtgacttcttagtgcccctcttcttgtctgacgtcaggtactcacgcatttctgcagccctgtgactaagttgcgtgttctgtctggttcttctcttcctctcagcattcatcacttgtttctcagcattagcagcagtcatttgccactttatgattgttatcatgctctttcctctcctaacagtgctatccccaatttctgattttctgtcatttctaaatgttgcatgtctgtgactaactttgcacacattgattttttttttattttttatttttgagatggagtctcgttctgttgcccaggctggagtgcagtggcgcgatcttggctcactgcaagctccacctcctgggttcacgccattctcctgcctcagcctactgagtagctaggactacagacgcccgccaccacacccggctaattttttttaaattttttagtagagacggggtttcaccatgttagccaggatggtctcgatctcctggccttgtgatccgcctgccttggcctcccaaagtgctgggattacaggcgtgagccaccgtgcccggcctgatttttaatttttatcactgtgatatttctcaagctgggttcttgtgcctgggtcaaagctgtgggttatcagagtgtcatctgggaaattagtgtgtgtgagtccccacacacagctgctcaccacattttggaattgtcttggcaacatatgagtgcatcagtttcacacaattctatcagctatatatagacacatttttttcatgggtttattaacaattctctgatcacttcgtgatcaccagttctgcatcctctgagtatggttagccacattgttcactgcacaagggcatctggccaaggaataccagcccatgctccacacacagaatggggagcaacagctcagggctgtgtctatctgtaggggcatgcagattgaaaatgggcttgtagcagccctgacagtgaatgctgcaaagagaccttatacatgtatatcagttccttttttaaatttttttgagatggagtctcactctgtcacccaggctggagtgcagtggcgcgatctcggctcactgcaatctccgcctcctgggttcaagcgattctcgttcctcagcctcctgagtagctgggattacaggtgtgtgccaccatgcccggctaatttttgtaattttagtagggatggggtttcaccatgttggccaggctaatctcgaactcctgaccttaagtgatctgcccaccttggcctccaaaagtgctggaattacaagcgtgagccaccacacctggcctctatttcgaatattaaactttaatttaccatatcccaaatatttttccttttgttgctattatgggctgaattgtgtccctccaaaatgcatatgttgaagttctagcccccagtacctcagaatgttacctttgaggtgattaagttaaaatgaggttattaaggggggccctaatccaatatgactgatttctttataagaagaggaaatttggatataggcacgcagaaggaagaccatgtgaagacagagaagatggttgtaagagacagaaaaacccaaagtgtgtttctcctactctcatacacaccgctcaccagagagtgcttcacctctggccacaaaaatgggtggagatttctccccaccaacaacctgttctccagcagacactaactgggtgttctctaattcaagtcaatctagtgttagattttttaggttaagggctcagtgccacaagactgctctctgcttcagatgccaattccaagtggtaagttgtcagctatacttctgaccaactggctataaatcaggggttcccatgccaccctccttgggttcaactctgtgagtggctcacagaactcagggaaactttagttatatttacccatttattataaagggtagagacaaacaccagatgaagagatgcatagggagaggtatggaaggaggggtgcagagctcccatgccctctccaggcaccacaccctccaggcaccttcacatgttccacagtctggaagctctcgaaaccctatcctcttgggtttttatgaaggcttcatgattgatcgcatctttggccatgtgatcaactcaaccatcagccccactccccattccccagaggtcaaatagtgggattgaaagtttcaaccctcagctgggcacagcagctcacgcctataatcccagcacttttggaggccaaggcgggtggatcacttgaggtcaggagttcgagaccagcctgaccaacatgatgaaacccatctctattaaaaatacaaaaatttgccaggtgtggtggtgggcaactgtagtcccagctatttggaaggctgaggcaggagaattgcttcaacccagaaggtggaggctgcagtgagccgagattgcctcactgcaccactccagcctgggcgacagagcaagactcagtgtcaaaaaaaaaaaaaaaaaaagaaagaaagaaaaaaagttccaaccatctgataacaaaagatgcttctatcacccaggaaattccaagggatttccatgtcagttgttcctctcactcaggaagttataaaggtcttaggatctctgcgtgaggaactgggtggaagaccaaatattagaacagaagttctcctagcatccctattgtcaagagttttaggagctctgtctcagaaatggggtatagagaccaaatatatatttctttacaatatcacaagaatcatctacaagccaaagaaagaggctatagaagaaaccaaccctgctgacactttaatctcagccttccagcctccagaactgtgagcaaataaatttatgttgtttaagccaccatctgtagtacttcttgtttttttttttttttagagacaggttcttgctctgttgcctaggctggagtgcagtagcacaatcatagctcactgcagcctccaacatcttggtgcaagcgatcctcccacttcagcctcctgagtagctgtgactacaggcatgtgccaccatgcctggctaattttttttatttttgtagaaacaggatctgactatgttgtccaggctggtcccaactcctgagctcaagcaatccttctgcctcagtctcccaaagtgctgggattacaagtgtgagccaccatgcctggcctgtggttctttgttatggtggttctaggaagctagtatagttgccttatttttctcataaatttagtttttagataccaaagtttaaaaattaaacctaggcctggcacagtggctcacacttgtaatcccagcactttgggaggccgaaggaggcaaatcacttgagtccaggagtttgagaccagcctggtcaacatggcgaaaccccaactctactaaaaatacaaaaaatttgccaggcatggtggtgcacacctgtaatctcagctatttaggaggctgaggcatgagaatcacttgaacccaggaggttgaggctgcagtgagccgagattgcgccactgcactccagcctgggcaacagagcgagacttcgtctcaaacagaaaaacgaaaaaaaggcctgggcgcagtggctcacacctgtaatcccagcactttgggaggctgaggtgggcggatcaactgaggtcgggagtttgagaccagcctgaccaacatggagaaacctcatctctactaaaaatacaaaaattagctgggcatggtggcgcatgcctgtaatcccagctattctggaggctgaggcaggagaattgcttgaacccaggaggtggaggttgcagtgagctgagatggcaccattgcactccagcctgggcaacaagaacgaaactctgtctcaaaaaacaaaaacgtaccaattaaacctagccatattgttgctgctaataattttatgaccttaataaaatcttcccttccttcttttgtatttaaaaataattaactgttaagcaaatgcgggatttattttggggtgaaatatgtatacaagttaaattatttgctgctggccaggtgtggtggctcacacctgtaatctcagcgctttgggaggatgaggcgggaagatcacttgaggtcaggagtttgagaccagcctgaccaacatggtgaaaccctgtctctactaaaaatacaaaaattacccgagcgtggtggtgcatgcctgtaatcccagctacttgggaggctgaggcaggagaatcacttgaacccaggaggcagaggtttcagtgacccgagatcgtgccattgcactccagcctgggcaatgagagcaaaattccatctaaaaaaaaaaaaagtgctgcaaagcagttgtcccaatagcatttatttaagtggggcgggggcgggggggtgggggcggggggagattcttattggttcgtaatttatcaagttagaccttttatgaaattccccccatgacctttgaccttctgtttttaacctggtaccaaacagcttttatcatcgtctcgtggtgtttatgttttgaagtccaatagggtgagttgtctatgattgtttccttcttttcccaaaaatattctttggagttcttacctactgattttttttttccagatgaattttgctgtcacttaagtttgacaaaatgttccctttgaaatttcaaatttttgaaatgaagtatgagatctaaaaaaaaaaagaaacctgtgtattggctcagcattacccttattcctctcagccaagtgcaagggatcacttactcaaatctttattcatcccactagagtttaatgacttccttgaatggctgttcaatgttcagtgacaggtctggcttttgttgtgaggccatctatggagtctctgggacccttccagtccctggaatcagtttggtctgagaggtcaggacttggaaacatactggaggcagggcaagggcaccctgctcttgttttggcatctacctcttttccgctggtccttcttatccatccaactagtccttttccctgagccaggtccatactttcccaccccaaacccttcctcttgtttcctggctctctgtttctggctacattcatttcctacactcctgtatcaaaagtaccacaattgcttctcgttcccacagtgcagtgcggctgagcgcctcagagcccgcggggacgctgcggggggattgcggggagggggcgttgggaggtgccgatgttgggctgggcggatgagcgcatctgcgtggtgagccttccaacgtgcgcgagaaggacgtggaagaccttttctacaagtacggccggatccgcaagatcaagcttaagaatgggcactgccttgtgcccttcgccttggtgcgctttgaggacccccgagatgcagaggatgctatttatggaagaaatagttatgattatggccagtgtcggcttcgtgtggagttctccaggacttacgaagtcggggtgggtggccccgtggtgggaggaatgggccttctgcaagaagatctgatttccgagttcttgtttcaggacttcctcaggcagctggcaggacctgaaggatcacatgcgagaagttggggatgtctgttatgccgatgtgcagaaggacggtgtggggatggttgagtatctcagaaaagaagacatggaatatgccctgcataaattggatgacactaaattccactctcatgatagtgaaacttcctacatctgagtttatcctgagagaagcaccagctatggctactcacagtctcggtttgggtcaaggggccgtgactctccatactaaagccggggttccccacaccacttctctcctttcaggccctactgagacaggtgatgggaattttttctttattttttaggttaactgagctgctttgtgctcagaatctgcattccagattgaggatttagcgtcttaggaaattattttaattttttttttttaaagaagaaaaaaaaactacatactttctaccagggccatattagcagtgaaacattttaaactgcagaaattgtggttttggttcagaaacaagttgtatatttttcactcctgaatatgggtaaaaaatcagttccgtctttgtgggttgctctgctatggagatcaacagttactgtgactgagttggcccattctgcttaaaaatatgttttaaacgtttaagaaaaatgctcatcatcactggccatcagagaaatgcaaatcaaaaccacaatgaggtaccatctcacaccagttagaatggcaatcattaaaagtcaggaaacaacaggtgctggagaggatgtggagaaatagaaacatttttacactgttggtgggagtgtaaactagttcacccattgtggaagacagtgtggcgattcctcaaggatctagaactagaaataccatttgacccagtgatcccgttattgggtatatacccaaaggattgtaaatcattctactataaagacacatgcacacgtatgtttattgcagcactgttcacaatagcaaagacttggaaccaacccaaatgtccatcagtgatagactggattaagaacatgtggcatggctgggtgcggtggctcatgcctgtaatcccagcgtggctcatgcctgtaatcccagcactttgggaggccaagacgggtagatcacgaggtcaggagatcgagaccatcctggctaacacggtgaaaccccgtctctactaaaaatacaaacaattagctgggcgtggtggtggcgggtacctgtagtcccagctactcggtaggctgaggcaggagaatggcatgaacccaggaggtggagcttgcagtgagccgagattgcgccactgcactccagcctgggcgacagagcgagactccatctcacaaaaaaaaaaaaaaaaaaaaaaaaaaagaagaagaaaatgtggcacatatacaccatggaatactatgcaaccataaaaaaggatgagttcgtgtcctttgtagggacatggatgaagctggaaaccatcattctgagcaaactactgcaaggacagaaaaccaaacactgcaggttctcactcataggtgggaattgaacaatgagaacacttgaacacggggtggggaacatcacacactggggcctgttgtggcgttgggggaggagggagggatagcattaggaggaatacctaatgtaaatgacgaattaatgggtgcagcacaccaacatggcacatgtatacatatgtaacaaagctgcacgttgtgcacatgtaccctagaacttaaaagtataattaaaaaaaaaaagtttagtaattgaaaaaaaaaagtacaacaattgggttggttggaacagcagaaatgaattgtctcacagctctggaggccaaaagtctgaactcaaggtgtcggcaggaccatgctccctctgaaacccatagggaaatccttctttgccccttctagcttctggttgtttgctggcagtctctggcattccctggcttgtagacgcatctttccaatcgtctgccttcacatggtagtctccctgtgtctgtctctttaagtggctgtcttttgttttttgtgtttttttaatttcaatttaatctattttttgtagacacattgtttcaccatgttgccaggctggtctcgaactccagggctcaagtgatcctcccgtctcagcttcccaaagtgctgggattacaggcgtgagccgccacacccagcccacatggctgtcttcttatgggaaaccagacatgggattagagacccactctattagagtaggattgcatttaactaattacatctgcaacaactctatttccaaataaggttacattctgaggtactaggggttaagacttaaatatatcctttttaggaaggacacagttcaacccacaatattagctggccacatgtttcccctgatctgtactttacttgttccccctggctctggtccctcctcgggtcaggtcctgcctgagcctcccctggccatgtcccttctttgtgcctggaccctcctgattaataccccatccccacccttgtgccctcagctgacttcttgtacctcccaccaggcatgatgacctgaaggagatgctggacaccaacaaggattctctcaagctgga

SEQ ID NO: 10753 - DNA, 498 bp, Homo sapiens
cgcgcagcctccgccgctgcacactgcagcctctgctgaacccctgccgcgccgccgccttcgccagcccggaccggaccggcccgccttcccttcctccgctccagccggcctccggccccgcaacctcctcctcggcgaagtctccctggccgccccatgtcggccgcccccgcctacagcgaagacaagggcggctccgctggccccggggagcccgagtacggccacgaccccgcgagcggcggcatcttctcctccgactacaagcgacacattgtttcaccatgttgccaggctggtctcgaactccagggctcaagtgatcctcccgtctcagcttcccaaagtgctgggattacaggcgtgagccgccacacccagcccacatggctgtcttcttatgggaaaccagacatgggattagagacccactctattagagcatgatgacctgaaggagatgctggacaccaacaaggattctctcaagctgga

SEQ ID NO: 10754 - DNA, 22037 bp, Homo sapiens
agtcgagtgtaatgggggcagtgggagcagggagaggacctagtctctggcgccggagagaaggaagacaggagcgtgaggtatgttccaggcagaggaaagggctttcaggaaggttgagagccaggccacaatctgtgtgagccactggactgaccagaaaagagggtggggaggactcctgaaggattctaagcaggcgacataatcagatttatattttagaaggacgtcaggctgctgcattgtggagaagagattggaggtgggccagattgaacaagagacaagggaggtgggtcttgaagttcacaggcctggcatgattgtggcctagaccaggggagaggcagaagatttgaggctgtggaagaggtggaagcctcagacctgatgattaattggatattgggtgggggtttagagggacagggggagaagatgaggattttcacgcacgtccatgtgaagagaccaccaaacaggctttgaacaataaagctttttaatcacttgggtgcaggccagctgagtccgaaaaaagagtcagcgaagggaaatggggtgggaccgttttacaggatttgggtaggtagtggaaaattacagtcaaagggggttgttctctggcggtggggggacacaaggtgctcagtgggggagcttttgagccaggatgagccaggagaaggaatttcacaagataatgtcatcagttaaggcaggcacaggccattttcactcttcagttacttcaggccatctggatgtatacgtgcaggtcacaggggatatcatggcttagcttgggctcagaggcctgacattcctgtcttcttttattaataagaaaaataacataaaatagtgttgaagtgttggggcagcaaacattttggcggggggtggtatggagagatactgcttctccatagccttgaagggctgcttcgagcgggattggggtggcgtgggaacctagagtgggagagattaagctgaaggcagattctgtggtaagggatgatattgtggggttgttagaagaaacatttgttgtataggattattggtgatggcctggatacggttttgtatgaattgaaaaactaaatggaataagagaaggagaaaaacaggtattaaaggactaagaattgggaggacccaggacatccaattagagagtgcccaaggaggttcagcatagccctgccagcaaagattatttatttactttaagagggagttaagactggcagtttggggatagcaccaggagatatcagctgtaatggtttggagaaacagtgtaaaccggcagtgtaaacaagagcagggcatgtatgagtagttgagtatggtgaataggagtatgactagtcagaagatagtagggatgacaagttttctggggcacagtccaagttggtctggtgtctggaatgagactggggcctaataaaaaggagcatctatacaggagcttgaatgggctgtaccctgcagcattccgaggacaggcccaaattctgagaagggcaagtggtaaaagtattgtcagtcctttttaagttggtggctgagcttggtgaggtgtgtttttaaaagaccattagtccgttctaccttttctgaagattgaggatggtaaggggtatgaaggtttcactgaataccaggagcctgagaaactgcttgggtgatttgaccagtaaaggctggtctgttattggactatatagaggcgggaaggccaaactgaggaattatgtctgacagaagggaagaaatgaccgcagtggccttctcagaccctgtgggaaaggcctctacccatccagtgaaagtatctacccagaccaagacgtattttagtttcctgactcggggcatgtgagtaaagtcaatttgccagtcctgggcagaggcaaatccccaggcttgatgtgtagggaagggagggggcctgaacaatccctgaggagtagtagaatagcagatggaacactgagaagtgatttccttgaggatagatttccacaatggaaaggaaatgagaggttctaagaggcaggctagcggcttgtaacctacatggaagaggttatgaaatgacgaaagaatagaatgggcctgtgaggctagaaggagatattttccttggtctgagaaccatttgccttgtgtgggaagagattcataggtgtaagtttcattgggggagtaggtaggagtgactgatgagaaggagaaaaactggccatgagggacagaagttggaatgctagctgcttttttagctaccttatcagcataagtgttgccctgagcgatgggatctgatgccttttgatggcccttgcagtgaatgactccagcttcctttggaagtaaagcggccttgagaagagtttttattaaagaggaattaatgatggaggacccttgtgtaatgaggaaagctttttgcccatataacagcatggaggtacaggatatggaaggcatatttagagtcagtataaatattgacacatagtccttttgcaagactgagggctcgagttaaggcaatgagttaagctttctgagaggtagtggaggggggcagaaagtatatgcgtcaggtgtgaggaagaaaatagattttggaagttatgagaactgtagagagtgagttgagcatagtttgtgattttgagggcctctgaaagtattaaagcagcggcagccgctgcacgcagacatgagggctaggccaaaacagtaaggtcaagttgttcggacagaaaggctacagggcgtggtcccagctcttgtgtaagaattccaaccgcacagccctgcactttggctgtgtgtgatgaaaaagggttgggatgaattagggagacctagtgtgagagcagcttctacggctgtttttaaggaatggaaaggagtggcaaaaggatttaggatctgtggggtcagctaggtttgcttttgtgagtttatataatggtttagtcaggatggtaaaactaggtatccaaaggtggaagtacctaaccatcccttgaaaggaaaggagttgttgctttgtagaagggattggggttcgggagattagccggacatgatcagcagggagagcacgtgtgttttcatgagaactatgccaagataggtaatggatgaggaagaaatttgggcttgactgaagtaatgggggctgtccgtgaagccttgcggcagtacagcctaggtagtttgctgagcctgatgggtgtcagggacagtccaagtgaaagcgaagagaggctgagatgaagggtgcaaatgaatagtaaagaaagcatgtttgaaatccagaagagaatgatgggttgtggaggggttgtggagggaggtattgaggaggagagtatatgagtttggcaccacggggtggataggcaaaacaatttggctgacaaggcacagatcctgaactaattgtaagacttgtctggtttttgaacaggtaaaatgggggaattgtaaggagagtttataggctttaaaaggccatgctgtaacaggcgagtgataacaggctttaatccttttaaagcctgctgggggatgggatattgacattgagcacggtaagggtgattaggttttaatgggatggtaaggggtgcatgatcagtcgccaaggagggaatagaggtgtcctatacttgaggattaaggtggggagatacaaggggaggatgtgaaggaggctttgaactgggggaaaaggtggcaatgaggtgtggctgtagcctaggaatagtcagggaagcagataatttaaagtgtctcggcctaataagggaactgcgcaggtggggataactgaaaaggagtgcataaaagagtattgtccaagttggcctcagagttggggagttttgagaggtttagaagcctggccatcaatacccacaacagttatggaggcaaaggaaacaggcctttgaaaagaaggtaatgtggagttggtagcctccgtattgattaagaaggggacggacttaccctccactgtaagagttacccaaagcatctgtgatggtccaggaagcttccaaggcgattgggcagtgtcagtcttcagctgctaagccgagaagatttgggaaggagtcagtcaggcagccttgggccagagttccaggggctctgggagtggctgccaggtgagttggacagtccgatttccagtggggttccacacagatgggacaaggcttaggaagaatcctgggctgtgggcattccttggcccagtggccagatttctggcacttgaagcaagatcctgatggagaaggtcctgtaggaatgcttgactgctgcagcttaggcattttgaagttcttgtgtactggagatgtggctggggtttctctcacagtggaggcaaggaactacaactcagaaatacattgctacttggctgcctttactctattattgtacaccttgaaggcgaggttaattaagtcctgttatggggtttgagggccggaatttaatttttggagttttatttaatgttgggagtggattgggtaataaaatgtatattgagaataagactgccttttgaccttttagggtctagggctgtaaagcgtctcagggttgctgcccaacgagccatgaactgggctgggtttttatatttgatgaaaaagagcctaaatactaactgatttggcagaggtcggataaaggaaaaggagcgttaaccttgactatgcctttagctccagccacctctttaagaggaaattgttgggcaggttggggagggctagtcgcagaacaaaactgtaagccggactgggtgtggggagaggaggtgatagaaggattatagggtggaggagcagaagctgagaaagaattggagtctgattcagcctggtggggagtgacctgaggagcattctggggattaggtgagaggtcagatgggtcggtagaaaaggaagattggaagattgaaaagacgcagcgacgcttggggttgggactgaggggacaggcgggagggaaagaaggaggatttgggatgagtcgcattgggaacagagactagggagggaccgatgtgtaaaagaatgcctggacatcaggcacctcagactgtttgcccattttacaacaagaattatctagatcttgtaggatggaaaaatcgaaagtgccgttttctggctatttggaaccattgttgagtttgtattggggttaagcggcattgcaaagaaaataaggcatttaggttttaggtcaggtgtgagttgaagaggttttaagttcttgagaacacaggctaagagagaagaaggaggaatggagggtggaatgttgcccacagtgaaggaggcaagcccagagaaaagagagggtagagacacggagagaaggggtggggggtgctttgccccccaggaaagtggagagaaaagagagggtagagacacagagagaaggagtcgggggtgcttgtcccccaggaacgtggagagaaaagagagggtagaaacatggagagaaggggtggggggtacttgccccccaaaaagtggtgtttgccactaagggtgaaagatcaaggcaggcatcctcgcggtgatcagacaactctgaaacgtgggtgaataatcaagcaggcgtccccgcagtgattaaacaccaagggaagactgtcttcctgagtccgtgatcggcgccggagttttgggttcacagataaaatgcatttcctgtctctaccagaaaaggaaaggaaccgaaattaagagaagggagagattgaaagatggcaccaagattgaaaggagaaagaggttgagggatagtgagagaggttggagaagagagtaaaaagaggccgcttacctgatttaaaattggtgagatgttcctcaggctggttggtctgaggacccgaggtcattaggtggatctttatcatgaagcaaagagcaggaggacaggggattgatcttccaagggtggtcccccgatccgagtcatggcaccaaatttcacgcacgtccatgtgaagagaccacccaacaggctttgtgtgagcaataaagctttttaatcacctggttgcaggccggctgagtctgaaaaaagagtcaacgaaaggagataggggtggggccattttataggatttgggtaggtagtggacaattacagtcaaaggggggtgttccttggtgggcaggggcgggggacacaaggtgctcagtgggggagcttttgagccaggatgagccaggagaaggaatttcacaaggtaatgtcatcagttaaggcaggaacaggccattttcacttcttttgtgattcttcaattacttcaggccatctggatatatacgtgcaggtcacaggggatatgatggtttagcttgggctcagaggcctgacaaggatgttactcaggttactagttcctgcaactggatggatgatggtgttattcagtgtaattggaaataaagatgttacaagcaaatttgtggaaaattaatgttgagcccagctttggacatattgagattgtaaactctgagggacatattaccctattaggtagctggatattacgatttgggttccaggagagagattagggaattattaacatatgtatgttaattaaagccacagaagtgaagataactcagggaggaggtataaaatgagttcagacactgcacaagtctgaaccctgaagacaccaacattagaagtgaccagagaacagtggaaagtgtttcaaggtacccaagaggtgaactaaaggctgaaagaaaacaatgtaatttcaagaaggagggagtggtcagtagtttcaatgcccattaaggtcaaatcaaacaaggaaaaaaatcatgaccattggttgacaaagaagagctcaattcctttctactctattccccacctcctgccctgggagataaattctggcaaagtaaggagaacaggagctagattatttctttcccagcattctgttgtggatgatttaaaacatacagaaaaatgaaatgaataatacaatgaacacatgtatatcatccatctagattcaactgtcattgacatcgtaccttatttgctttatctaaccatctattcgtatactttttttggttgaaccatgttaagttgcagagatcatgacccttcaaccccacattctaagtcgacatctaaagccagattaaaatgaataaaggagcacacaggtggtaagtagataaaacagtgaatggaaattttgctttcaagaaatttgactgtaaaagagaaagctgctggaggagaacctcactcagttcaaggaagtttgtctattttgttattttgggtttttttttttgtttcttaaaatgtatgactccatatttttgtttattattaatattaggcgggagagcctagagcaagtttaactgctgatgggaaggagcgattggtgggagagaggctgaagggaagaaaggaagtacagaacactgagtgatgggaggggaggcttactgagctgggtgggaggactagcctgggagcagggaggaccaactctgcccagagggaagagggcaggaggagaggagagtataaatgcagatggagactgggtacagtggctcatgcctgtaatcccagcactttgggaggctgaggcgggcaggtcacttgaaatcaagagttcaagactaacctggccaacatgtcaaaaccccgtctctactaaaaatacaaaaattagccagttgtggtaacgcatgtctataatcccagctactcaggaggctgaggcaggagaatcacatgaacccgggaggtggagattacagtgagccgagatggcaccactgcactccagcctgggcaacggagtgagactccatctctaaataaataaataagtaaataaatgcagatggatgggagtctggggcagggggctgcaggggatttcatctaaagactttccctttttcgggaaccaggtggtgaagccataagggcaaggctgggaatggggacttgagggtcaaaggggtttcaaatacaatgaagaaagccaaccaggccaggcgcggtggctcacgcctgtaatcctagcactttgggaggctgaggcaggcatatcacctaaggttgggagtttgagaccagcctgaccaacatggagaaaccccgtctctactaaaaatacaaaaattagccaggtgtggtggtgtatgcctgtaatcccagctacttgggaggctgaggcaggagaattgcttgaacccaggagacggaggttgcagtgagccgagatcacgccattacactccagcctgggcaataagagtgaaactccatctgaaaaaaaaaaaaaaaaaagccacccaccactggcaggccagtggcattggagaccagtgggacaagagggccaaggatgtgagagcagttggagggatagacacaggggttgcgggggagggtgctaggaggaagtagagataagagaaggttgatgggaaggaataaatcaagtattggctctggaaaggcaggtgaggattaagatgcctagggtcagtgagaagagggtatatgagatttctcaggaggctgcagtctaattgtggcagtgggattggagctgaagagggcatctctcacctctctatcaactccactgaccatctagtcccttgcccagagactaggggtaggcttggtctcctgtccctgcccttctttccctctagaggccttgtctctgagcagtgaagaggaaaccggagcatccctccctgccagtgtccggttaccaagttttgggggcgggccatctggtgactgtgacaggagccccagcgccctggccagctcagtccattcctggagaagaacctgatgcagcgattcctgcagctcccgggggccgtggtgaggcctggggtcagaggggcctgcggagctgatcaagaggctgctagccctgtgctggctcccgaaggtgggcccccactccggtaccaggccttggagcctgaggagcttcggtggctgcaggcccaggaggaagacacgaccccagaagcatctctggaaggaccttgcccagaggccagccagagccagagccagccactacggtatagaggaacccacaggaaccccctacccacacagccaggaaggccagggatgggcagttgcactctcagcccagacctcttccggtcccacctcctctgatggaggcttaggctggcatttagggtccaggctgggcggagaaggtggtcaggggcaccgtatgggggctgagggtatgagtgaggagagatgaggggcttaactccctggaggctctgaggggaggaggatagtaaaatatttgagggttgaggtcccaccttgacctctttctccccacaggcccccactggagtgggctctggacgaggtttggggacaggatacagcacagacagggtttggccagccactgcctgccagtggactggaacttaggtggtaagaggtgacagcgaggtgtatatcaagggaggtgagcatgactgacccccagtgccatgccaggccccctggctggctccagccacccccagaagagtcccttaggctaggtcagactaggggtcaggtcagagtgagtgcagcagcgtaaggggatctgactatgggagataatgtttcatggccttagggtgttgtgccttagtccctgcctctgcctcttgggaacagaagttggtgggagtgaggacgagaggcccagggcggtctcacctcaggtggtggctgcggtctgtgtcagtgcatattctgtgtcagtgcatattcgacagtcaatcttacctgtgctggctgctttaggcccagtggtcctgccccctttcattccccttctcctgcaggggcctggaatgtactcactaggctgggtggggaggatgccctggggtgtgtgcatttgacaggcgcatgtggcatttgtgggtgtggtgaggaagggaatacccagagttaaaggagattgggcaaacttggccctccttccacggaagcccagggaaaagccatcccagggtgactcctcagaagatcagaggacccttggggctggatatatttgatcttagaagcctacatttatcatcaaaaatctcaactaggagtccactgaccattttggtgaatgagactggagaggccaagtttggtccaagttatctgtgtattagatgtgatgcggcatgtgtgtgtgtgtgtagggggacgtgtgtggggtgtgtgtgtctctatgagggtgtgggggagcggggagaggtcttgtgatatatgtctgtaggggacatgtatgggatatgtgtgtctataagagggtgtgggagagtggggagaggtctcctggtggtatatgtctggggggtttgtaggtgtgtaggtgagttgtgtgggtggtttatgtgtgtagagtttttctgtgggaggtgtctgtatgtgggggagtgtgtttctctgggcgttgtgtaggcaggattttgtgggtgtgcgtgggtttatgtatggattctactagtgtctgcgggacctgtaggtatgtttgtatgagctgtccgtgaggtgtaggtatgtcgggggacatgggagtgtctgaggtatatgtgggtggtatcaatgtgtagttgtctgtggggtgtgcgtatgaaggatcctgacgtggagtgttgtgcattcatatctcagggaagctggtgcccagctctgtcatttttcctaggccctcggtgctgcccacgcctacccagctcaatggtctgtacctatgaccatgcccctggtgtcctgagctcagcctcctacccactaagaaactcaacagtctggtctgtgtttggcagggtaagagggtgattgtcttctggccctggcctgaccctggaagagtagaaggtgtcctctgatttggggggcatccccccaggtgagggagtttcagataacatgatggggctggatattttcttctgtcctcacatgacagatagcgagggcctcagataatgctggaaggcatcatctttctattttgctttccatcaaaaatctctttgggaaagacagtttctaacattcttgggatagtgacttcttagtgcccctcttcttgtctgacgtcaggtactcacgcatttctgcagccctgtgactaagttgcgtgttctgtctggttcttctcttcctctcagcattcatcacttgtttctcagcattagcagcagtcatttgccactttatgattgttatcatgctctttcctctcctaacagtgctatccccaatttctgattttctgtcatttctaaatgttgcatgtctgtgactaactttgcacacattgattttttttttattttttatttttgagatggagtctcgttctgttgcccaggctggagtgcagtggcgcgatcttggctcactgcaagctccacctcctgggttcacgccattctcctgcctcagcctactgagtagctaggactacagacgcccgccaccacacccggctaattttttttaaattttttagtagagacggggtttcaccatgttagccaggatggtctcgatctcctggccttgtgatccgcctgccttggcctcccaaagtgctgggattacaggcgtgagccaccgtgcccggcctgatttttaatttttatcactgtgatatttctcaagctgggttcttgtgcctgggtcaaagctgtgggttatcagagtgtcatctgggaaattagtgtgtgtgagtccccacacacagctgctcaccacattttggaattgtcttggcaacatatgagtgcatcagtttcacacaattctatcagctatatatagacacatttttttcatgggtttattaacaattctctgatcacttcgtgatcaccagttctgcatcctctgagtatggttagccacattgttcactgcacaagggcatctggccaaggaataccagcccatgctccacacacagaatggggagcaacagctcagggctgtgtctatctgtaggggcatgcagattgaaaatgggcttgtagcagccctgacagtgaatgctgcaaagagaccttatacatgtatatcagttccttttttaaatttttttgagatggagtctcactctgtcacccaggctggagtgcagtggcgcgatctcggctcactgcaatctccgcctcctgggttcaagcgattctcgttcctcagcctcctgagtagctgggattacaggtgtgtgccaccatgcccggctaatttttgtaattttagtagggatggggtttcaccatgttggccaggctaatctcgaactcctgaccttaagtgatctgcccaccttggcctccaaaagtgctggaattacaagcgtgagccaccacacctggcctctatttcgaatattaaactttaatttaccatatcccaaatatttttccttttgttgctattatgggctgaattgtgtccctccaaaatgcatatgttgaagttctagcccccagtacctcagaatgttacctttgaggtgattaagttaaaatgaggttattaaggggggccctaatccaatatgactgatttctttataagaagaggaaatttggatataggcacgcagaaggaagaccatgtgaagacagagaagatggttgtaagagacagaaaaacccaaagtgtgtttctcctactctcatacacaccgctcaccagagagtgcttcacctctggccacaaaaatgggtggagatttctccccaccaacaacctgttctccagcagacactaactgggtgttctctaattcaagtcaatctagtgttagattttttaggttaagggctcagtgccacaagactgctctctgcttcagatgccaattccaagtggtaagttgtcagctatacttctgaccaactggctataaatcaggggttcccatgccaccctccttgggttcaactctgtgagtggctcacagaactcagggaaactttagttatatttacccatttattataaagggtagagacaaacaccagatgaagagatgcatagggagaggtatggaaggaggggtgcagagctcccatgccctctccaggcaccacaccctccaggcaccttcacatgttccacagtctggaagctctcgaaaccctatcctcttgggtttttatgaaggcttcatgattgatcgcatctttggccatgtgatcaactcaaccatcagccccactccccattccccagaggtcaaatagtgggattgaaagtttcaaccctcagctgggcacagcagctcacgcctataatcccagcacttttggaggccaaggcgggtggatcacttgaggtcaggagttcgagaccagcctgaccaacatgatgaaacccatctctattaaaaatacaaaaatttgccaggtgtggtggtgggcaactgtagtcccagctatttggaaggctgaggcaggagaattgcttcaacccagaaggtggaggctgcagtgagccgagattgcctcactgcaccactccagcctgggcgacagagcaagactcagtgtcaaaaaaaaaaaaaaaaaaagaaagaaagaaaaaaagttccaaccatctgataacaaaagatgcttctatcacccaggaaattccaagggatttccatgtcagttgttcctctcactcaggaagttataaaggtcttaggatctctgcgtgaggaactgggtggaagaccaaatattagaacagaagttctcctagcatccctattgtcaagagttttaggagctctgtctcagaaatggggtatagagaccaaatatatatttctttacaatatcacaagaatcatctacaagccaaagaaagaggctatagaagaaaccaaccctgctgacactttaatctcagccttccagcctccagaactgtgagcaaataaatttatgttgtttaagccaccatctgtagtacttcttgtttttttttttttttagagacaggttcttgctctgttgcctaggctggagtgcagtagcacaatcatagctcactgcagcctccaacatcttggtgcaagcgatcctcccacttcagcctcctgagtagctgtgactacaggcatgtgccaccatgcctggctaattttttttatttttgtagaaacaggatctgactatgttgtccaggctggtcccaactcctgagctcaagcaatccttctgcctcagtctcccaaagtgctgggattacaagtgtgagccaccatgcctggcctgtggttctttgttatggtggttctaggaagctagtatagttgccttatttttctcataaatttagtttttagataccaaagtttaaaaattaaacctaggcctggcacagtggctcacacttgtaatcccagcactttgggaggccgaaggaggcaaatcacttgagtccaggagtttgagaccagcctggtcaacatggcgaaaccccaactctactaaaaatacaaaaaatttgccaggcatggtggtgcacacctgtaatctcagctatttaggaggctgaggcatgagaatcacttgaacccaggaggttgaggctgcagtgagccgagattgcgccactgcactccagcctgggcaacagagcgagacttcgtctcaaacagaaaaacgaaaaaaaggcctgggcgcagtggctcacacctgtaatcccagcactttgggaggctgaggtgggcggatcaactgaggtcgggagtttgagaccagcctgaccaacatggagaaacctcatctctactaaaaatacaaaaattagctgggcatggtggcgcatgcctgtaatcccagctattctggaggctgaggcaggagaattgcttgaacccaggaggtggaggttgcagtgagctgagatggcaccattgcactccagcctgggcaacaagaacgaaactctgtctcaaaaaacaaaaacgtaccaattaaacctagccatattgttgctgctaataattttatgaccttaataaaatcttcccttccttcttttgtatttaaaaataattaactgttaagcaaatgcgggatttattttggggtgaaatatgtatacaagttaaattatttgctgctggccaggtgtggtggctcacacctgtaatctcagcgctttgggaggatgaggcgggaagatcacttgaggtcaggagtttgagaccagcctgaccaacatggtgaaaccctgtctctactaaaaatacaaaaattacccgagcgtggtggtgcatgcctgtaatcccagctacttgggaggctgaggcaggagaatcacttgaacccaggaggcagaggtttcagtgacccgagatcgtgccattgcactccagcctgggcaatgagagcaaaattccatctaaaaaaaaaaaaagtgctgcaaagcagttgtcccaatagcatttatttaagtggggcgggggcgggggggtgggggcggggggagattcttattggttcgtaatttatcaagttagaccttttatgaaattccccccatgacctttgaccttctgtttttaacctggtaccaaacagcttttatcatcgtctcgtggtgtttatgttttgaagtccaatagggtgagttgtctatgattgtttccttcttttcccaaaaatattctttggagttcttacctactgattttttttttccagatgaattttgctgtcacttaagtttgacaaaatgttccctttgaaatttcaaatttttgaaatgaagtatgagatctaaaaaaaaaaagaaacctgtgtattggctcagcattacccttattcctctcagccaagtgcaagggatcacttactcaaatctttattcatcccactagagtttaatgacttccttgaatggctgttcaatgttcagtgacaggtctggcttttgttgtgaggccatctatggagtctctgggacccttccagtccctggaatcagtttggtctgagaggtcaggacttggaaacatactggaggcagggcaagggcaccctgctcttgttttggcatctacctcttttccgctggtccttcttatccatccaactagtccttttccctgagccaggtccatactttcccaccccaaacccttcctcttgtttcctggctctctgtttctggctacattcatttcctacactcctgtatcaaaagtaccacaattgcttctcgttcccacagtgcagtgcggctgagcgcctcagagcccgcggggacgctgcggggggattgcggggagggggcgttgggaggtgccgatgttgggctgggcggatgagcgcatctgcgtggtgagccttccaacgtgcgcgagaaggacgtggaagaccttttctacaagtacggccggatccgcaagatcaagcttaagaatgggcactgccttgtgcccttcgccttggtgcgctttgaggacccccgagatgcagaggatgctatttatggaagaaatagttatgattatggccagtgtcggcttcgtgtggagttctccaggacttacgaagtcggggtgggtggccccgtggtgggaggaatgggccttctgcaagaagatctgatttccgagttcttgtttcaggacttcctcaggcagctggcaggacctgaaggatcacatgcgagaagttggggatgtctgttatgccgatgtgcagaaggacggtgtggggatggttgagtatctcagaaaagaagacatggaatatgccctgcataaattggatgacactaaattccactctcatgatagtgaaacttcctacatctgagtttatcctgagagaagcaccagctatggctactcacagtctcggtttgggtcaaggggccgtgactctccatactaaagccggggttccccacaccacttctctcctttcaggccctactgagacaggtgatgggaattttttctttattttttaggttaactgagctgctttgtgctcagaatctgcattccagattgaggatttagcgtcttaggaaattattttaattttttttttttaaagaagaaaaaaaaactacatactttctaccagggccatattagcagtgaaacattttaaactgcagaaattgtggttttggttcagaaacaagttgtatatttttcactcctgaatatgggtaaaaaatcagttccgtctttgtgggttgctctgctatggagatcaacagttactgtgactgagttggcccattctgcttaaaaatatgttttaaacgtttaagaaaaatgctcatcatcactggccatcagagaaatgcaaatcaaaaccacaatgaggtaccatctcacaccagttagaatggcaatcattaaaagtcaggaaacaacaggtgctggagaggatgtggagaaatagaaacatttttacactgttggtgggagtgtaaactagttcacccattgtggaagacagtgtggcgattcctcaaggatctagaactagaaataccatttgacccagtgatcccgttattgggtatatacccaaaggattgtaaatcattctactataaagacacatgcacacgtatgtttattgcagcactgttcacaatagcaaagacttggaaccaacccaaatgtccatcagtgatagactggattaagaacatgtggcatggctgggtgcggtggctcatgcctgtaatcccagcgtggctcatgcctgtaatcccagcactttgggaggccaagacgggtagatcacgaggtcaggagatcgagaccatcctggctaacacggtgaaaccccgtctctactaaaaatacaaacaattagctgggcgtggtggtggcgggtacctgtagtcccagctactcggtaggctgaggcaggagaatggcatgaacccaggaggtggagcttgcagtgagccgagattgcgccactgcactccagcctgggcgacagagcgagactccatctcacaaaaaaaaaaaaaaaaaaaaaaaaaaagaagaagaaaatgtggcacatatacaccatggaatactatgcaaccataaaaaaggatgagttcgtgtcctttgtagggacatggatgaagctggaaaccatcattctgagcaaactactgcaaggacagaaaaccaaacactgcaggttctcactcataggtgggaattgaacaatgagaacacttgaacacggggtggggaacatcacacactggggcctgttgtggcgttgggggaggagggagggatagcattaggaggaatacctaatgtaaatgacgaattaatgggtgcagcacaccaacatggcacatgtatacatatgtaacaaagctgcacgttgtgcacatgtaccctagaacttaaaagtataattaaaaaaaaaaagtttagtaattgaaaaaaaaaagtacaacaattgggttggttggaacagcagaaatgaattgtctcacagctctggaggccaaaagtctgaactcaaggtgtcggcaggaccatgctccctctgaaacccatagggaaatccttctttgccccttctagcttctggttgtttgctggcagtctctggcattccctggcttgtagacgcatctttccaatcgtctgccttcacatggtagtctccctgtgtctgtctctttaagtggctgtcttttgttttttgtgtttttttaatttcaatttaatctattttttgtagacacattgtttcaccatgttgccaggctggtctcgaactccagggctcaagtgatcctcccgtctcagcttcccaaagtgctgggattacaggcgtgagccgccacacccagcccacatggctgtcttcttatgggaaaccagacatgggattagagacccactctattagagtaggattgcatttaactaattacatctgcaacaactctatttccaaataaggttacattctgaggtactaggggttaagacttaaatatatcctttttaggaaggacacagttcaacccacaatattagctggccacatgtttcccctgatctgtactttacttgttccccctggctctggtccctcctcgggtcaggtcctgcctgagcctcccctggccatgtcccttctttgtgcctggaccctcctgattaataccccatccccacccttgtgccctcagctgacttcttgtacctcccaccaggcatgatgacctgaaggagatgctggacaccaacaaggattctctcaagctggaggccatgaagaggattgtggcggtaagaggggaaggaggaggcctccctccgggcggggcctgggtggccaagagcagctctccttagctccttgtagaccttccctctagttagtgctgtgcctctcgctttgtccctcttcccctaccttgaccccaccacccagatgattgcccgaggaaagaatgcttcagacctgtttcccgcggtggtgaagaacgtggcctgtaagaacatagaggtgagcactacctggtgagggattgcttgtccccacctcccccaggaccacactcaagcttggggtgaggaaggaaatgatttagcccctgggggcccgacctgctgagaaatgtctctgagccaggagaagacactgtctccatgtccctgaactggatgtggatcaaggtaaaggacccggatacactcaggggtgctctcccccactgggagagtttgtccccatggaccgcagctggctggggagatgacatcccaggggtaggggggtgggcacaggtgcctgctgagaagcgttctgctgagaaacgtgctctccccaaggtgaagaagcttgtctatgtgtacctggtacgctacgctgaggagcagcaagacctggccctgctgtccatctccaccttccaacgtggcctaaaggtcaggggtctcagtttgcctcccagggcctgggcctcgttggcgctgtatcggaggagtaggcctggggagaggccatgagcatgggagcgggctctgcagaccccttcctacctgcctaaaattgggagggtcacagtcagaagaggccagccagaccctcagagagtggaagctgggctcagaaggggcgtaagagatgaagtgggtacccagggcccctgtctctcttcccaggagcctgtggtaatggctgcttctagtatgaaccacttgagcccccggagagtggagagtctctagcaatggagaacccctcaaccctcacccccctttgtgtaaaggtgtgaattgtggtccacagccaggtagatttcaacctttagcagtggcctgaatcccccacaccattctcaccttttgtttcattttgcccaaggcctctagttggatttacatatgttaggtgcatgtataagtctcccccctaagggcttttctggttagtctaagacatcttgagggtaaagacagccatttcaaggccattctctccatattggatttttcagctctgattacaaccattaactcctctatttttgcatacctttatttatttatttatttatgagacaggttctcactgtgttgcccaggctggagtgcagtggtgcaatcatggctcactggagcctcgacttccctgagctcaggtgattctcccacctctgtctcctgagtagctgcgactactcagcctgcatcaccatgctcggctaatttttttgtagtttttgtagagatggggtttcaccctgttgcctatgctggtcttggactcctgggctcaagtggcctcagcttcccaaagtgctgggattacagggatgagctaatactcctagcctggatacttttagttcaaatttctgtgagagagattgtgaaaggtccagctcatcttttcatatccagaagttctgtaggttgctgggtagacaggattgctgctcaaatccagggcccaccccttgtccaatctgctatggccagcaagaggggttgacagtcggcttctttggggtgagagtagaaagcatggtcacttgaatatacaattcattcatttagtaaatacttgggtgtctctatgccacacattgtgctagatttctttttataagtcaaaaccatggaatccgtcttagattggcaagtaatcttttggtttgagtaagggttaagtataaaaactaatctgaaattgttgtacagattttcacctatagtctctaccaactgaccctgtcccccttttagaaaaccagagctcatttagttcaactcaatgtgataatttctttctgcaaagtgccaaatagtattttaggttttgtaggccttatagtctcaactatgcaactactcaattttgcccttatggtgcaaatgcagccattgacaagtgggcgtggccgtgttccaataaatctatataaaaaacaggcaatagacagattttatccaagggctgtagcatgccagcctttgctctagaacatgtctaacaggtcatcttttctgatagggacctcactccttcataaggcaacttgctccatctcaagacaactaccactatttggggtgttttttaaaccattctcttttgttgaaacctccacaactataatttttaaaaattgatttcaggctgggtgtggtggctcatgcctgtaatcccagcactttgggaggccgaagcaggcaaatcacaaggtcaggagttcaagaccagcctggccaacatggtgaaactccatctctactaaaaatacaaaaaattagcttggcatggtggcgggtgcccataatcccagctactcaggaggctgacgcaggagaatggcttgaaccc

SEQ ID NO: 10755 - DNA, 532 bp, Homo sapiens
agtcgagtgtaatgggggcagtgggagcagggagaggacctagtctctggcgccggagagaaggaagacaggagcgtgaggcatgatgacctgaaggagatgctggacaccaacaaggattctctcaagctggaggccatgaagaggattgtggcgatgattgcccgaggaaagaatgcttcagacctgtttcccgcggtggtgaagaacgtggcctgtaagaacatagaggtgaagaagcttgtctatgtgtacctggtacgctacgctgaggagcagcaagacctggccctgctgtccatctccaccttccaacgtggcctaaaggctgggtgtggtggctcatgcctgtaatcccagcactttgggaggccgaagcaggcaaatcacaaggtcaggagttcaagaccagcctggccaacatggtgaaactccatctctactaaaaatacaaaaaattagcttggcatggtggcgggtgcccataatcccagctactcaggaggctgacgcaggagaatggcttgaaccc

SEQ ID NO: 10756 - DNA, 3729 bp, Homo sapiens
gtgcctttaagacctcagcgcgcggccctgattgagaaatccgcgcgcagcctccgccgctgcacactgcagcctctgctgaacccctgccgcgccgccgccttcgccagcccggaccggaccggcccgccttcccttcctccgctccagccggcctccggccccgcaacctcctcctcggcgaagtctccctggccgccccatgtcggccgcccccgcctacagcgaagacaagggcggctccgctggccccggggagcccgagtacggccacgaccccgcgagcggcggcatcttctcctccgactacaagcggcatgatgacctgaaggagatgctggacaccaacaaggattctctcaagctggaggccatgaagaggattgtggcgatgattgcccgaggaaagaatgcttcagacctgtttcccgcggtggtgaagaacgtggcctgtaagaacatagaggtgaagaagcttgtctatgtgtacctggtacgctacgctgaggagcagcaagacctggccctgctgtccatctccaccttccaacgtggcctaaaggatcccaaccagctgattcgtgccagtgccctccgtgtcctctctagcatccgtgtgcccatcatagtgcccatcatgatgctagctatcaaggaagccgcctcggacatgtcaccctatgtgcggaaaacagctgcccacgccatccctaaactctacagtttggactctgaccagaaggatcagctgatagaagtcattgagaagcttctggctgacaagaccacgctggtggcgggcagtgtggtgatggcctttgaggaggtctgcccggagcgcatcgacctgattcacaaaaactaccggaaactctgtaacctgctgatcgacgtggaggagtggggccaggtggtcatcatcagcatgctcacccgctacgcccgcacgcagttcctgagccccacccagaacgaatccctactagaggagaacgcggaaaaagccttctacggctcagaggaggacgaggccaagggcgcggggtctgaggagacggccgccgcggccgccccctcccgaaagccctatgtcatggaccccgaccaccggctgctgctgcgcaacaccaaacccctgctgcagagccgcagcgccgcggtggtgatggcggtggcgcagctctacttccacctggcgcccaaggcggaagtgggcgtcatcgccaaggcgctggtgcgcctgctgcgcagccacagtgaggtgcagtacgttgtgctccagaacgtggccaccatgtccatcaagcgccggggtatgtttgagccctacctgaagagcttctacatcaggtccaccgaccccacccagattaagatcctgaagctggaagtgctgaccaacctggccaatgagaccaacattcctactgtcctacgggaattccagacctatattcgcagcatggacaaggactttgtggcagccacaatccaggccattggacgctgtgcaactaacatcggccgagtccgtgacacctgcctcaatggcctggtgcagctgctgtccaaccgtgatgagcttgtggttgcagagtcagtggtcgtcattaagaaattgctacagatgcagccagcacaacatggagagatcatcaaacacttggcaaagcttacagacaacatccaggtgcccatggcccgagccagcatcctgtggctcatcggagagtactgtgagcatgtccccaggattgcacctgatgtcttaagaaaaatggccaagtcattcacagcagaggaggatattgtcaagctgcaggtcatcaacctggcagccaagctctacctgaccaactctaaacagaccaagctgctgacccagtatgtgctgagtctggccaaatatgaccagaactatgatattcgcgaccgggcgcgcttcacccggcagctcatcgtcccttccgagcagggtggggccctcagccgccatgccaagaagctcttcctggcacccaaaccagctccagtcttggagtcatccttcaaagaccgggaccacttccagctgggctcactgtcccacctgcttaatgccaaggccacaggctaccaggagctcccagactggccggaggaagccccagacccatctgtgcgcaacgtggaggtacctgaatggaccaagtgctcaaatcgggagaagagaaaggagaaggaaaaacccttctactcggactctgagggggagtcaggccccacggagtccgcagacagtgaccctgagtctgagagtgaatcggacagtaagagcagcagtgagagcggctctggggagtccagcagtgagtccgacaatgaagaccaggatgaggatgaggagaaagggagaggcagtgagagtgaacagagtgaggaggatggtaagaggaagacaaagaagaaggtgccagagagaaaaggagaagcgtcatcctctgatgagggcagcgattccagcagtagctcatcagagtccgagatgacatcggagtccgaggaggagcagttagaacctgcctcctggagcaggaaaacacctcccagcagcaaaagtgctcctgcaaccaaggagatctccctgcttgatctagaggatttcacccctcccagtgtccagcctgtgtctcccccagcaattgtgtctaccagtctggctgctgacctggagggcctgacactcacagactccaccctggtaccgtcgcttctgagtccagtatcgggtgttgggcggcaggagctgctgcaccgggtagctggcgaggggctggctgtggactacaccttcagccgccaacctttctccggggatccccacatggtgtccgtgcacatccacttctccaacagctctgatacccccatcaagggcctgcatgtgggcactcccaaactgcctgctggcatcagcatccaagaatttcccgaaattgagtccctggcacctggagaatctgccactgctgtaatgggcattaatttctgtgactcaacccaggcagccaacttccagctgtgcacccagacccgacagttctacgtctccattcagccacctgttggggagctgatggcccctgtgttcatgagtgaaaatgagtttaagaaggaacagggaaagctgatgggcatgaatgagatcacagagaaactcatgctgccagacacctgtcggagtgaccacattgtggtgcagaaagtgactgccactgccaacctgggtcgtgttccttgtgggacatctgatgagtacaggtttgcagggaggacactgactggtggaagcctcgttctgctgaccctggatgcccggccagctggagctgcccagctgactgtcaacagcgagaaaatggtgattggcaccatgctggtaaaggatgtgatacaggctctgacccagtgacttccaaatgctgtgacctgtttggctcccatctatacctccccatgacacctaggctgtcagtctctctcatctttctctctctctctcatcatcctcctcatgccagatagcattcagggtgtcctctctccctctggaggaccaagccctcccctaatgccctccccatggattccttagtgatctgtgcagagagagatggcagccactcccttcagtcctcccagatttctgtagctatttatgtagcaggctcaataaaatgtcttctctct

SEQ ID NO: 10757 - DNA, 3683 bp, Homo sapiens
tcagtccattcctggagaagaacctgatgcagcgattcctgcagctcccgggggccgtggtgaggcctggggtcagaggggcctgcggagctgatcaagaggctgctagccctgtgctggctcccgaaggtgggcccccactccggtaccaggccttggagcctgaggagcttcggtggctgcaggcccaggaggaagacacgaccccagaagcatctctggaaggaccttgcccagaggccagccagagccagagccagccactacggcatgatgacctgaaggagatgctggacaccaacaaggattctctcaagctggaggccatgaagaggattgtggcgatgattgcccgaggaaagaatgcttcagacctgtttcccgcggtggtgaagaacgtggcctgtaagaacatagaggtgaagaagcttgtctatgtgtacctggtacgctacgctgaggagcagcaagacctggccctgctgtccatctccaccttccaacgtggcctaaaggatcccaaccagctgattcgtgccagtgccctccgtgtcctctctagcatccgtgtgcccatcatagtgcccatcatgatgctagctatcaaggaagccgcctcggacatgtcaccctatgtgcggaaaacagctgcccacgccatccctaaactctacagtttggactctgaccagaaggatcagctgatagaagtcattgagaagcttctggctgacaagaccacgctggtggcgggcagtgtggtgatggcctttgaggaggtctgcccggagcgcatcgacctgattcacaaaaactaccggaaactctgtaacctgctgatcgacgtggaggagtggggccaggtggtcatcatcagcatgctcacccgctacgcccgcacgcagttcctgagccccacccagaacgaatccctactagaggagaacgcggaaaaagccttctacggctcagaggaggacgaggccaagggcgcggggtctgaggagacggccgccgcggccgccccctcccgaaagccctatgtcatggaccccgaccaccggctgctgctgcgcaacaccaaacccctgctgcagagccgcagcgccgcggtggtgatggcggtggcgcagctctacttccacctggcgcccaaggcggaagtgggcgtcatcgccaaggcgctggtgcgcctgctgcgcagccacagtgaggtgcagtacgttgtgctccagaacgtggccaccatgtccatcaagcgccggggtatgtttgagccctacctgaagagcttctacatcaggtccaccgaccccacccagattaagatcctgaagctggaagtgctgaccaacctggccaatgagaccaacattcctactgtcctacgggaattccagacctatattcgcagcatggacaaggactttgtggcagccacaatccaggccattggacgctgtgcaactaacatcggccgagtccgtgacacctgcctcaatggcctggtgcagctgctgtccaaccgtgatgagcttgtggttgcagagtcagtggtcgtcattaagaaattgctacagatgcagccagcacaacatggagagatcatcaaacacttggcaaagcttacagacaacatccaggtgcccatggcccgagccagcatcctgtggctcatcggagagtactgtgagcatgtccccaggattgcacctgatgtcttaagaaaaatggccaagtcattcacagcagaggaggatattgtcaagctgcaggtcatcaacctggcagccaagctctacctgaccaactctaaacagaccaagctgctgacccagtatgtgctgagtctggccaaatatgaccagaactatgatattcgcgaccgggcgcgcttcacccggcagctcatcgtcccttccgagcagggtggggccctcagccgccatgccaagaagctcttcctggcacccaaaccagctccagtcttggagtcatccttcaaagaccgggaccacttccagctgggctcactgtcccacctgcttaatgccaaggccacaggctaccaggagctcccagactggccggaggaagccccagacccatctgtgcgcaacgtggaggtacctgaatggaccaagtgctcaaatcgggagaagagaaaggagaaggaaaaacccttctactcggactctgagggggagtcaggccccacggagtccgcagacagtgaccctgagtctgagagtgaatcggacagtaagagcagcagtgagagcggctctggggagtccagcagtgagtccgacaatgaagaccaggatgaggatgaggagaaagggagaggcagtgagagtgaacagagtgaggaggatggtaagaggaagacaaagaagaaggtgccagagagaaaaggagaagcgtcatcctctgatgagggcagcgattccagcagtagctcatcagagtccgagatgacatcggagtccgaggaggagcagttagaacctgcctcctggagcaggaaaacacctcccagcagcaaaagtgctcctgcaaccaaggagatctccctgcttgatctagaggatttcacccctcccagtgtccagcctgtgtctcccccagcaattgtgtctaccagtctggctgctgacctggagggcctgacactcacagactccaccctggtaccgtcgcttctgagtccagtatcgggtgttgggcggcaggagctgctgcaccgggtagctggcgaggggctggctgtggactacaccttcagccgccaacctttctccggggatccccacatggtgtccgtgcacatccacttctccaacagctctgatacccccatcaagggcctgcatgtgggcactcccaaactgcctgctggcatcagcatccaagaatttcccgaaattgagtccctggcacctggagaatctgccactgctgtaatgggcattaatttctgtgactcaacccaggcagccaacttccagctgtgcacccagacccgacagttctacgtctccattcagccacctgttggggagctgatggcccctgtgttcatgagtgaaaatgagtttaagaaggaacagggaaagctgatgggcatgaatgagatcacagagaaactcatgctgccagacacctgtcggagtgaccacattgtggtgcagaaagtgactgccactgccaacctgggtcgtgttccttgtgggacatctgatgagtacaggtttgcagggaggacactgactggtggaagcctcgttctgctgaccctggatgcccggccagctggagctgcccagctgactgtcaacagcgagaaaatggtgattggcaccatgctggtaaaggatgtgatacaggctctgacccagtgacttccaaatgctgtgacctgtttggctcccatctatacctccccatgacacctaggctgtcagtctctctcatctttctctctctctctcatcatcctcctcatgccagatagcattcagggtgtcctctctccctctggaggaccaagccctcccctaatgccctccccatggattccttagtgatctgtgcagagagagatggcagccactcccttcagtcctcccagatttctgtagctatttatgtagcaggctcaataaaatgtcttctctcta

SEQ ID NO: 10758 - DNA, 3714 bp, Homo sapiens
gagaaatccgcgcgcagcctccgccgctgcacactgcagcctctgctgaacccctgccgcgccgccgccttcgccagcccggaccggaccggcccgccttcccttcctccgctccagccggcctccggccccgcaacctcctcctcggcgaagtctccctggccgccccatgtcggccgcccccgcctacagcgaagacaagggcggctccgctggccccggggagcccgagtacggccacgaccccgcgagcggcggcatcttctcctccgactacaagcggcatgatgacctgaaggagatgctggacaccaacaaggattctctcaagctggaggccatgaagaggattgtggcgatgattgcccgaggaaagaatgcttcagacctgtttcccgcggtggtgaagaacgtggcctgtaagaacatagaggtgaagaagcttgtctatgtgtacctggtacgctacgctgaggagcagcaagacctggccctgctgtccatctccaccttccaacgtggcctaaaggatcccaaccagctgattcgtgccagtgccctccgtgtcctctctagcatccgtgtgcccatcatagtgcccatcatgatgctagctatcaaggaagccgcctcggacatgtcaccctatgtgcggaaaacagctgcccacgccatccctaaactctacagtttggactctgaccagaaggatcagctgatagaagtcattgagaagcttctggctgacaagaccacgctggtggcgggcagtgtggtgatggcctttgaggaggtctgcccggagcgcatcgacctgattcacaaaaactaccggaaactctgtaacctgctgatcgacgtggaggagtggggccaggtggtcatcatcagcatgctcacccgctacgcccgcacgcagttcctgagccccacccagaacgaatccctactagaggagaacgcggaaaaagccttctacggctcagaggaggacgaggccaagggcgcggggtctgaggagacggccgccgcggccgccccctcccgaaagccctatgtcatggaccccgaccaccggctgctgctgcgcaacaccaaacccctgctgcagagccgcagcgccgcggtggtgatggcggtggcgcagctctacttccacctggcgcccaaggcggaagtgggcgtcatcgccaaggcgctggtgcgcctgctgcgcagccacagtgaggtgcagtacgttgtgctccagaacgtggccaccatgtccatcaagcgccggggtatgtttgagccctacctgaagagcttctacatcaggtccaccgaccccacccagattaagatcctgaagctggaagtgctgaccaacctggccaatgagaccaacattcctactgtcctacgggaattccagacctatattcgcagcatggacaaggactttgtggcagccacaatccaggccattggacgctgtgcaactaacatcggccgagtccgtgacacctgcctcaatggcctggtgcagctgctgtccaaccgtgatgagcttgtggttgcagagtcagtggtcgtcattaagaaattgctacagatgcagccagcacaacatggagagatcatcaaacacttggcaaagcttacagacaacatccaggtgcccatggcccgagccagcatcctgtggctcatcggagagtactgtgagcatgtccccaggattgcacctgatgtcttaagaaaaatggccaagtcattcacagcagaggaggatattgtcaagctgcaggtcatcaacctggcagccaagctctacctgaccaactctaaacagaccaagctgctgacccagtatgtgctgagtctggccaaatatgaccagaactatgatattcgcgaccgggcgcgcttcacccggcagctcatcgtcccttccgagcagggtggggccctcagccgccatgccaagaagctcttcctggcacccaaaccagctccagtcttggagtcatccttcaaagaccgggaccacttccagctgggctcactgtcccacctgcttaatgccaaggccacaggctaccaggagctcccagactggccggaggaagccccagacccatctgtgcgcaacgtggaggtacctgaatggaccaagtgctcaaatcgggagaagagaaaggagaaggaaaaacccttctactcggactctgagggggagtcaggccccacggagtccgcagacagtgaccctgagtctgagagtgaatcggacagtaagagcagcagtgagagcggctctggggagtccagcagtgagtccgacaatgaagaccaggatgaggatgaggagaaagggagaggcagtgagagtgaacagagtgaggaggatggtaagaggaagacaaagaagaaggtgccagagagaaaaggagaagcgtcatcctctgatgagggcagcgattccagcagtagctcatcagagtccgagatgacatcggagtccgaggaggagcagttagaacctgcctcctggagcaggaaaacacctcccagcagcaaaagtgctcctgcaaccaaggagatctccctgcttgatctagaggatttcacccctcccagtgtccagcctgtgtctcccccagcaattgtgtctaccagtctggctgctgacctggagggcctgacactcacagactccaccctggtaccgtcgcttctgagtccagtatcgggtgttgggcggcaggagctgctgcaccgggtagctggcgaggggctggctgtggactacaccttcagccgccaacctttctccggggatccccacatggtgtccgtgcacatccacttctccaacagctctgatacccccatcaagggcctgcatgtgggcactcccaaactgcctgctggcatcagcatccaagaatttcccgaaattgagtccctggcacctggagaatctgccactgctgtaatgggcattaatttctgtgactcaacccaggcagccaacttccagctgtgcacccagacccgacagttctacgtctccattcagccacctgttggggagctgatggcccctgtgttcatgagtgaaaatgagtttaagaaggaacagggaaagctgatgggcatgaatgagatcacagagaaactcatgctgccagacacctgtcggagtgaccacattgtggtgcagaaagtgactgccactgccaacctgggtcgtgttccttgtgggacatctgatgagtacagctcttcctcaccccttctattcccacctcaggtttgcagggaggacactgactggtggaagcctcgttctgctgaccctggatgcccggccagctggagctgcccagctgactgtcaacagcgagaaaatggtgattggcaccatgctggtaaaggatgtgatacaggctctgacccagtgacttccaaatgctgtgacctgtttggctcccatctatacctccccatgacacctaggctgtcagtctctctcatctttctctctctctctcatcatcctcctcatgccagatagcattcagggtgtcctctctccctctggaggaccaagccctcccctaatgccctccccatggattccttagtgatctgtgcagagagagatggcagccactcccttcagtcctcccagatttctgtagctatttatgtagcaggctcaataaa

SEQ ID NO: 10759 - DNA, 3698 bp, Homo sapiens
cggaccggcccgccttcccttcctccgctccagccggcctccggccccgcaacctcctcctcggcgaagtctccctggccgccccatgtcggccgcccccgcctacagcgaagacaagggcggctccgctggccccggggagcccgagtacggccacgaccccgcgagcggcggcatcttctcctccgactacaagcggcatgatgacctgaaggagatgctggacaccaacaaggattctctcaagctggaggccatgaagaggattgtggcgatgattgcccgaggaaagaatgcttcagacctgtttcccgcggtggtgaagaacgtggcctgtaagaacatagaggtgaagaagcttgtctatgtgtacctggtacgctacgctgaggagcagcaagacctggccctgctgtccatctccaccttccaacgtggcctaaaggttctcactgtgttgcccaggctggagtgcagtggtgcaatcatggctcactggagcctcgacttccctgagctcaggatcccaaccagctgattcgtgccagtgccctccgtgtcctctctagcatccgtgtgcccatcatagtgcccatcatgatgctagctatcaaggaagccgcctcggacatgtcaccctatgtgcggaaaacagctgcccacgccatccctaaactctacagtttggactctgaccagaaggatcagctgatagaagtcattgagaagcttctggctgacaagaccacgctggtggcgggcagtgtggtgatggcctttgaggaggtctgcccggagcgcatcgacctgattcacaaaaactaccggaaactctgtaacctgctgatcgacgtggaggagtggggccaggtggtcatcatcagcatgctcacccgctacgcccgcacgcagttcctgagccccacccagaacgaatccctactagaggagaacgcggaaaaagccttctacggctcagaggaggacgaggccaagggcgcggggtctgaggagacggccgccgcggccgccccctcccgaaagccctatgtcatggaccccgaccaccggctgctgctgcgcaacaccaaacccctgctgcagagccgcagcgccgcggtggtgatggcggtggcgcagctctacttccacctggcgcccaaggcggaagtgggcgtcatcgccaaggcgctggtgcgcctgctgcgcagccacagtgaggtgcagtacgttgtgctccagaacgtggccaccatgtccatcaagcgccggggtatgtttgagccctacctgaagagcttctacatcaggtccaccgaccccacccagattaagatcctgaagctggaagtgctgaccaacctggccaatgagaccaacattcctactgtcctacgggaattccagacctatattcgcagcatggacaaggactttgtggcagccacaatccaggccattggacgctgtgcaactaacatcggccgagtccgtgacacctgcctcaatggcctggtgcagctgctgtccaaccgtgatgagcttgtggttgcagagtcagtggtcgtcattaagaaattgctacagatgcagccagcacaacatggagagatcatcaaacacttggcaaagcttacagacaacatccaggtgcccatggcccgagccagcatcctgtggctcatcggagagtactgtgagcatgtccccaggattgcacctgatgtcttaagaaaaatggccaagtcattcacagcagaggaggatattgtcaagctgcaggtcatcaacctggcagccaagctctacctgaccaactctaaacagaccaagctgctgacccagtatgtgctgagtctggccaaatatgaccagaactatgatattcgcgaccgggcgcgcttcacccggcagctcatcgtcccttccgagcagggtggggccctcagccgccatgccaagaagctcttcctggcacccaaaccagctccagtcttggagtcatccttcaaaggcctgtgctgccctcctccagcagtgcctcaactctgatccagacttctacacactcatgctctgactgttcatccctccctgctgagtccagagcctgactagacgtgcatgctgagcagacagaccgggaccacttccagctgggctcactgtcccacctgcttaatgccaaggccacaggctaccaggagctcccagactggccggaggaagccccagacccatctgtgcgcaacgtggaggtacctgaatggaccaagtgctcaaatcgggagaagagaaaggagaaggaaaaacccttctactcggactctgagggggagtcaggccccacggagtccgcagacagtgaccctgagtctgagagtgaatcggacagtaagagcagcagtgagagcggctctggggagtccagcagtgagtccgacaatgaagaccaggatgaggatgaggagaaagggagaggcagtgagagtgaacagagtgaggaggatggtaagaggaagacaaagaagaaggtgccagagagaaaaggagaagcgtcatcctctgatgagggcagcgattccagcagtagctcatcagagtccgagatgacatcggagtccgaggaggagcagttagaacctgcctcctggagcaggaaaacacctcccagcagcaaaagtgctcctgcaaccaaggagatctccctgcttgatctagaggattgtgagtttgggtggtaaaagtcacaggggaaaggaggcctggggagcatgaattagaacagcccatagggactctggatcgggttcctcaggtcttgtgggagcaggggagcagacagaacatatcttcaggcctgagagggcagcagggctgacctccccaggtctggggttgaggtctaggaatgggtattttgcgagagcctccaggcagccatgtgccccgctgtccatggtgctgaaatgcgtgctccttgatccctaggctccctgctcaacccaagccacctccactttgcctcctcatagtcttatctactcccacagtcacccctcccagtgtccagcctgtgtctcccccagcaattgtgtctaccagtctggctgctgacctggagggcctgacactcacagactccaccctggtaccgtcgagtccctggcacctggagaatctgccactgctgtaatgggcattaatttctgtgactcaacccaggcagccaacttccagctgtgcacccagacccgacagttctacgtctccattcagccacctgttggggagctgatggcccctgtgttcatgagtgaaaatgagtttaagaaggaacagggaaagctgatgggcatgaatgagatcacagagaaactcatgctgccagacacctgtcggagtgaccacattgtggtgcagaaagtgactgccactgccaacctgggtcgtgttccttgtgggacatctgatgagtacaggtttgcagggaggacactgactggtggaagcctcgttctgctgaccctggatgcccggccagctggagctgcccagctgactgtcaacagcgagaaaatggtgattggcaccatgctggtaaaggatgtgatacaggctctgacccagtgacttccaaatgctgtgacctgtttggctcccatctatacctccccatgacacctaggctgtcagtc

SEQ ID NO: 10760 - DNA, 994 bp, Homo sapiens
aggtgtgtctgtccacctgagtgtggccatctgactgtcttggggtccacacactcatttttgttctgtagagcttgtggttgcagagtcagtggtcgtcattaagaaattgctacagatgcagccagcacaacatggagagatcatcaaacacttggcaaagcttacagacaacatccaggtgagggagaagccatattttcactccccacttcaaggtcctccccatgatttcaagactgtataattacatatgctagccttatcaaaagtaacttccaaaccttaggtcttcaggtggaaggagcagagacactggaccatgtgaccctgaccttgttacccctgatttgctttccctttggagaccctcaatgagcacgatggactttactactactcttgttttctctctaaagctctagccaaccatggttgagtgacaaatcttgtgtttttctatcgcactgctaagctgaaacatctaaacaaggcattcccaaagattctggagagtaacatggaaataaagtactgagggtacaatgaatccagaaaatcaatcttttacatcatgactgacttagggtcttgaaagctctatgctaatgaagccctagggaagaggggaaatgctgtctaggaaatgtctaccttttaacctctctctatctcaccacccccaactcccatttccagagaacccataatacaacaggccagcacagatgaggagtgctgtttccctggaagtccacaatcctacccacccactttcccgtatttacccatcttcactcctctcccacaaccacaggtgcccatggcccgagccagcatcctgtggctcatcggagagtactgtgagcatgtccccaggattgcacctgatgtcttaagaaaaatggccaagtcattcacagcagaggaggatattgtcaagctgcaggtcatcaacctggcagccaagctctacctgaccaactctaaacag

SEQ ID NO: 10761 - DNA, 358 bp, Homo sapiens
aggtgtgtctgtccacctgagtgtggccatctgactgtcttggggtccacacactcatttttgttctgtagagcttgtggttgcagagtcagtggtcgtcattaagaaattgctacagatgcagccagcacaacatggagagatcatcaaacacttggcaaagcttacagacaacatccaggtgcccatggcccgagccagcatcctgtggctcatcggagagtactgtgagcatgtccccaggattgcacctgatgtcttaagaaaaatggccaagtcattcacagcagaggaggatattgtcaagctgcaggtcatcaacctggcagccaagctctacctgaccaactctaaacag

SEQ ID NO: 10762 - DNA, 21126 bp, Homo sapiens
tccgccccctcacgcccaccagccgcttccacctctgcccacccgctccacactgaccgtagtcctgccctccgcactggtcctctccccgcaacgacttgccccaccttttcccctcatccgctgacccttgccccaaccgaggggcccggggtgctctgacccgtcctctccgcagtgaggtgcagtacgttgtgctccagaacgtggccaccatgtccatcaagcgccgggtgagcctgcgacggcgggctgtcctcgctgtccgagggccgcttctgcgggcactggaggcgttgtcggggctgggaccggggccggggaaagggaagatggaggaataccctggctgtgcagaggatggggcaggggaggctccaaatacagatagggagcagggcctggatcctgaggggccgctgaggggatgtccagtggaaaaagagctagtcagatctgagatggacgagggaagacttgaggagtggagggcagtggtgaggaggcaaggatcctgggcgctgggtcaggataggaggggtgtctctgggcagcgaggcaggcctggggcttcggtggagctccctagctgcctctcttgtgccagggtatgtttgagccctacctgaagagcttctacatcaggtccaccgaccccacccagattaagatcctgaaggtgagtgagggacagaagtgcatgtgcttcccagccctccccaccccatgtacccactcaaataactcacagtggcccccctggtgcctgcctattcctggggctgagcccaggagcccatgactgccccagctggagctgtttgttcagggagctgggctaaggagggtcagggggagaagggaactgctctttgcctagtacctggtatacacctgctactcttcataaatgaagtaacctgatatcacctcataataatcccaggatgtgtacattatattccttttataaaaatatagactctggccaggcacagtggctcacgcctaatcccagcactttgggaggccgagacaggcagatcgcctgaggtcaggagttcaagaccagcctggccaacatagcaaaacctcgtctcaacgaaaaatacaaaaattagccaggcgtggtggcaggtgcctgtaatcccagctactcgagaggctgaggctagagaattgcctgaacctgggagacagaggttgcagtgagctgagattgtgccattgcactccagcctgggtgacaagagcgaaactccatctcaatctaagaaaaagaaaaaaagactctgggaggtaactgccccaggtcacataattctgctgactccaaggttcacacttttctctcccacccacagtgttatggcccccacacacctgccccctcaggctctcctgcaaacattcacggacaaggaaagtggcgggagcccatacctccatttgattcctgctctgctgcctcattattgagtgatttccttcagcaacagttaatcttcctaacccttgtgaacatccactatgttctaggggtacatgatgagcaaactaatcagggaccctgcctttgtggagcttacagatgtggggaggaggagacattaagcagttaatcacaaggcaaatgtaaaagtccacttacaaaatatggaagaaagtgtggagagctataagggcataaaatagggagacctcatctagtctggtgccagggaagttttcccggaggatatgagacttgagctgaagcctgagagatgaacatgaattatgcagggacagaaatgggaagaactgctccacgcagaggaaacagcatctgcgaagaccctgggttaggaagtggagtgggattggggcctggaagacaagggggacagtgatgggagatgggaggtagacagcaagcagatcattcagggacttacagaccatggtgaatacgatggtctccatcctgaaagcaataggaagctttaagttttcaatgcagtagggaggtgacatggtcatactgtaagcatactgtgtagggaatccacttaagaggcaaactggtcctcttgctttttagacaagtttcataacctgtcaattccctcatcagtgtgaggatgatgcagggctgtcatgaggattgttttctggtctatgaagtgtatttggaatgaaagcacagaaagtccactggccaacccacccattttctgcctctccaaccctccctgcagctggaagtgctgaccaacctggccaatgagaccaacattcctactgtcctacgggaattccaggtacaggccagctcccagccagaagggcctgggagaggggcccatcagatccttgtgccctggtgggtaaacctcctcttatgagcccaaggctggagaaactattatcttacattcccgttccaatgtgtttggctggctttgggccaaggaatcactggattgggggtggagttgtcaccccctttcccaagtcttagtcaccggcatgataagccataaaatgaaaggccacagccttcttgaaggtcaccctcaagcctgcagagtcactgagggatttctttgtcatatcccacagacctatattcgcagcatggacaaggactttgtggcagccacaatccaggccattggacgctgtgcaactaacatcggccgagtccgtgacacctgcctcaatggcctggtgcagctgctgtccaaccgtgatggtcagtgtttccctgagtgtctaaccgtgatgatcagagggtgtctgcctgcaggtctgactctgctggccactggatatccaccagtctgcctagacacaatgtgtatccattggtctgtctgtcttgatcagggcccaagtgttcctacacctctgagggctgctagagaactgaagggggttgagagaaagagccaagggcctggggcactgcaggtgtgtctgtccacctgagtgtggccatctgactgtcttggggtccacacactcatttttgttctgtagagcttgtggttgcagagtcagtggtcgtcattaagaaattgctacagatgcagccagcacaacatggagagatcatcaaacacttggcaaagcttacagacaacatccaggtgagggagaagccatattttcactccccacttcaaggtcctccccatgatttcaagactgtataattacatatgctagccttatcaaaagtaacttccaaaccttaggtcttcaggtggaaggagcagagacactggaccatgtgaccctgaccttgttacccctgatttgctttccctttggagaccctcaatgagcacgatggactttactactactcttgttttctctctaaagctctagccaaccatggttgagtgacaaatcttgtgtttttctatcgcactgctaagctgaaacatctaaacaaggcattcccaaagattctggagagtaacatggaaataaagtactgagggtacaatgaatccagaaaatcaatcttttacatcatgactgacttagggtcttgaaagctctatgctaatgaagccctagggaagaggggaaatgctgtctaggaaatgtctaccttttaacctctctctatctcaccacccccaactcccatttccagagaacccataatacaacaggccagcacagatgaggagtgctgtttccctggaagtccacaatcctacccacccactttcccgtatttacccatcttcactcctctcccacaaccacaggtgcccatggcccgagccagcatcctgtggctcatcggagagtactgtgagcatgtccccaggattgcacctgatgtcttaagaaaaatggccaagtcattcacagcagaggaggatattgtcaagctgcaggtcatcaacctggcagccaagctctacctgaccaactctaaacaggtaaagattaagagatgaccccccagatactctggtccccagaaactccctagacagtattcttttggccctccctaggcagggctgaactctagctcctattttggaaaagaagaatcagggaaggtggctggtctgcccacataaccaatgctaccccagtgcccacaaagaccttgtagtgctggtggtcactgttgaagagactctcctatgaagctgtgacctccagtctgctagtacaagagtcctgtctgccaccttggaactctggggctgtgaagaaccacagttgattgggataagggaagggcccaacagtggcaggtactgatgggagaacatgcatcccagatgtggtctgtgcttctttccaaagcttgacaatgcttggccagtctgtgccaaagataagggggtgagtctctgcttgggcttgggtggtgctggtggccactgtcattcccaaggtgaaaggttataagagatacacagccaaggatgaggctcaactaagttgtagtatcagggtgttcagagcctcctagctgtctggcatctcctgagatggttccaggagattctcctaaaatgaagcataatgtgctgagcttttcaaggtgtcagggacatcaaacaccatgacgatttccacactctcccactcagttaagcaggacagggattggcaaactactgcccataggctgaatttggcctattcctgtttttgtaataaagttttgttggaacacagccctgctcattcatttacaaattacctatggctgcttttgtgctacaacagcagggttaactagttgcaacagactgtattgcccacaaagcctagaatagttattctctggcccttttataaaaagactctgccaatccttgaagcaaaacctctggctaggtggctggggtctacagatttatagcagggatatcccctggagactgtagcatccctgccatgtccactgtgcgtgggagtctttggatggtggcacttatctttttcagtggcttctttgatccattgtggccagagtgagccccagaggctcaaggtgaggtaggcagggccaccaagtgctgtgactgtaatcaggagtcaaaggacagcagcaacatgtggaggcaactgagtctgtataattaaatatgctagccttatcaaaagtaacttccaaaccttaggtcttcaggtggaaggaggagagacactggaccatgtgaccctgagcttgttatcagtgttgtgggcaaagcagattggagagagagaagttagagggggagagagagaagttagagggagaaagagcaccatggggaagcgttcaatcgttgaaaaaatatttgtatacttcctttgttcaggtgggaggaaggagcaagtgggaggaatgtttgaaaagatgaagcagcctgggtggggagccacccaggtaggtgggagtcttgacatgctcagcaatgagccagagtcctaaaccccaggatggtgaggttggcatgttttcataagcctgggcctgtccacatgtcatttcccccaagttgtcactgtgagctacatgtgcatttgttcatttatttaacatatatgtaggtgggagtctgacatgctcagcactgagccagagtcctaaaccccaggatggtgaggttggcatgttttcataagcctgggcctgtccacatgtcatttcccccaagttgttactgtgagctacatgtgcatttgttcatttatttaacatgtaggcctactatttgcctggtactgtgctgcgtcctgaggatatgacaatgagtgagacacatttacaggtctccagatactcacagccaagtaggagaaacaggacaaaaataaacattttaaacacagcagtaacagctgtcatcagggttggcacagcgagctgtgggtatatacagctgaaccctcccctaggaatgacccctgtcagggaacccagagtaggctgttcaggcaaatggacactcacctccagggcgcccttcacctgcaagtgagtttttgcaggccccttagaatggttatttgattcaataaagatttttgtcctccctttctttctcctttcttcccagcctcttctgggagtggtaaagaagggggagtccttggggtactaggagggaggtggtttggatgcgcacatgaccatgcttgcaaaacagtagtgatgcttcccatcctgggaccatgagtggcaatctgcccagctaaaaggccacagtaatctcagtcattctctccaatttggacatgggcccacggcatgccagatcctggcccaggatgaggccaaggaaatgaccaagatgaggcctctgccctgctattgatcagcagataatcagatactagaccagaggccacaaaggcataacatgcaggtggcgggggatgggggggttggtaatcaaagtggctattacatccacctggatatagaccctggggaaactgcctagcaggttagtttgcttttatgtgtcaggtgagatgtgtggcaggagggtctgccaggggcacagtgggatctacaaccctcccatgtgaccgcctttacagtgaatagaagattctgacaaattttgcagaattgcttttaaaaacgtaaactttttttaatatgctaaaggtaatacatgcttatcatagaacatttggaaaactcagaaaattataagtttaaactattaataagtccaccatttagaagaccaccattaattatatatttccttattttttattcctatatatagtcattcagaagttgtacttttgtctattgtccaatattttaaacttttctgcttcttttcaatgctttcatatttaatacttttttttccccattcacatttcaattaaacttttcacttagaattttctccaggctgggttcagtggctcacacctgtaatcccagcactttgggagcccaaggtgggtgggtcatttgaggtcatgaattcaagaccagcctgaccaacatggcaaaaccctgtctctactaaaagtacaaaaaaattagctgggtgtggtggtgcgctgaaatctcagctacttgggaggctgtggcaggagaattgcttgaacccaggaggtggaggttacagtgagctgagatggtaccaccacactccagcctgggccacagagcaagatccatctcaaaaataaataaaaattaaaaagaatttcctccaaatttttttctactttcacatttttaaatcaattgtattagttttctgctacataataaattactataaatttggtggcttcaaacaacacacgtttattttctcagtgtctatgggtcgagaattcaggtatggcttagttggatcttatgcaaggctacaactgaggtgtcagccaaggctgagtttttatctggaggctgtactggggaaaggtccacttccaagtcacatggtgccacgatccacttccttgcagttgtaggattgtggccctggcttcttgctggctgtcagctgggggctgcccttgccttctagaggccgtccttagctcattgccataggggcctcccaacacggatgcttaatttctccaaagccacaagggagaaagtctctagagccagtctgctagcaagaccgtcttctttttattttttaatttttatgggtacatagtaggtgtatatatttatggggtatgtgagatattttgatacaggcatataatgcataacaatcacatcagggaatggggtatccatcctctcaagcatttatcttttgtgttacaaacaatcaaattacactctcttagttatttataaatgtataataaattattgttgactgtagtcaccctgttgtgctgtcaaatactagatcttacacattctatctaactataattttgtacccattaactatccccacttcccccacccactacccttctcagcctctggtaaccattattctactctccaactccatgagctcaattcttttaatttttagccctcacaaataagtgagaacatgtgaagtttgtttttctgtgcttggcttatttcacttaaaataatgacctctagttctatccatgttgttgcaaatgacaggatctcattcttttttattctttttttatagtactgcattgtgcatatgtaccgtattttctttatctatttgtctgttgatagacacttaagttgctttcaaatcttggctatggtgaacagtgctgcaataaacgtaggtgtgcagatataacttcaatatgttgatttccttacttttgggtatatacatagcattgggattgctggatcatatggtagcactatttttagtttttgtttgtttgtttgagatggagtcttgcactgtcacccaggctggagtgcaatggcatgatctcagctcactgcaacctccgcctcccaggttcaaacgattctcctgcctcagcctcctgagtagctgggattacaggcgcccgccaccaagtctggctaattttcatatttttagtagagatggggtttcaccatgttggccaggctggtcttgaactcctggccgcaagtgatctgcccgactcggcctcccaaagtgctgggattacaggcgtgagccactgcacctggcctatttgtagtgtttttttttgagatggtgtttcactcttttttcccaggctggagtgcaatggcgtgatcttgcctcactgcaacctctgcctcctgggtgcaagtgattcttcttctgcctcagcctcccaagtagctgagattacaggtgcctgccaccacgcctagctaattttttgtatttttagtagagacagggtttcaccatgttggccaggatggtcttgatctcttgacctcgcgatccacccacctcggcctcccaaagtgctgggattacaggtgtgagccaccgtgcccggcctatgtttagttttttaaggaacctccaaactgttctccagacatttccactaacagtgtacaagggttgccttttctccatgttcttgtcagcatttgttattgcctatcttttggatataagcctacttggggtgagatgatatatctttttttgttttgttttgttttttgagacggagtcttgctctgtcacccaggctggagtgtgcagtggtgcgatcttggctcactgcaacctctgcctctgtggttcaagtgattctcctgcctcagcctcctgagtagctgggactacaggcgtgcgtcaccacgccccgttaatttctgtacttttagtaaagatggggtttcgctgtgttggtcaggctggtctcaactcctgatctcaggtgatccgcctgcctcagcctcccaaagtactgggattacaggcatgagccacccgtgcctggcctttcattgtagttttgatttgcatttctctgatgctcaatgatgttgatcaccttttcatatacgtgtttgctatctgtatgtcttcttttgagaaatgtctattcagctcttttgcccatttttaaattggattattgaatttttttttcctattgagttatttgatctccttacgtattctggttattaatcccttgtcagatgggtagtttgcaaattttttcctcctattctgtggcttgtctctttgttgattcctttgctgtgcagaacctttgtaacttgatgtgatcccatttgtctacttttgctttggttgcccgtgcttgtggggtatcactcaagaaatctttgcccagtacaatgtcctggagaatttctctaatgttttcttttattagtttcatagtttgaagtgttagatttaagtttttaatccactatgatttgatttttgcatatggtgagagataggggtctggttttattgttctgcatgtggatatcccgttttcccagcgccatttattgaagagactctcctttccctaatgtatgttcttgatacctttgtcaaaaatgaattcacggccaggcgtggtggctcatgcctgtaatcccagcatcttgggaggccgaggctggtggatcacctgaagtcaggagttcaagagcagcctggccagcatggcgaaaccctgtctctactaaaaatacaaaaattagctgagcgtggtggcgggtgcctgtaatcccagctacttgggaggctgaggcaggagaattgcttgaacccgggaggcggaggttgcagtgagccaagatcgcgccactgcactccagcctaggggacaagagcgagacttcatcttcgtccccccccgccaaaaaaaaaaaagccactgatttttttttttttttttttttttggagacggagttttgctcttgttgcccaggctggagtgcaatgggtttttttttttttttttttttgagatggagttctcactctgttgcccaggctctggactgcagtgacgcgatctccactcaccacaacctctgcctcccgggttcaagcaattctcctgcctcagcctcccgagtagctgggattacaggcatgcaccaccatgcccagctaattttgtatttttagtagagacagggtttctccatgttggtcagactggtctcgaactcctgacctcaggtattctgcctgcctcggcctcccaaagtgcttgctaggattacaggtgtgagccactgtgcctggacaatgctactgattttttttttttttgaaacggagtcttgctctgtcaccaggctggagtgcagtggcgccatcttggctcactgcaaccttcacctcccgggttcaagcggttctcctgcctcagcctcctgagtagctcggactacaggtgtgcatcaccacatccagctaatttttgtatttttagtagagacaggatttcatcatgttggccacgatggtctcaatctcttgatctcacgatctgcctgcctcggcctcccaaagtgctgggattacaggcatcagccaccgcacctggccaatgctactgatttttatgtggattttgtatcctgcgactttactgaatttattagttctaatagttttttggtggaatccttaagattttttaaatataagatcatatcatctgcaaacaaggataatttgaattcttttccaatttggataccctttatttctttctcctgtctgattgctctagatagaacttccaatacagagtcttcttaataaaacataatcataggatcatatatagtcatataccacctttgccatatcctgttggttagaagcaagtctcaggttttgcccatacccaaggtgagggattgcacaaaggcatgaacaccaggaggcagctactggtggggaagaccttagaatctgtctgccacatccatctagagcttaaacttactcatgtgtaatgtgtgaattgaggatatatttcaattttttttaacagccagttttctaagcatgattagcaggcatctgcaaggtagcatgtatgttggcataggttatggaaaggaagtcagtgtttcctgcttaaaattcctctctgacaactggagcctgttggtgagggggagccttgttctgttcttggcacactggagtgtatctcagaggccttcttgaacagcctgtaattcctgcacatcctggctagatgaggtgggggtcttggtggtgcacacaggatgccacaatccacagggaatggccccttggggtggagaagggtaatgaattattataggcaaatcctgcagtgttgaggtggtgggccagccccttcctgtgttggttgttaacatgcagttaaggctgtggacagatggatccaaataccaaacagttctttctagaactaggcaaggacttgaaggagggagtctgtgatcagccagctgggaaatctgtggaggaagacattgtccaaaccaaaagagggatcagcagcctcttgataattgactatgttggtaagggcatccactagccctggccatttagatggtgtctggccaagagaggggcaggttggtgatgaaatctgttgtgatggcatcttattttcatatttttaagtctattctattagcggtgcatgggattgggattgcttatctgtgactataacagtatcgcaggtgctgctttgctggaagggactgagctgaagagggcctgtgggccagattggaggtaggaatgtggaatcatagtggctctctagagtggtgtggggcaattctgccaaagcagctgctcagactctgggtcagcatctgaggggctttgccccttatggacatctgcttgatgtccctgccagattagctgggttaaccatgtccaaggctacacgtaacagtatgtcaccataaacctcaggaagaacagagtcagttccaggctccctcctgccggcccctgatgcccttgggcattctgcttgttgaccacttggtggttttgatcttggtcacaagtgatggaaacatggagacctgggccagggcaggctccttatgtcagcaggtaggcagtgaagggaagcagatggggtgcagctccagcagatgcaggcctaggtgcagtactgatgggctccttggcctgggaaaagccccttaatgatcctgcttcttttctgtaaaatgggggcaataatgcctacttctcagaaggcttggggagattagatgagctagtgtggagcacctagcacagagttggtgccagaaggcacttgataagtgatggctgctaccgctgttgccatgttaaggcaggttagattaggccaagatcatggcagaaatggagatattttaggtctgcagttgtagcttccctgactgcagactgtgaaccctacatgaccttggcaaatgcatgggcagctgcagtttgccctgatgtcattagaagcttccagggaaggataaagacctctgagacccctgggctgctcagaatctactaaatgggtggatagggcatgagggtggcccctgccaaagggacccctgtttatctgccctgtctttttgttgtctaattccccctgggtggtggagcctggaaactgtgaggtccagcagagcattccatacttccacataccctgctgccctagagtaaagaggctggacaggcctggagtggtagggaccacaaatctagggaagaatggagtccagagccaggagtggggaaagtccaaaaggaaaacctcttttgttggcccaaggcagttgtcaaagttgggatcatcaggaggcatgtccagagagatgagagaaaattctgagcccagaacaagggcaggtggggagggacagctgggtggaagcgccggtcctaagcagggagaggagacgttctgcctgaaagtgtcggcttaaagaatctgtttctgagcctcctgtgtccccatccccccgtcagctgacccacctcttcctgttcctccagaccaagctgctgacccagtatgtgctgagtctggccaaatatgaccagaactatgatattcgcgaccgggcgcgcttcacccggcagctcatcgtcccttccgagcagggtggggccctcagccgccatgccaagaagctcttcctggcacccaaaccagctccagtcttggagtcatccttcaaaggtgggagctgaaatcaagggtaaccttcctaggggaatggaaaggaactggccagagtctctgccccagaccttcctgaggcccctagccaggcaccaggcttctgtggacagtcctgctccctggctcactccttttgtccctcctgtggcaccaggaattactctttcaccctcccataaccactgccagcatcatctcacctgagggtctgccttcctggccaggatggacttgtgcctcctctcctctcaggctcccttttccatctccctccctgagcagacactaggctttggaatacataccaagatcttaaataccaaggacccaggaaggcagaaagcaaaacaacacacaaaggagaggtgtatatttttataaaggtcctgagaaagcagttgcctgcattctgtgagcttagtcactacagtcagtccaaatcccaggccccagggcttcagccttgcctctgttcctgggcttggcccttaaggcctcttttcccaagacaacggccttgagatgggcctgggagggaagggtcctcccgctgcttctccgggccccaggagtggaagccaggaacctacacagaagagagcctccttcacaaagctcagttcttctgggtatcttttcgttctttttctcttccctggacctcacgaatggggagattctgagggtgggcacagctttgaaattctcccaggaagaaggcaacagtccctttctccccgacaccatcctcactcacaggcctgtgctgccctcctccagcagtgcctcaactctgatccagacttctacacactcatgctctgactgttcatccctccctgctgagtccagagcctgactagacgtgcatgctgagcagacaggtcggcagcatctgtgggcccagagtctcctcctgcccacctctgtaggctgcctttccctggccctcagtccctgctctggcctggccagacagccttttcttccagcatgtgggcctaaaggtgcagtcagggtggaagagccattagggcacacatccatctccttcccctacccacctgggaagtcccaaccagaatcaccacccagccccacctggaaaacagctcccagagctttccctcactgctgctacctgcctgacctctaaacctatccctagaccgggaccacttccagctgggctcactgtcccacctgcttaatgccaaggccacaggctaccaggagctcccagactggccggaggaagccccagacccatctgtgcgcaacgtggaggtcagcggggtggagggttgaagtgtgtgtgtgtgtgtgtgtgtgtgtgtgtgtgtgtgtgtgtgtgtgtgtgtgtgtgttggtgggggcagacagtagggagccctggcagtgccggcccagccctcctaacaccctcccccacacacacaggaagaagatctctcccttattgagactcacgtgggcctgttgggcgaatacactgaggtcccaccttcgtgtgacgtgtgctctctcccctgccctgtctgtgtccctcttcttcccctgtgtgttgtgctcctgggccttcccatactctgtttccaccttggtttggcagtgctcctctgtgagcagcattccctcccctccatggacagtgcccctttcttcctcctctgttattccctttgtgggacagaccaggtagggcctcacaaagaggtggaataaagggtaagggcttgtgcctgcctgccttctccccaaccatgatgaaatgaccctgcaccctacccccatctccaggtacctgaatggaccaagtgctcaaatcgggagaagagaaaggagaaggaaaaacccttctactcggactctgagggggagtcaggccccacggagtccgcagacagtggtgagcagatggcagagctggggtcctctgtgctctgcccatgcatctgtgtgactgactatatgaggggtatatgtatatggttgtgtgtctaggggtgtgcacctgcttgtgaattgtttgtgcacctgagggattcatgttccaggtgtgtgtgcttgtgcaggtttctatccatggagtccatctgtgtttctgtcagttccagctggcatgtagggctgggggcaggtcagagaggtttgagggttcagtactgaatgtgaaggtggaacccaggtgtctgctccagacccaaggaggcctgcatatgagggaggaggcctcatattgttcctccacagaccctgagtctgagagtgaatcggacagtaagagcagcagtgagagcggctctggggagtccagcagtgagtccgacaatgaagaccaggatgaggatgaggagaaagggagaggcagtgagaggtgagaagggagctagccagatggctggtggggttcagggggctttcctggaaagagggctagcattgagctttagccagtctcctaagagcccctgagcccctcgtgagctgggtggggctgtcagctcacatgacgcctactttcgctggctgcaggagatctctgaggcctcatgggctggtgtggagaagcaaccagagtcctagagcctgagctggcacaagctggcttcaagctctcacggggtccctgctataggacctcaggtgtgaaccctcctggctcaggctccccacaccactccagcttttcagcatttctcctgcttctgtgaagcaaggagggagtgtccaggccaggcctgagccaacctttcccactccttcagtgaacagagtgaggaggatggtaagaggaagacaaagaagaaggtgccagagagaaaaggagaagcgtcatcctctgatgagggcagcgattccagcagtagctcatcagagtccgagatgacatcggagtccgaggaggagcagttagaacctgcctcctggagcaggaaaacagtgagagccttggggcagagtcagggtgtgctcatgggccagggccctccccaacctctgggccaggcccagacatctatctccctaccatccagaacagaacatgacatcttctacccaacccagaacatgccaaggtgctccccttccccacacccacatcccatttttctctttcagcctcccagcagcaaaagtgctcctgcaaccaaggagatctccctgcttgatctagaggattgtgagtttgggtggtaaaagtcacaggggaaaggaggcctggggagcatgaattagaacagcccatagggactctggatcgggttcctcaggtcttgtgggagcaggggagcagacagaacatatcttcaggcctgagagggcagcagggctgacctccccaggtctggggttgaggtctaggaatgggtattttgcgagagcctccaggcagccatgtgccccgctgtccatggtgctgaaatgcgtgctccttgatccctaggctccctgctcaacccaagccacctccactttgcctcctcatagtcttatctactcccacagtcacccctcccagtgtccagcctgtgtctcccccagcaattgtgtctaccagtctggctgctgacctggagggcctgacactcacagactccaccctggtaccgtcggtgagtgggatggaggaggggaccgggctggggcagggacacatccctgtgctgcatcctatggtgtggatgtgtgtggggggtgggtgtgatggaggatgtgatagctttgagtcccagctgctggatggccctaggggacaatgctgggacaggctctctccatcttgctcagttctgtccttccctacccctccactctagcttctgagtccagtatcgggtgttgggcggcaggagctgctgcaccgggtagctggcgaggggctggctgtggactacaccttcagccgccaacctttctccggggatccccacatggtgtccgtgcacatccacttctccaacagctctgatacccccatcaagggcctgcatgtgggcactcccaaactgcctgctggcatcagcatccaagaatttcccgaaattggtgcgaagggctttggatggggtggaggaggaggctcctgggcagagtcagtctttctgtggttgctgataccctccttgtgccaggccaggggccaagctataggggcacagagatagcatctaacatgatcaacactctggtggacaagacagatgatgaaataagcaagttcacatcagggcgggaggtgcttgcagcagcagatttgggccttggttgtttcaggactaacttaaatgtggtgagggtgagtgggggaaagggtgcttagagttcaggaggaaaccgggaacagtctccagcagccaagaaagccaagattctgtagagggctggtcagctgtgacagtggagaggagagtagggctaggctgggttctagacctatcaggtgatggtggccctccctctccccttcactgccttataccacttcagagtccctggcacctggagaatctgccactgctgtaatgggcattaatttctgtgactcaacccaggcagccaacttccagctgtggtatgtgcccaactcgaggtgggggtgagaggatgggctggaaagggacagggtaacaatgaactggaaatggaggtggtgcttagtggggatacatcatgattgggtgggtctggaagccatctcaggccctcattcctgacctcactctttcactgcctccaagctgtgcctctacacagggtgggaagtgaggggagagatgacagccttaattcttctccgtttcctcccacccctcccagcacccagacccgacagttctacgtctccattcagccacctgttggggagctgatggcccctgtgttcatgagtgaaaatgagtttaagaaggaacagggtgagtgctccctgggagtgggcagagagggaagtatagaagctgactccagaatgtccagcttggatggtagggagaatggtggtgtccttcatctagaccaggggtcagcaaactttctgtaacgggccaaagataaatgttttaggctttgagaatcatgtggtctctgttgcagttacaacacgactgtggctgttgaaacatagaaacatccacagacagtatgtaaatgaacgagtatggctgtgttccaagaaatttccatttatatttatagatactgaagtttaaatttcatgtaattttcatgtgtcatgaaatattaatcttttgattgctcccccaacacttaaaaaatattaaaaacattgtgggccatataggtggtgggctggatttggtctggaggctgtaatttgcaaaacctctggcctagaagaaagaagagtggcttgggcaagggaggagggaagatcatggttagttttggataagctgattttgaaatgcatttgggaaattcaggaggagctatttagtatgcaactgaaaatatgggtctatgcccaggaaacactttgaagctggagtcatgaacatagaggtggtaatggaagctgtgaatatgaatgagatcactctgggaggtgggagaaaataggaaggccaaggacagaaccttgggggaaaacctgaattctgcagaagaaagaggaggggagggataagagaaggagcacagggagaggtgggaggagaaccaggagagacaacaaggcagaaggtgtctgcaaaccacagttacctaagaccttcagagtcagcatataaaaggctactgccaacctgagggagagagggtcattgctaaaggagggacagaggccaactgcagtgggttgagggagaccacggctcaagtacatgcagtcctctttggaggactttagccatgaatgaggagggagacagggcattggcacgatgaaggatctcacttctggaaaggattttttggagacggggacacttgaacatgaacagattgaaggaacaaaaacaagaaaatgttattagtcatgaatgaaggggatagaagaaacaggagagggatgtcagtttctaaaaggaggtgaagaataggggaagcagtggagggaggaaagaggctgaagagaagactgctggtgtgcaggagagcagacggaggagctcccatggggggcctggatcatgtgagtggagagaagtcagccttgcagaatgaggagttctgggggtgctgtgaaggtttggaggcttcaggagccctggctaggtctggagctgctactgcagaggtacaattaaaaatgtacctgtgaatgctgcatgtgactactggattctggctgagagatcacagcagccacctgtgatctttttgtgagggcttagcttccaggagctgagtgggagttgaatgtgggttggagggccccccaggaaagatcaaagggtgtgaggttcaggatgggcgaacctcttaagaactgactggccactctcaaggggctggtagcccagatgtctgatggaggaagcgccaaatcagtctttggtaacaacatggataaaggcctgggtgggaggggtagagaggctgacaaaggcttcctgagggagggcccagtctgagagggaagtaccttctccccaagactgatgatttaaattctgacctgccctttgcatgataccttcccagcctgggagaacttgttgctcagtaagcagacccaggtgctggcctctgtacccaccatggcctctgccctcatcacgacctctacccccaggaaagctgatgggcatgaatgagatcacagagaaactcatgctgccagacacctgtcggagtgaccacattgtggtgcagaaagtgactgccactgccaacctgggtcgtgttccttgtgggacatctgatgagtacaggtactaggccaccagtagaggggaaatgatgagcatgggggccctggtttgaaggaggagccccagctgctgatccccttccaaacacagtcacccttagcagctcttcctcaccccttctattcccacctcaggtttgcagggaggacactgactggtggaagcctcgttctgctgaccctggatgcccggccagctggagctgcccagctgactgtcaacagcgagaaaatggtgattggcaccatgctggtaaaggatgtgatacaggctctgacccagtgacttccaaatgctgtgacctgtttggctcccatctatacctccccatgacacctaggctgtcagtctctctcatctttctctctctctctcatcatcctcctcatgccagatagcattcagggtgtcctctctccctctggaggaccaagccctcccctaatgccctccccatggattccttagtgatctgtgcagagagagatggcagccactcccttcagtcctcccagatttctgtagctatttatgtagcaggctcaataaaatgtcttctctct

SEQ ID NO: 10763 - DNA, 2650 bp, Homo sapiens
tccgccccctcacgcccaccagccgcttccacctctgcccacccgctccacactgaccgtagtcctgccctccgcactggtcctctccccgcaacgacttgccccaccttttcccctcatccgctgacccttgccccaaccgaggggcccggggtgctctgacccgtcctctccgcagtgaggtgcagtacgttgtgctccagaacgtggccaccatgtccatcaagcgccggggtatgtttgagccctacctgaagagcttctacatcaggtccaccgaccccacccagattaagatcctgaagctggaagtgctgaccaacctggccaatgagaccaacattcctactgtcctacgggaattccagacctatattcgcagcatggacaaggactttgtggcagccacaatccaggccattggacgctgtgcaactaacatcggccgagtccgtgacacctgcctcaatggcctggtgcagctgctgtccaaccgtgatgagcttgtggttgcagagtcagtggtcgtcattaagaaattgctacagatgcagccagcacaacatggagagatcatcaaacacttggcaaagcttacagacaacatccaggtgcccatggcccgagccagcatcctgtggctcatcggagagtactgtgagcatgtccccaggattgcacctgatgtcttaagaaaaatggccaagtcattcacagcagaggaggatattgtcaagctgcaggtcatcaacctggcagccaagctctacctgaccaactctaaacagaccaagctgctgacccagtatgtgctgagtctggccaaatatgaccagaactatgatattcgcgaccgggcgcgcttcacccggcagctcatcgtcccttccgagcagggtggggccctcagccgccatgccaagaagctcttcctggcacccaaaccagctccagtcttggagtcatccttcaaagaccgggaccacttccagctgggctcactgtcccacctgcttaatgccaaggccacaggctaccaggagctcccagactggccggaggaagccccagacccatctgtgcgcaacgtggaggtacctgaatggaccaagtgctcaaatcgggagaagagaaaggagaaggaaaaacccttctactcggactctgagggggagtcaggccccacggagtccgcagacagtgaccctgagtctgagagtgaatcggacagtaagagcagcagtgagagcggctctggggagtccagcagtgagtccgacaatgaagaccaggatgaggatgaggagaaagggagaggcagtgagagtgaacagagtgaggaggatggtaagaggaagacaaagaagaaggtgccagagagaaaaggagaagcgtcatcctctgatgagggcagcgattccagcagtagctcatcagagtccgagatgacatcggagtccgaggaggagcagttagaacctgcctcctggagcaggaaaacacctcccagcagcaaaagtgctcctgcaaccaaggagatctccctgcttgatctagaggatttcacccctcccagtgtccagcctgtgtctcccccagcaattgtgtctaccagtctggctgctgacctggagggcctgacactcacagactccaccctggtaccgtcgcttctgagtccagtatcgggtgttgggcggcaggagctgctgcaccgggtagctggcgaggggctggctgtggactacaccttcagccgccaacctttctccggggatccccacatggtgtccgtgcacatccacttctccaacagctctgatacccccatcaagggcctgcatgtgggcactcccaaactgcctgctggcatcagcatccaagaatttcccgaaattgagtccctggcacctggagaatctgccactgctgtaatgggcattaatttctgtgactcaacccaggcagccaacttccagctgtgcacccagacccgacagttctacgtctccattcagccacctgttggggagctgatggcccctgtgttcatgagtgaaaatgagtttaagaaggaacagggaaagctgatgggcatgaatgagatcacagagaaactcatgctgccagacacctgtcggagtgaccacattgtggtgcagaaagtgactgccactgccaacctgggtcgtgttccttgtgggacatctgatgagtacaggtttgcagggaggacactgactggtggaagcctcgttctgctgaccctggatgcccggccagctggagctgcccagctgactgtcaacagcgagaaaatggtgattggcaccatgctggtaaaggatgtgatacaggctctgacccagtgacttccaaatgctgtgacctgtttggctcccatctatacctccccatgacacctaggctgtcagtctctctcatctttctctctctctctcatcatcctcctcatgccagatagcattcagggtgtcctctctccctctggaggaccaagccctcccctaatgccctccccatggattccttagtgatctgtgcagagagagatggcagccactcccttcagtcctcccagatttctgtagctatttatgtagcaggctcaataaaatgtcttctctct

SEQ ID NO: 10764 - DNA, 21406 bp, Homo sapiens
atccctactagaggagaacgcggaaaaagccttctacggctcagaggaggacgaggccaagggcgcggggtctgaggagacggccgccgcggccgccccctcccgaaagccctatgtcatggaccccgaccaccggctgctgctgcgcaacaccaaacccctgctgcagagccgcagcgccgcggtggtgatggcggtggcgcagctctacttccacctggcgcccaaggcggaagtgggcgtcatcgccaaggcgctggtgcgcctgctgcgcagccacaggtgcgctccgcccccagccccgccccctccctcgcctcctgccccgccccacgggctgcccggctccgccccctcacgcccaccagccgcttccacctctgcccacccgctccacactgaccgtagtcctgccctccgcactggtcctctccccgcaacgacttgccccaccttttcccctcatccgctgacccttgccccaaccgaggggcccggggtgctctgacccgtcctctccgcagtgaggtgcagtacgttgtgctccagaacgtggccaccatgtccatcaagcgccgggtgagcctgcgacggcgggctgtcctcgctgtccgagggccgcttctgcgggcactggaggcgttgtcggggctgggaccggggccggggaaagggaagatggaggaataccctggctgtgcagaggatggggcaggggaggctccaaatacagatagggagcagggcctggatcctgaggggccgctgaggggatgtccagtggaaaaagagctagtcagatctgagatggacgagggaagacttgaggagtggagggcagtggtgaggaggcaaggatcctgggcgctgggtcaggataggaggggtgtctctgggcagcgaggcaggcctggggcttcggtggagctccctagctgcctctcttgtgccagggtatgtttgagccctacctgaagagcttctacatcaggtccaccgaccccacccagattaagatcctgaaggtgagtgagggacagaagtgcatgtgcttcccagccctccccaccccatgtacccactcaaataactcacagtggcccccctggtgcctgcctattcctggggctgagcccaggagcccatgactgccccagctggagctgtttgttcagggagctgggctaaggagggtcagggggagaagggaactgctctttgcctagtacctggtatacacctgctactcttcataaatgaagtaacctgatatcacctcataataatcccaggatgtgtacattatattccttttataaaaatatagactctggccaggcacagtggctcacgcctaatcccagcactttgggaggccgagacaggcagatcgcctgaggtcaggagttcaagaccagcctggccaacatagcaaaacctcgtctcaacgaaaaatacaaaaattagccaggcgtggtggcaggtgcctgtaatcccagctactcgagaggctgaggctagagaattgcctgaacctgggagacagaggttgcagtgagctgagattgtgccattgcactccagcctgggtgacaagagcgaaactccatctcaatctaagaaaaagaaaaaaagactctgggaggtaactgccccaggtcacataattctgctgactccaaggttcacacttttctctcccacccacagtgttatggcccccacacacctgccccctcaggctctcctgcaaacattcacggacaaggaaagtggcgggagcccatacctccatttgattcctgctctgctgcctcattattgagtgatttccttcagcaacagttaatcttcctaacccttgtgaacatccactatgttctaggggtacatgatgagcaaactaatcagggaccctgcctttgtggagcttacagatgtggggaggaggagacattaagcagttaatcacaaggcaaatgtaaaagtccacttacaaaatatggaagaaagtgtggagagctataagggcataaaatagggagacctcatctagtctggtgccagggaagttttcccggaggatatgagacttgagctgaagcctgagagatgaacatgaattatgcagggacagaaatgggaagaactgctccacgcagaggaaacagcatctgcgaagaccctgggttaggaagtggagtgggattggggcctggaagacaagggggacagtgatgggagatgggaggtagacagcaagcagatcattcagggacttacagaccatggtgaatacgatggtctccatcctgaaagcaataggaagctttaagttttcaatgcagtagggaggtgacatggtcatactgtaagcatactgtgtagggaatccacttaagaggcaaactggtcctcttgctttttagacaagtttcataacctgtcaattccctcatcagtgtgaggatgatgcagggctgtcatgaggattgttttctggtctatgaagtgtatttggaatgaaagcacagaaagtccactggccaacccacccattttctgcctctccaaccctccctgcagctggaagtgctgaccaacctggccaatgagaccaacattcctactgtcctacgggaattccaggtacaggccagctcccagccagaagggcctgggagaggggcccatcagatccttgtgccctggtgggtaaacctcctcttatgagcccaaggctggagaaactattatcttacattcccgttccaatgtgtttggctggctttgggccaaggaatcactggattgggggtggagttgtcaccccctttcccaagtcttagtcaccggcatgataagccataaaatgaaaggccacagccttcttgaaggtcaccctcaagcctgcagagtcactgagggatttctttgtcatatcccacagacctatattcgcagcatggacaaggactttgtggcagccacaatccaggccattggacgctgtgcaactaacatcggccgagtccgtgacacctgcctcaatggcctggtgcagctgctgtccaaccgtgatggtcagtgtttccctgagtgtctaaccgtgatgatcagagggtgtctgcctgcaggtctgactctgctggccactggatatccaccagtctgcctagacacaatgtgtatccattggtctgtctgtcttgatcagggcccaagtgttcctacacctctgagggctgctagagaactgaagggggttgagagaaagagccaagggcctggggcactgcaggtgtgtctgtccacctgagtgtggccatctgactgtcttggggtccacacactcatttttgttctgtagagcttgtggttgcagagtcagtggtcgtcattaagaaattgctacagatgcagccagcacaacatggagagatcatcaaacacttggcaaagcttacagacaacatccaggtgagggagaagccatattttcactccccacttcaaggtcctccccatgatttcaagactgtataattacatatgctagccttatcaaaagtaacttccaaaccttaggtcttcaggtggaaggagcagagacactggaccatgtgaccctgaccttgttacccctgatttgctttccctttggagaccctcaatgagcacgatggactttactactactcttgttttctctctaaagctctagccaaccatggttgagtgacaaatcttgtgtttttctatcgcactgctaagctgaaacatctaaacaaggcattcccaaagattctggagagtaacatggaaataaagtactgagggtacaatgaatccagaaaatcaatcttttacatcatgactgacttagggtcttgaaagctctatgctaatgaagccctagggaagaggggaaatgctgtctaggaaatgtctaccttttaacctctctctatctcaccacccccaactcccatttccagagaacccataatacaacaggccagcacagatgaggagtgctgtttccctggaagtccacaatcctacccacccactttcccgtatttacccatcttcactcctctcccacaaccacaggtgcccatggcccgagccagcatcctgtggctcatcggagagtactgtgagcatgtccccaggattgcacctgatgtcttaagaaaaatggccaagtcattcacagcagaggaggatattgtcaagctgcaggtcatcaacctggcagccaagctctacctgaccaactctaaacaggtaaagattaagagatgaccccccagatactctggtccccagaaactccctagacagtattcttttggccctccctaggcagggctgaactctagctcctattttggaaaagaagaatcagggaaggtggctggtctgcccacataaccaatgctaccccagtgcccacaaagaccttgtagtgctggtggtcactgttgaagagactctcctatgaagctgtgacctccagtctgctagtacaagagtcctgtctgccaccttggaactctggggctgtgaagaaccacagttgattgggataagggaagggcccaacagtggcaggtactgatgggagaacatgcatcccagatgtggtctgtgcttctttccaaagcttgacaatgcttggccagtctgtgccaaagataagggggtgagtctctgcttgggcttgggtggtgctggtggccactgtcattcccaaggtgaaaggttataagagatacacagccaaggatgaggctcaactaagttgtagtatcagggtgttcagagcctcctagctgtctggcatctcctgagatggttccaggagattctcctaaaatgaagcataatgtgctgagcttttcaaggtgtcagggacatcaaacaccatgacgatttccacactctcccactcagttaagcaggacagggattggcaaactactgcccataggctgaatttggcctattcctgtttttgtaataaagttttgttggaacacagccctgctcattcatttacaaattacctatggctgcttttgtgctacaacagcagggttaactagttgcaacagactgtattgcccacaaagcctagaatagttattctctggcccttttataaaaagactctgccaatccttgaagcaaaacctctggctaggtggctggggtctacagatttatagcagggatatcccctggagactgtagcatccctgccatgtccactgtgcgtgggagtctttggatggtggcacttatctttttcagtggcttctttgatccattgtggccagagtgagccccagaggctcaaggtgaggtaggcagggccaccaagtgctgtgactgtaatcaggagtcaaaggacagcagcaacatgtggaggcaactgagtctgtataattaaatatgctagccttatcaaaagtaacttccaaaccttaggtcttcaggtggaaggaggagagacactggaccatgtgaccctgagcttgttatcagtgttgtgggcaaagcagattggagagagagaagttagagggggagagagagaagttagagggagaaagagcaccatggggaagcgttcaatcgttgaaaaaatatttgtatacttcctttgttcaggtgggaggaaggagcaagtgggaggaatgtttgaaaagatgaagcagcctgggtggggagccacccaggtaggtgggagtcttgacatgctcagcaatgagccagagtcctaaaccccaggatggtgaggttggcatgttttcataagcctgggcctgtccacatgtcatttcccccaagttgtcactgtgagctacatgtgcatttgttcatttatttaacatatatgtaggtgggagtctgacatgctcagcactgagccagagtcctaaaccccaggatggtgaggttggcatgttttcataagcctgggcctgtccacatgtcatttcccccaagttgttactgtgagctacatgtgcatttgttcatttatttaacatgtaggcctactatttgcctggtactgtgctgcgtcctgaggatatgacaatgagtgagacacatttacaggtctccagatactcacagccaagtaggagaaacaggacaaaaataaacattttaaacacagcagtaacagctgtcatcagggttggcacagcgagctgtgggtatatacagctgaaccctcccctaggaatgacccctgtcagggaacccagagtaggctgttcaggcaaatggacactcacctccagggcgcccttcacctgcaagtgagtttttgcaggccccttagaatggttatttgattcaataaagatttttgtcctccctttctttctcctttcttcccagcctcttctgggagtggtaaagaagggggagtccttggggtactaggagggaggtggtttggatgcgcacatgaccatgcttgcaaaacagtagtgatgcttcccatcctgggaccatgagtggcaatctgcccagctaaaaggccacagtaatctcagtcattctctccaatttggacatgggcccacggcatgccagatcctggcccaggatgaggccaaggaaatgaccaagatgaggcctctgccctgctattgatcagcagataatcagatactagaccagaggccacaaaggcataacatgcaggtggcgggggatgggggggttggtaatcaaagtggctattacatccacctggatatagaccctggggaaactgcctagcaggttagtttgcttttatgtgtcaggtgagatgtgtggcaggagggtctgccaggggcacagtgggatctacaaccctcccatgtgaccgcctttacagtgaatagaagattctgacaaattttgcagaattgcttttaaaaacgtaaactttttttaatatgctaaaggtaatacatgcttatcatagaacatttggaaaactcagaaaattataagtttaaactattaataagtccaccatttagaagaccaccattaattatatatttccttattttttattcctatatatagtcattcagaagttgtacttttgtctattgtccaatattttaaacttttctgcttcttttcaatgctttcatatttaatacttttttttccccattcacatttcaattaaacttttcacttagaattttctccaggctgggttcagtggctcacacctgtaatcccagcactttgggagcccaaggtgggtgggtcatttgaggtcatgaattcaagaccagcctgaccaacatggcaaaaccctgtctctactaaaagtacaaaaaaattagctgggtgtggtggtgcgctgaaatctcagctacttgggaggctgtggcaggagaattgcttgaacccaggaggtggaggttacagtgagctgagatggtaccaccacactccagcctgggccacagagcaagatccatctcaaaaataaataaaaattaaaaagaatttcctccaaatttttttctactttcacatttttaaatcaattgtattagttttctgctacataataaattactataaatttggtggcttcaaacaacacacgtttattttctcagtgtctatgggtcgagaattcaggtatggcttagttggatcttatgcaaggctacaactgaggtgtcagccaaggctgagtttttatctggaggctgtactggggaaaggtccacttccaagtcacatggtgccacgatccacttccttgcagttgtaggattgtggccctggcttcttgctggctgtcagctgggggctgcccttgccttctagaggccgtccttagctcattgccataggggcctcccaacacggatgcttaatttctccaaagccacaagggagaaagtctctagagccagtctgctagcaagaccgtcttctttttattttttaatttttatgggtacatagtaggtgtatatatttatggggtatgtgagatattttgatacaggcatataatgcataacaatcacatcagggaatggggtatccatcctctcaagcatttatcttttgtgttacaaacaatcaaattacactctcttagttatttataaatgtataataaattattgttgactgtagtcaccctgttgtgctgtcaaatactagatcttacacattctatctaactataattttgtacccattaactatccccacttcccccacccactacccttctcagcctctggtaaccattattctactctccaactccatgagctcaattcttttaatttttagccctcacaaataagtgagaacatgtgaagtttgtttttctgtgcttggcttatttcacttaaaataatgacctctagttctatccatgttgttgcaaatgacaggatctcattcttttttattctttttttatagtactgcattgtgcatatgtaccgtattttctttatctatttgtctgttgatagacacttaagttgctttcaaatcttggctatggtgaacagtgctgcaataaacgtaggtgtgcagatataacttcaatatgttgatttccttacttttgggtatatacatagcattgggattgctggatcatatggtagcactatttttagtttttgtttgtttgtttgagatggagtcttgcactgtcacccaggctggagtgcaatggcatgatctcagctcactgcaacctccgcctcccaggttcaaacgattctcctgcctcagcctcctgagtagctgggattacaggcgcccgccaccaagtctggctaattttcatatttttagtagagatggggtttcaccatgttggccaggctggtcttgaactcctggccgcaagtgatctgcccgactcggcctcccaaagtgctgggattacaggcgtgagccactgcacctggcctatttgtagtgtttttttttgagatggtgtttcactcttttttcccaggctggagtgcaatggcgtgatcttgcctcactgcaacctctgcctcctgggtgcaagtgattcttcttctgcctcagcctcccaagtagctgagattacaggtgcctgccaccacgcctagctaattttttgtatttttagtagagacagggtttcaccatgttggccaggatggtcttgatctcttgacctcgcgatccacccacctcggcctcccaaagtgctgggattacaggtgtgagccaccgtgcccggcctatgtttagttttttaaggaacctccaaactgttctccagacatttccactaacagtgtacaagggttgccttttctccatgttcttgtcagcatttgttattgcctatcttttggatataagcctacttggggtgagatgatatatctttttttgttttgttttgttttttgagacggagtcttgctctgtcacccaggctggagtgtgcagtggtgcgatcttggctcactgcaacctctgcctctgtggttcaagtgattctcctgcctcagcctcctgagtagctgggactacaggcgtgcgtcaccacgccccgttaatttctgtacttttagtaaagatggggtttcgctgtgttggtcaggctggtctcaactcctgatctcaggtgatccgcctgcctcagcctcccaaagtactgggattacaggcatgagccacccgtgcctggcctttcattgtagttttgatttgcatttctctgatgctcaatgatgttgatcaccttttcatatacgtgtttgctatctgtatgtcttcttttgagaaatgtctattcagctcttttgcccatttttaaattggattattgaatttttttttcctattgagttatttgatctccttacgtattctggttattaatcccttgtcagatgggtagtttgcaaattttttcctcctattctgtggcttgtctctttgttgattcctttgctgtgcagaacctttgtaacttgatgtgatcccatttgtctacttttgctttggttgcccgtgcttgtggggtatcactcaagaaatctttgcccagtacaatgtcctggagaatttctctaatgttttcttttattagtttcatagtttgaagtgttagatttaagtttttaatccactatgatttgatttttgcatatggtgagagataggggtctggttttattgttctgcatgtggatatcccgttttcccagcgccatttattgaagagactctcctttccctaatgtatgttcttgatacctttgtcaaaaatgaattcacggccaggcgtggtggctcatgcctgtaatcccagcatcttgggaggccgaggctggtggatcacctgaagtcaggagttcaagagcagcctggccagcatggcgaaaccctgtctctactaaaaatacaaaaattagctgagcgtggtggcgggtgcctgtaatcccagctacttgggaggctgaggcaggagaattgcttgaacccgggaggcggaggttgcagtgagccaagatcgcgccactgcactccagcctaggggacaagagcgagacttcatcttcgtccccccccgccaaaaaaaaaaaagccactgatttttttttttttttttttttttggagacggagttttgctcttgttgcccaggctggagtgcaatgggtttttttttttttttttttttgagatggagttctcactctgttgcccaggctctggactgcagtgacgcgatctccactcaccacaacctctgcctcccgggttcaagcaattctcctgcctcagcctcccgagtagctgggattacaggcatgcaccaccatgcccagctaattttgtatttttagtagagacagggtttctccatgttggtcagactggtctcgaactcctgacctcaggtattctgcctgcctcggcctcccaaagtgcttgctaggattacaggtgtgagccactgtgcctggacaatgctactgattttttttttttttgaaacggagtcttgctctgtcaccaggctggagtgcagtggcgccatcttggctcactgcaaccttcacctcccgggttcaagcggttctcctgcctcagcctcctgagtagctcggactacaggtgtgcatcaccacatccagctaatttttgtatttttagtagagacaggatttcatcatgttggccacgatggtctcaatctcttgatctcacgatctgcctgcctcggcctcccaaagtgctgggattacaggcatcagccaccgcacctggccaatgctactgatttttatgtggattttgtatcctgcgactttactgaatttattagttctaatagttttttggtggaatccttaagattttttaaatataagatcatatcatctgcaaacaaggataatttgaattcttttccaatttggataccctttatttctttctcctgtctgattgctctagatagaacttccaatacagagtcttcttaataaaacataatcataggatcatatatagtcatataccacctttgccatatcctgttggttagaagcaagtctcaggttttgcccatacccaaggtgagggattgcacaaaggcatgaacaccaggaggcagctactggtggggaagaccttagaatctgtctgccacatccatctagagcttaaacttactcatgtgtaatgtgtgaattgaggatatatttcaattttttttaacagccagttttctaagcatgattagcaggcatctgcaaggtagcatgtatgttggcataggttatggaaaggaagtcagtgtttcctgcttaaaattcctctctgacaactggagcctgttggtgagggggagccttgttctgttcttggcacactggagtgtatctcagaggccttcttgaacagcctgtaattcctgcacatcctggctagatgaggtgggggtcttggtggtgcacacaggatgccacaatccacagggaatggccccttggggtggagaagggtaatgaattattataggcaaatcctgcagtgttgaggtggtgggccagccccttcctgtgttggttgttaacatgcagttaaggctgtggacagatggatccaaataccaaacagttctttctagaactaggcaaggacttgaaggagggagtctgtgatcagccagctgggaaatctgtggaggaagacattgtccaaaccaaaagagggatcagcagcctcttgataattgactatgttggtaagggcatccactagccctggccatttagatggtgtctggccaagagaggggcaggttggtgatgaaatctgttgtgatggcatcttattttcatatttttaagtctattctattagcggtgcatgggattgggattgcttatctgtgactataacagtatcgcaggtgctgctttgctggaagggactgagctgaagagggcctgtgggccagattggaggtaggaatgtggaatcatagtggctctctagagtggtgtggggcaattctgccaaagcagctgctcagactctgggtcagcatctgaggggctttgccccttatggacatctgcttgatgtccctgccagattagctgggttaaccatgtccaaggctacacgtaacagtatgtcaccataaacctcaggaagaacagagtcagttccaggctccctcctgccggcccctgatgcccttgggcattctgcttgttgaccacttggtggttttgatcttggtcacaagtgatggaaacatggagacctgggccagggcaggctccttatgtcagcaggtaggcagtgaagggaagcagatggggtgcagctccagcagatgcaggcctaggtgcagtactgatgggctccttggcctgggaaaagccccttaatgatcctgcttcttttctgtaaaatgggggcaataatgcctacttctcagaaggcttggggagattagatgagctagtgtggagcacctagcacagagttggtgccagaaggcacttgataagtgatggctgctaccgctgttgccatgttaaggcaggttagattaggccaagatcatggcagaaatggagatattttaggtctgcagttgtagcttccctgactgcagactgtgaaccctacatgaccttggcaaatgcatgggcagctgcagtttgccctgatgtcattagaagcttccagggaaggataaagacctctgagacccctgggctgctcagaatctactaaatgggtggatagggcatgagggtggcccctgccaaagggacccctgtttatctgccctgtctttttgttgtctaattccccctgggtggtggagcctggaaactgtgaggtccagcagagcattccatacttccacataccctgctgccctagagtaaagaggctggacaggcctggagtggtagggaccacaaatctagggaagaatggagtccagagccaggagtggggaaagtccaaaaggaaaacctcttttgttggcccaaggcagttgtcaaagttgggatcatcaggaggcatgtccagagagatgagagaaaattctgagcccagaacaagggcaggtggggagggacagctgggtggaagcgccggtcctaagcagggagaggagacgttctgcctgaaagtgtcggcttaaagaatctgtttctgagcctcctgtgtccccatccccccgtcagctgacccacctcttcctgttcctccagaccaagctgctgacccagtatgtgctgagtctggccaaatatgaccagaactatgatattcgcgaccgggcgcgcttcacccggcagctcatcgtcccttccgagcagggtggggccctcagccgccatgccaagaagctcttcctggcacccaaaccagctccagtcttggagtcatccttcaaaggtgggagctgaaatcaagggtaaccttcctaggggaatggaaaggaactggccagagtctctgccccagaccttcctgaggcccctagccaggcaccaggcttctgtggacagtcctgctccctggctcactccttttgtccctcctgtggcaccaggaattactctttcaccctcccataaccactgccagcatcatctcacctgagggtctgccttcctggccaggatggacttgtgcctcctctcctctcaggctcccttttccatctccctccctgagcagacactaggctttggaatacataccaagatcttaaataccaaggacccaggaaggcagaaagcaaaacaacacacaaaggagaggtgtatatttttataaaggtcctgagaaagcagttgcctgcattctgtgagcttagtcactacagtcagtccaaatcccaggccccagggcttcagccttgcctctgttcctgggcttggcccttaaggcctcttttcccaagacaacggccttgagatgggcctgggagggaagggtcctcccgctgcttctccgggccccaggagtggaagccaggaacctacacagaagagagcctccttcacaaagctcagttcttctgggtatcttttcgttctttttctcttccctggacctcacgaatggggagattctgagggtgggcacagctttgaaattctcccaggaagaaggcaacagtccctttctccccgacaccatcctcactcacaggcctgtgctgccctcctccagcagtgcctcaactctgatccagacttctacacactcatgctctgactgttcatccctccctgctgagtccagagcctgactagacgtgcatgctgagcagacaggtcggcagcatctgtgggcccagagtctcctcctgcccacctctgtaggctgcctttccctggccctcagtccctgctctggcctggccagacagccttttcttccagcatgtgggcctaaaggtgcagtcagggtggaagagccattagggcacacatccatctccttcccctacccacctgggaagtcccaaccagaatcaccacccagccccacctggaaaacagctcccagagctttccctcactgctgctacctgcctgacctctaaacctatccctagaccgggaccacttccagctgggctcactgtcccacctgcttaatgccaaggccacaggctaccaggagctcccagactggccggaggaagccccagacccatctgtgcgcaacgtggaggtcagcggggtggagggttgaagtgtgtgtgtgtgtgtgtgtgtgtgtgtgtgtgtgtgtgtgtgtgtgtgtgtgtgtgttggtgggggcagacagtagggagccctggcagtgccggcccagccctcctaacaccctcccccacacacacaggaagaagatctctcccttattgagactcacgtgggcctgttgggcgaatacactgaggtcccaccttcgtgtgacgtgtgctctctcccctgccctgtctgtgtccctcttcttcccctgtgtgttgtgctcctgggccttcccatactctgtttccaccttggtttggcagtgctcctctgtgagcagcattccctcccctccatggacagtgcccctttcttcctcctctgttattccctttgtgggacagaccaggtagggcctcacaaagaggtggaataaagggtaagggcttgtgcctgcctgccttctccccaaccatgatgaaatgaccctgcaccctacccccatctccaggtacctgaatggaccaagtgctcaaatcgggagaagagaaaggagaaggaaaaacccttctactcggactctgagggggagtcaggccccacggagtccgcagacagtggtgagcagatggcagagctggggtcctctgtgctctgcccatgcatctgtgtgactgactatatgaggggtatatgtatatggttgtgtgtctaggggtgtgcacctgcttgtgaattgtttgtgcacctgagggattcatgttccaggtgtgtgtgcttgtgcaggtttctatccatggagtccatctgtgtttctgtcagttccagctggcatgtagggctgggggcaggtcagagaggtttgagggttcagtactgaatgtgaaggtggaacccaggtgtctgctccagacccaaggaggcctgcatatgagggaggaggcctcatattgttcctccacagaccctgagtctgagagtgaatcggacagtaagagcagcagtgagagcggctctggggagtccagcagtgagtccgacaatgaagaccaggatgaggatgaggagaaagggagaggcagtgagaggtgagaagggagctagccagatggctggtggggttcagggggctttcctggaaagagggctagcattgagctttagccagtctcctaagagcccctgagcccctcgtgagctgggtggggctgtcagctcacatgacgcctactttcgctggctgcaggagatctctgaggcctcatgggctggtgtggagaagcaaccagagtcctagagcctgagctggcacaagctggcttcaagctctcacggggtccctgctataggacctcaggtgtgaaccctcctggctcaggctccccacaccactccagcttttcagcatttctcctgcttctgtgaagcaaggagggagtgtccaggccaggcctgagccaacctttcccactccttcagtgaacagagtgaggaggatggtaagaggaagacaaagaagaaggtgccagagagaaaaggagaagcgtcatcctctgatgagggcagcgattccagcagtagctcatcagagtccgagatgacatcggagtccgaggaggagcagttagaacctgcctcctggagcaggaaaacagtgagagccttggggcagagtcagggtgtgctcatgggccagggccctccccaacctctgggccaggcccagacatctatctccctaccatccagaacagaacatgacatcttctacccaacccagaacatgccaaggtgctccccttccccacacccacatcccatttttctctttcagcctcccagcagcaaaagtgctcctgcaaccaaggagatctccctgcttgatctagaggattgtgagtttgggtggtaaaagtcacaggggaaaggaggcctggggagcatgaattagaacagcccatagggactctggatcgggttcctcaggtcttgtgggagcaggggagcagacagaacatatcttcaggcctgagagggcagcagggctgacctccccaggtctggggttgaggtctaggaatgggtattttgcgagagcctccaggcagccatgtgccccgctgtccatggtgctgaaatgcgtgctccttgatccctaggctccctgctcaacccaagccacctccactttgcctcctcatagtcttatctactcccacagtcacccctcccagtgtccagcctgtgtctcccccagcaattgtgtctaccagtctggctgctgacctggagggcctgacactcacagactccaccctggtaccgtcggtgagtgggatggaggaggggaccgggctggggcagggacacatccctgtgctgcatcctatggtgtggatgtgtgtggggggtgggtgtgatggaggatgtgatagctttgagtcccagctgctggatggccctaggggacaatgctgggacaggctctctccatcttgctcagttctgtccttccctacccctccactctagcttctgagtccagtatcgggtgttgggcggcaggagctgctgcaccgggtagctggcgaggggctggctgtggactacaccttcagccgccaacctttctccggggatccccacatggtgtccgtgcacatccacttctccaacagctctgatacccccatcaagggcctgcatgtgggcactcccaaactgcctgctggcatcagcatccaagaatttcccgaaattggtgcgaagggctttggatggggtggaggaggaggctcctgggcagagtcagtctttctgtggttgctgataccctccttgtgccaggccaggggccaagctataggggcacagagatagcatctaacatgatcaacactctggtggacaagacagatgatgaaataagcaagttcacatcagggcgggaggtgcttgcagcagcagatttgggccttggttgtttcaggactaacttaaatgtggtgagggtgagtgggggaaagggtgcttagagttcaggaggaaaccgggaacagtctccagcagccaagaaagccaagattctgtagagggctggtcagctgtgacagtggagaggagagtagggctaggctgggttctagacctatcaggtgatggtggccctccctctccccttcactgccttataccacttcagagtccctggcacctggagaatctgccactgctgtaatgggcattaatttctgtgactcaacccaggcagccaacttccagctgtggtatgtgcccaactcgaggtgggggtgagaggatgggctggaaagggacagggtaacaatgaactggaaatggaggtggtgcttagtggggatacatcatgattgggtgggtctggaagccatctcaggccctcattcctgacctcactctttcactgcctccaagctgtgcctctacacagggtgggaagtgaggggagagatgacagccttaattcttctccgtttcctcccacccctcccagcacccagacccgacagttctacgtctccattcagccacctgttggggagctgatggcccctgtgttcatgagtgaaaatgagtttaagaaggaacagggtgagtgctccctgggagtgggcagagagggaagtatagaagctgactccagaatgtccagcttggatggtagggagaatggtggtgtccttcatctagaccaggggtcagcaaactttctgtaacgggccaaagataaatgttttaggctttgagaatcatgtggtctctgttgcagttacaacacgactgtggctgttgaaacatagaaacatccacagacagtatgtaaatgaacgagtatggctgtgttccaagaaatttccatttatatttatagatactgaagtttaaatttcatgtaattttcatgtgtcatgaaatattaatcttttgattgctcccccaacacttaaaaaatattaaaaacattgtgggccatataggtggtgggctggatttggtctggaggctgtaatttgcaaaacctctggcctagaagaaagaagagtggcttgggcaagggaggagggaagatcatggttagttttggataagctgattttgaaatgcatttgggaaattcaggaggagctatttagtatgcaactgaaaatatgggtctatgcccaggaaacactttgaagctggagtcatgaacatagaggtggtaatggaagctgtgaatatgaatgagatcactctgggaggtgggagaaaataggaaggccaaggacagaaccttgggggaaaacctgaattctgcagaagaaagaggaggggagggataagagaaggagcacagggagaggtgggaggagaaccaggagagacaacaaggcagaaggtgtctgcaaaccacagttacctaagaccttcagagtcagcatataaaaggctactgccaacctgagggagagagggtcattgctaaaggagggacagaggccaactgcagtgggttgagggagaccacggctcaagtacatgcagtcctctttggaggactttagccatgaatgaggagggagacagggcattggcacgatgaaggatctcacttctggaaaggattttttggagacggggacacttgaacatgaacagattgaaggaacaaaaacaagaaaatgttattagtcatgaatgaaggggatagaagaaacaggagagggatgtcagtttctaaaaggaggtgaagaataggggaagcagtggagggaggaaagaggctgaagagaagactgctggtgtgcaggagagcagacggaggagctcccatggggggcctggatcatgtgagtggagagaagtcagccttgcagaatgaggagttctgggggtgctgtgaaggtttggaggcttcaggagccctggctaggtctggagctgctactgcagaggtacaattaaaaatgtacctgtgaatgctgcatgtgactactggattctggctgagagatcacagcagccacctgtgatctttttgtgagggcttagcttccaggagctgagtgggagttgaatgtgggttggagggccccccaggaaagatcaaagggtgtgaggttcaggatgggcgaacctcttaagaactgactggccactctcaaggggctggtagcccagatgtctgatggaggaagcgccaaatcagtctttggtaacaacatggataaaggcctgggtgggaggggtagagaggctgacaaaggcttcctgagggagggcccagtctgagagggaagtaccttctccccaagactgatgatttaaattctgacctgccctttgcatgataccttcccagcctgggagaacttgttgctcagtaagcagacccaggtgctggcctctgtacccaccatggcctctgccctcatcacgacctctacccccaggaaagctgatgggcatgaatgagatcacagagaaactcatgctgccagacacctgtcggagtgaccacattgtggtgcagaaagtgactgccactgccaacctgggtcgtgttccttgtgggacatctgatgagtacaggtactaggccaccagtagaggggaaatgatgagcatgggggccctggtttgaaggaggagccccagctgctgatccccttccaaacacagtcacccttagcagctcttcctcaccccttctattcccacctcaggtttgcagggaggacactgactggtggaagcctcgttctgctgaccctggatgcccggccagctggagctgcccagctgactgtcaacagcgagaaaatggtgattggcaccatgctggtaaaggatgtgatacaggctctgacccagtgacttccaaatgctgtgacctgtttggctcccatctatacctccccatgacacctaggctgtcagtctctctcatctttctctctctctctcatcatcctcctcatgccagatagcattcagggtgtcctctctccctctggaggaccaagccctcccctaatgccctccccatggattccttagtgatctgtgcagagagagatggcagccac

SEQ ID NO: 10765 - DNA, 2750 bp, Homo sapiens
atccctactagaggagaacgcggaaaaagccttctacggctcagaggaggacgaggccaagggcgcggggtctgaggagacggccgccgcggccgccccctcccgaaagccctatgtcatggaccccgaccaccggctgctgctgcgcaacaccaaacccctgctgcagagccgcagcgccgcggtggtgatggcggtggcgcagctctacttccacctggcgcccaaggcggaagtgggcgtcatcgccaaggcgctggtgcgcctgctgcgcagccacagtgaggtgcagtacgttgtgctccagaacgtggccaccatgtccatcaagcgccggggtatgtttgagccctacctgaagagcttctacatcaggtccaccgaccccacccagattaagatcctgaagctggaagtgctgaccaacctggccaatgagaccaacattcctactgtcctacgggaattccagacctatattcgcagcatggacaaggactttgtggcagccacaatccaggccattggacgctgtgcaactaacatcggccgagtccgtgacacctgcctcaatggcctggtgcagctgctgtccaaccgtgatgagcttgtggttgcagagtcagtggtcgtcattaagaaattgctacagatgcagccagcacaacatggagagatcatcaaacacttggcaaagcttacagacaacatccaggtgcccatggcccgagccagcatcctgtggctcatcggagagtactgtgagcatgtccccaggattgcacctgatgtcttaagaaaaatggccaagtcattcacagcagaggaggatattgtcaagctgcaggtcatcaacctggcagccaagctctacctgaccaactctaaacagaccaagctgctgacccagtatgtgctgagtctggccaaatatgaccagaactatgatattcgcgaccgggcgcgcttcacccggcagctcatcgtcccttccgagcagggtggggccctcagccgccatgccaagaagctcttcctggcacccaaaccagctccagtcttggagtcatccttcaaagaccgggaccacttccagctgggctcactgtcccacctgcttaatgccaaggccacaggctaccaggagctcccagactggccggaggaagccccagacccatctgtgcgcaacgtggaggtacctgaatggaccaagtgctcaaatcgggagaagagaaaggagaaggaaaaacccttctactcggactctgagggggagtcaggccccacggagtccgcagacagtgaccctgagtctgagagtgaatcggacagtaagagcagcagtgagagcggctctggggagtccagcagtgagtccgacaatgaagaccaggatgaggatgaggagaaagggagaggcagtgagagtgaacagagtgaggaggatggtaagaggaagacaaagaagaaggtgccagagagaaaaggagaagcgtcatcctctgatgagggcagcgattccagcagtagctcatcagagtccgagatgacatcggagtccgaggaggagcagttagaacctgcctcctggagcaggaaaacacctcccagcagcaaaagtgctcctgcaaccaaggagatctccctgcttgatctagaggattgctccctgctcaacccaagccacctccactttgcctcctcatagtcttatctactcccacagtcacccctcccagtgtccagcctgtgtctcccccagcaattgtgtctaccagtctggctgctgacctggagggcctgacactcacagactccaccctggtaccgtcgcttctgagtccagtatcgggtgttgggcggcaggagctgctgcaccgggtagctggcgaggggctggctgtggactacaccttcagccgccaacctttctccggggatccccacatggtgtccgtgcacatccacttctccaacagctctgatacccccatcaagggcctgcatgtgggcactcccaaactgcctgctggcatcagcatccaagaatttcccgaaattgagtccctggcacctggagaatctgccactgctgtaatgggcattaatttctgtgactcaacccaggcagccaacttccagctgtgcacccagacccgacagttctacgtctccattcagccacctgttggggagctgatggcccctgtgttcatgagtgaaaatgagtttaagaaggaacagggaaagctgatgggcatgaatgagatcacagagaaactcatgctgccagacacctgtcggagtgaccacattgtggtgcagaaagtgactgccactgccaacctgggtcgtgttccttgtgggacatctgatgagtacaggtttgcagggaggacactgactggtggaagcctcgttctgctgaccctggatgcccggccagctggagctgcccagctgactgtcaacagcgagaaaatggtgattggcaccatgctggtaaaggatgtgatacaggctctgacccagtgacttccaaatgctgtgacctgtttggctcccatctatacctccccatgacacctaggctgtcagtctctctcatctttctctctctctctcatcatcctcctcatgccagatagcattcagggtgtcctctctccctctggaggaccaagccctcccctaatgccctccccatggattccttagtgatctgtgcagagagagatggcagccac

SEQ ID NO: 10766 - DNA, 3651 bp, Homo sapiens
gaactagtcacggaatacaactgtgaacatgagacccttcttgtcctcacgatgctctagaggggagcacagatgaagaagcagtcagggacagtcgagtgtaatgggggcagtgggagcagggagaggacctagtctctggcgccggagagaaggaagacaggagcgtgagttgcagagatcatgacccttcaaccccacattctaagtcgacatctaaagccagattaaaatgaataaaggagcacacaggtggcatgatgacctgaaggagatgctggacaccaacaaggattctctcaagctggaggccatgaagaggattgtggcgatgattgcccgaggaaagaatgcttcagacctgtttcccgcggtggtgaagaacgtggcctgtaagaacatagaggtgaagaagcttgtctatgtgtacctggtacgctacgctgaggagcagcaagacctggccctgctgtccatctccaccttccaacgtggcctaaaggatcccaaccagctgattcgtgccagtgccctccgtgtcctctctagcatccgtgtgcccatcatagtgcccatcatgatgctagctatcaaggaagccgcctcggacatgtcaccctatgtgcggaaaacagctgcccacgccatccctaaactctacagtttggactctgaccagaaggatcagctgatagaagtcattgagaagcttctggctgacaagaccacgctggtggcgggcagtgtggtgatggcctttgaggaggtctgcccggagcgcatcgacctgattcacaaaaactaccggaaactctgtaacctgctgatcgacgtggaggagtggggccaggtggtcatcatcagcatgctcacccgctacgcccgcacgcagttcctgagccccacccagaacgaatccctactagaggagaacgcggaaaaagccttctacggctcagaggaggacgaggccaagggcgcggggtctgaggagacggccgccgcggccgccccctcccgaaagccctatgtcatggaccccgaccaccggctgctgctgcgcaacaccaaacccctgctgcagagccgcagcgccgcggtggtgatggcggtggcgcagctctacttccacctggcgcccaaggcggaagtgggcgtcatcgccaaggcgctggtgcgcctgctgcgcagccacagtgaggtgcagtacgttgtgctccagaacgtggccaccatgtccatcaagcgccggggtatgtttgagccctacctgaagagcttctacatcaggtccaccgaccccacccagattaagatcctgaagctggaagtgctgaccaacctggccaatgagaccaacattcctactgtcctacgggaattccagacctatattcgcagcatggacaaggactttgtggcagccacaatccaggccattggacgctgtgcaactaacatcggccgagtccgtgacacctgcctcaatggcctggtgcagctgctgtccaaccgtgatgagcttgtggttgcagagtcagtggtcgtcattaagaaattgctacagatgcagccagcacaacatggagagatcatcaaacacttggcaaagcttacagacaacatccaggtgcccatggcccgagccagcatcctgtggctcatcggagagtactgtgagcatgtccccaggattgcacctgatgtcttaagaaaaatggccaagtcattcacagcagaggaggatattgtcaagctgcaggtcatcaacctggcagccaagctctacctgaccaactctaaacagaccaagctgctgacccagtatgtgctgagtctggccaaatatgaccagaactatgatattcgcgaccgggcgcgcttcacccggcagctcatcgtcccttccgagcagggtggggccctcagccgccatgccaagaagctcttcctggcacccaaaccagctccagtcttggagtcatccttcaaagaccgggaccacttccagctgggctcactgtcccacctgcttaatgccaaggccacaggctaccaggagctcccagactggccggaggaagccccagacccatctgtgcgcaacgtggaggtacctgaatggaccaagtgctcaaatcgggagaagagaaaggagaaggaaaaacccttctactcggactctgagggggagtcaggccccacggagtccgcagacagtgaccctgagtctgagagtgaatcggacagtaagagcagcagtgagagcggctctggggagtccagcagtgagtccgacaatgaagaccaggatgaggatgaggagaaagggagaggcagtgagagtgaacagagtgaggaggatggtaagaggaagacaaagaagaaggtgccagagagaaaaggagaagcgtcatcctctgatgagggcagcgattccagcagtagctcatcagagtccgagatgacatcggagtccgaggaggagcagttagaacctgcctcctggagcaggaaaacacctcccagcagcaaaagtgctcctgcaaccaaggagatctccctgcttgatctagaggatttcacccctcccagtgtccagcctgtgtctcccccagcaattgtgtctaccagtctggctgctgacctggagggcctgacactcacagactccaccctggtaccgtcgcttctgagtccagtatcgggtgttgggcggcaggagctgctgcaccgggtagctggcgaggggctggctgtggactacaccttcagccgccaacctttctccggggatccccacatggtgtccgtgcacatccacttctccaacagctctgatacccccatcaagggcctgcatgtgggcactcccaaactgcctgctggcatcagcatccaagaatttcccgaaattgagtccctggcacctggagaatctgccactgctgtaatgggcattaatttctgtgactcaacccaggcagccaacttccagctgtgcacccagacccgacagttctacgtctccattcagccacctgttggggagctgatggcccctgtgttcatgagtgaaaatgagtttaagaaggaacagggaaagctgatgggcatgaatgagatcacagagaaactcatgctgccagacacctgtcggagtgaccacattgtggtgcagaaagtgactgccactgccaacctgggtcgtgttccttgtgggacatctgatgagtacaggtttgcagggaggacactgactggtggaagcctcgttctgctgaccctggatgcccggccagctggagctgcccagctgactgtcaacagcgagaaaatggtgattggcaccatgctggtaaaggatgtgatacaggctctgacccagtgacttccaaatgctgtgacctgtttggctcccatctatacctccccatgacacctaggctgtcagtctctctcatctttctctctctctctcatcatcctcctcatgccagatagcattcagggtgtcctctctccctctggaggaccaagccctcccctaatgccctccccatggattccttagtgatctgtgcagagagagatggcagccactcccttcagtcctcccagatttctgtagctatttatgtagcaggctca

SEQ ID NO: 10767 - DNA, 2425 bp, Homo sapiens
actgcagcctctgctgaacccctgccgcgccgccgccttcgccagcccggaccggaccggcccgccttcccttcctccgctccagccggcctccggccccgcaacctcctcctcggcgaagtctccctggccgccccatgtcggccgcccccgcctacagcgaagacaagggcggctccgctggccccggggagcccgagtacggccacgaccccgcgagcggcggcatcttctcctccgactacaagcggcatgatgacctgaaggagatgctggacaccaacaaggattctctcaagctggaggccatgaagaggattgtggcgatgattgcccgaggaaagaatgcttcagacctgtttcccgcggtggtgaagaacgtggcctgtaagaacatagaggatcccaaccagctgattcgtgccagtgccctccgtgtcctctctagcatccgtgtgcccatcatagtgcccatcatgatgctagctatcaaggaagccgcctcggacatgtcaccctatgtgcggaaaacagctgcccacgccatccctaaactctacagtttggactctgaccagaaggatcagctgatagaagtcattgagaagcttctggctgacaagaccacgctggtggcgggcagtgtggtgatggcctttgaggaggtctgcccggagcgcatcgacctgattcacaaaaactaccggaaactctgtaacctgctgatcgacgtggaggagtggggccaggtggtcatcatcagcatgctcacccgctacgcccgcacgcagttcctgagccccacccagaacgaatccctactagaggagaacgcggaaaaagccttctacggctcagaggaggacgaggccaagggcgcggggtctgaggagacggccgccgcggccgccccctcccgaaagccctatgtcatggaccccgaccaccggctgctgctgcgcaacaccaaacccctgctgcagagccgcagcgccgcggtggtgatggcggtggcgcagctctacttccacctggcgcccaaggcggaagtgggcgtcatcgccaaggcgctggtgcgcctgctgcgcagccacagtgaggtgcagtacgttgtgctccagaacgtggccaccatgtccatcaagcgccggggtatgtttgagccctacctgaagagcttctacatcaggtccaccgaccccacccagattaagatcctgaagctggaagtgctgaccaacctggccaatgagaccaacattcctactgtcctacgggaattccagacctatattcgcagcatggacaaggactttgtggcagccacaatccaggccattggacgctgtgcaactaacatcggccgagtccgtgacacctgcctcaatggcctggtgcagctgctgtccaaccgtgatgagcttgtggttgcagagtcagtggtcgtcattaagaaattgctacagatgcagccagcacaacatggagagatcatcaaacacttggcaaagcttacagacaacatccaggtgcccatggcccgagccagcatcctgtggctcatcggagagtactgtgagcatgtccccaggattgcacctgatgtcttaagaaaaatggccaagtcattcacagcagaggaggatattgtcaagctgcaggtcatcaacctggcagccaagctctacctgaccaactctaaacaggtaaagattaagagatgaccccccagatactctggtccccagaaactccctagacagtattcttttggccctccctaggcagggctgaactctagctcctattttggaaaagaagaatcagggaaggtggctggtctgcccacataaccaatgctaccccagtgcccacaaagaccttgtagtgctggtggtcactgttgaagagactctcctatgaagctgtgacctccagtctgctagtacaagagtcctgtctgccaccttggaactctggggctgtgaagaaccacagttgattgggataagggaagggcccaacagtggcaggtactgatgggagaacatgcatcccagatgtggtctgtgcttctttccaaagcttgacaatgcttggccagtctgtgccaaagataagggggtgagtctctgcttgggcttgggtggtgctggtggccactgtcattcccaaggtgaaaggttataagagatacacagccaaggatgaggctcaactaagttgtagtatcagggtgttcagagcctcctagctgtctggcatctcctgagatggttccaggagattctcctaaaatgaagcataatgtgctgagcttttcaaggtgtcagggacatcaaacaccatgacgatttccacactctcccactcagttaagcaggacagggattggcaaactactgcccataggctgaatttggcc

SEQ ID NO: 10768 - DNA, 920 bp, Homo sapiens
gagccagcatcctgtggctcatcggagagtactgtgagcatgtccccaggattgcacctgatgtcttaagaaaaatggccaagtcattcacagcagaggaggatattgtcaagctgcaggtcatcaacctggcagccaagctctacctgaccaactctaaacaggtaaagattaagagatgaccccccagatactctggtccccagaaactccctagacagtattcttttggccctccctaggcagggctgaactctagctcctattttggaaaagaagaatcagggaaggtggctggtctgcccacataaccaatgctaccccagtgcccacaaagaccttgtagtgctggtggtcactgttgaagagactctcctatgaagctgtgacctccagtctgctagtacaagagtcctgtctgccaccttggaactctggggctgtgaagaaccacagttgattgggataagggaagggcccaacagtggcaggtactgatgggagaacatgcatcccagatgtggtctgtgcttctttccaaagcttgacaatgcttggccagtctgtgccaaagataagggggtgagtctctgcttgggcttgggtggtgctggtggccactgtcattcccaaggtgaaaggttataagagatacacagccaaggatgaggctcaactaagttgtagtatcagggtgttcagagcctcctagctgtctggcatctcctgagatggttccaggagattctcctaaaatgaagcataatgtgctgagcttttcaaggtgtcagggacatcaaacaccatgacgatttccacactctcccactcagttaagcaggacagggattggcaaactactgcccataggctgaatttggcctattcctgtttttgtaataaagttttgttggaacaca

SEQ ID NO: 10769 - DNA, 842 bp, Homo sapiens
gagccagcatcctgtggctcatcggagagtactgtgagcatgtccccaggattgcacctgatgtcttaagaaaaatggccaagtcattcacagcagaggaggatattgtcaagctgcaggtcatcaacctggcagccaagctctacctgaccaactctaaacaggcagggctgaactctagctcctattttggaaaagaagaatcagggaaggtggctggtctgcccacataaccaatgctaccccagtgcccacaaagaccttgtagtgctggtggtcactgttgaagagactctcctatgaagctgtgacctccagtctgctagtacaagagtcctgtctgccaccttggaactctggggctgtgaagaaccacagttgattgggataagggaagggcccaacagtggcaggtactgatgggagaacatgcatcccagatgtggtctgtgcttctttccaaagcttgacaatgcttggccagtctgtgccaaagataagggggtgagtctctgcttgggcttgggtggtgctggtggccactgtcattcccaaggtgaaaggttataagagatacacagccaaggatgaggctcaactaagttgtagtatcagggtgttcagagcctcctagctgtctggcatctcctgagatggttccaggagattctcctaaaatgaagcataatgtgctgagcttttcaaggtgtcagggacatcaaacaccatgacgatttccacactctcccactcagttaagcaggacagggattggcaaactactgcccataggctgaatttggcctattcctgtttttgtaataaagttttgttggaacaca

SEQ ID NO: 10770 - DNA, 1919 bp, Homo sapiens
gcggccctgattgagaaatccgcgcgcagcctccgccgctgcacactgcagcctctgctgaacccctgccgcgccgccgccttcgccagcccggaccggaccggcccgccttcccttcctccgctccagccggcctccggccccgcaacctcctcctcggcgaagtctccctggccgccccatgtcggccgcccccgcctacagcgaagacaagggcggctccgctggccccggggagcccgagtacggccacgaccccgcgagcggcggcatcttctcctccgactacaagcggcatgatgacctgaaggagatgctggacaccaacaaggattctctcaagctggaggccatgaagaggattgtggcgatgattgcccgaggaaagaatgcttcagacctgtttcccgcggtggtgaagaacgtggcctgtaagaacatagaggtgaagaagcttgtctatgtgtacctggtacgctacgctgaggagcagcaagacctggccctgctgtccatctccaccttccaacgtggcctaaaggatcccaaccagctgattcgtgccagtgccctccgtgtcctctctagcatccgtgtgcccatcatagtgcccatcatgatgctagctatcaaggaagccgcctcggacatgtcaccctatgtgcggaaaacagctgcccacgccatccctaaactctacagtttggactctgaccagaaggatcagctgatagaagtcattgagaagcttctggctgacaagaccacgctggtggcgggcagtgtggtgatggcctttgaggaggtctgcccggagcgcatcgacctgattcacaaaaactaccggaaactctgtaacctgctgatcgacgtggaggagtggggccaggtggtcatcatcagcatgctcacccgctacgcccgcacgcagttcctgagccccacccagaacgaatccctactagaggagaacgcggaaaaagccttctacggctcagaggaggacgaggccaagggcgcggggtctgaggagacggccgccgcggccgccccctcccgaaagccctatgtcatggaccccgaccaccggctgctgctgcgcaacaccaaacccctgctgcagagccgcagcgccgcggtggtgatggcggtggcgcagctctacttccacctggcgcccaaggcggaagtgggcgtcatcgccaaggcgctggtgcgcctgctgcgcagccacagtgaggtgcagtacgttgtgctccagaacgtggccaccatgtccatcaagcgccggggtatgtttgagccctacctgaagagcttctacatcaggtccaccgaccccacccagattaagatcctgaagctggaagtgctgaccaacctggccaatgagaccaacattcctactgtcctacgggaattccagacctatattcgcagcatggacaaggactttgtggcagccacaatccaggccattggacgctgtgcaactaacatcggccgagtccgtgacacctgcctcaatggcctggtgcagctgctgtccaaccgtgatgagcttgtggttgcagagtcagtggtcgtcattaagaaattgctacagatgcagccagcacaacatggagagatcatcaaacacttggcaaagcttacagacaacatccaggtcttcaggtggaaggagcagagacactggaccatgtgaccctgaccttgttacccctgatttgctttccctttggagaccctcaatgagcacgatggactttactactactcttgttttctctctaaagctctagccaaccatggttgagtgacaaatcttgtgtttttctatcgcactgctaagctgaaacatctaaacaaggcattcccaaagattctggagagtaacatggaaataaagtactgag

SEQ ID NO: 10771 - DNA, 766 bp, Homo sapiens
agctatcaaggaagccgcctcggacatgtcaccctatgtgcggaaaacagctgcccacgccatccctaaactctacaggtatgccccagccctgtcccacgctccccaggaggctggttcctaagttctcaacccacccctggcctttcctaagtcttgcctgctgcttctcagagggtttgaggagggtagtttgggggactgacagagatggaggagaacaataaggctggggtgcaggaggtgagcatggcttggacagatattgggaaggctggggctgagagtggcaaattcccctcaccgatttctccctcagtttggactctgaccagaaggatcagctgatagaagtcattgagaagcttctggctgacaagaccacggtgcgtgtataggggcgctccgggaggggtggtgaccggcagccggccttccacccttcgcgttcaccctctcgtctttgttctttccccagctggtggcgggcagtgtggtgatggcctttgaggaggtctgcccggagcgcatcgacctgattcacaaaaactaccggaaactctgtaacctgctgatcgacgtggaggagtggggccaggtggtcatcatcagcatgctcacccgctacgcccgcacgcagttcctgagccccacccagaacgtaagtgggcccagcccaggcagagcgggccgaagtgtgtcccggggaggcgcccacagacccgtcggtctccccgtccaggaatccctactagaggagaacgcg

SEQ ID NO: 10772 - DNA, 433 bp, Homo sapiens
agctatcaaggaagccgcctcggacatgtcaccctatgtgcggaaaacagctgcccacgccatccctaaactctacagtttggactctgaccagaaggatcagctgatagaagtcattgagaagcttctggctgacaagaccacgctggtggcgggcagtgtggtgatggcctttgaggaggtctgcccggagcgcatcgacctgattcacaaaaactaccggaaactctgtaacctgctgatcgacgtggaggagtggggccaggtggtcatcatcagcatgctcacccgctacgcccgcacgcagttcctgagccccacccagaacgtaagtgggcccagcccaggcagagcgggccgaagtgtgtcccggggaggcgcccacagacccgtcggtctccccgtccaggaatccctactagaggagaacgcg

SEQ ID NO: 10773 - DNA, 3460 bp, Homo sapiens
ggctccgccccctcacgcccaccagccgcttccacctctgcccacccgctccacactgaccgtagtcctgccctccgcactggtcctctccccgcaacgacttgccccaccttttcccctcatccgctgacccttgccccaaccgaggggcccggggtgctctgacccgtcctctccgcagtgaggtgcagtacgttgtgctccagaacgtggccaccatgtccatcaagcgccgggtgagcctgcgacggcgggctgtcctcgctgtccgagggccgcttctgcgggcactggaggcgttgtcggggctgggaccggggccggggaaagggaagatggaggaataccctggctgtgcagaggatggggcaggggaggctccaaatacagatagggagcagggcctggatcctgaggggccgctgaggggatgtccagtggaaaaagagctagtcagatctgagatggacgagggaagacttgaggagtggagggcagtggtgaggaggcaaggatcctgggcgctgggtcaggataggaggggtgtctctgggcagcgaggcaggcctggggcttcggtggagctccctagctgcctctcttgtgccagggtatgtttgagccctacctgaagagcttctacatcaggtccaccgaccccacccagattaagatcctgaaggtgagtgagggacagaagtgcatgtgcttcccagccctccccaccccatgtacccactcaaataactcacagtggcccccctggtgcctgcctattcctggggctgagcccaggagcccatgactgccccagctggagctgtttgttcagggagctgggctaaggagggtcagggggagaagggaactgctctttgcctagtacctggtatacacctgctactcttcataaatgaagtaacctgatatcacctcataataatcccaggatgtgtacattatattccttttataaaaatatagactctggccaggcacagtggctcacgcctaatcccagcactttgggaggccgagacaggcagatcgcctgaggtcaggagttcaagaccagcctggccaacatagcaaaacctcgtctcaacgaaaaatacaaaaattagccaggcgtggtggcaggtgcctgtaatcccagctactcgagaggctgaggctagagaattgcctgaacctgggagacagaggttgcagtgagctgagattgtgccattgcactccagcctgggtgacaagagcgaaactccatctcaatctaagaaaaagaaaaaaagactctgggaggtaactgccccaggtcacataattctgctgactccaaggttcacacttttctctcccacccacagtgttatggcccccacacacctgccccctcaggctctcctgcaaacattcacggacaaggaaagtggcgggagcccatacctccatttgattcctgctctgctgcctcattattgagtgatttccttcagcaacagttaatcttcctaacccttgtgaacatccactatgttctaggggtacatgatgagcaaactaatcagggaccctgcctttgtggagcttacagatgtggggaggaggagacattaagcagttaatcacaaggcaaatgtaaaagtccacttacaaaatatggaagaaagtgtggagagctataagggcataaaatagggagacctcatctagtctggtgccagggaagttttcccggaggatatgagacttgagctgaagcctgagagatgaacatgaattatgcagggacagaaatgggaagaactgctccacgcagaggaaacagcatctgcgaagaccctgggttaggaagtggagtgggattggggcctggaagacaagggggacagtgatgggagatgggaggtagacagcaagcagatcattcagggacttacagaccatggtgaatacgatggtctccatcctgaaagcaataggaagctttaagttttcaatgcagtagggaggtgacatggtcatactgtaagcatactgtgtagggaatccacttaagaggcaaactggtcctcttgctttttagacaagtttcataacctgtcaattccctcatcagtgtgaggatgatgcagggctgtcatgaggattgttttctggtctatgaagtgtatttggaatgaaagcacagaaagtccactggccaacccacccattttctgcctctccaaccctccctgcagctggaagtgctgaccaacctggccaatgagaccaacattcctactgtcctacgggaattccaggtacaggccagctcccagccagaagggcctgggagaggggcccatcagatccttgtgccctggtgggtaaacctcctcttatgagcccaaggctggagaaactattatcttacattcccgttccaatgtgtttggctggctttgggccaaggaatcactggattgggggtggagttgtcaccccctttcccaagtcttagtcaccggcatgataagccataaaatgaaaggccacagccttcttgaaggtcaccctcaagcctgcagagtcactgagggatttctttgtcatatcccacagacctatattcgcagcatggacaaggactttgtggcagccacaatccaggccattggacgctgtgcaactaacatcggccgagtccgtgacacctgcctcaatggcctggtgcagctgctgtccaaccgtgatggtcagtgtttccctgagtgtctaaccgtgatgatcagagggtgtctgcctgcaggtctgactctgctggccactggatatccaccagtctgcctagacacaatgtgtatccattggtctgtctgtcttgatcagggcccaagtgttcctacacctctgagggctgctagagaactgaagggggttgagagaaagagccaagggcctggggcactgcaggtgtgtctgtccacctgagtgtggccatctgactgtcttggggtccacacactcatttttgttctgtagagcttgtggttgcagagtcagtggtcgtcattaagaaattgctacagatgcagccagcacaacatggagagatcatcaaacacttggcaaagcttacagacaacatccaggtgagggagaagccatattttcactccccacttcaaggtcctccccatgatttcaagactgtataattacatatgctagccttatcaaaagtaacttccaaaccttaggtcttcaggtggaaggagcagagacactggaccatgtgaccctgaccttgttacccctgatttgctttccctttggagaccctcaatgagcacgatggactttactactactcttgttttctctctaaagctctagccaaccatggttgagtgacaaatcttgtgtttttctatcgcactgctaagctgaaacatctaaacaaggcattcccaaa

SEQ ID NO: 10774 - DNA, 829 bp, Homo sapiens
ggctccgccccctcacgcccaccagccgcttccacctctgcccacccgctccacactgaccgtagtcctgccctccgcactggtcctctccccgcaacgacttgccccaccttttcccctcatccgctgacccttgccccaaccgaggggcccggggtgctctgacccgtcctctccgcagtgaggtgcagtacgttgtgctccagaacgtggccaccatgtccatcaagcgccggggtatgtttgagccctacctgaagagcttctacatcaggtccaccgaccccacccagattaagatcctgaagctggaagtgctgaccaacctggccaatgagaccaacattcctactgtcctacgggaattccagacctatattcgcagcatggacaaggactttgtggcagccacaatccaggccattggacgctgtgcaactaacatcggccgagtccgtgacacctgcctcaatggcctggtgcagctgctgtccaaccgtgatgagcttgtggttgcagagtcagtggtcgtcattaagaaattgctacagatgcagccagcacaacatggagagatcatcaaacacttggcaaagcttacagacaacatccaggtcttcaggtggaaggagcagagacactggaccatgtgaccctgaccttgttacccctgatttgctttccctttggagaccctcaatgagcacgatggactttactactactcttgttttctctctaaagctctagccaaccatggttgagtgacaaatcttgtgtttttctatcgcactgctaagctgaaacatctaaacaaggcattcccaaa

SEQ ID NO: 10775 - DNA, 3420 bp, Homo sapiens
cctgccgcgccgccgccttcgccagcccggaccggaccggcccgccttcccttcctccgctccagccggcctccggccccgcaacctcctcctcggcgaagtctccctggccgccccatgtcggccgcccccgcctacagcgaagacaagggcggctccgctggccccggggagcccgagtacggccacgaccccgcgagcggcggcatcttctcctccgactacaagcggcatgatgacctgaaggagatgctggacaccaacaaggattctctcaagctggaggccatgaagaggattgtggcgatgattgcccgaggaaagaatgcttcagacctgtttcccgcggtggtgaagaacgtggcctgtaagaacatagaggtgaagaagcttgtctatgtgtacctggtacgctacgctgaggagcagcaagacctggccctgctgtccatctccaccttccaacgtggcctaaaggatcccaaccagctgattcgtgccagtgccctccgtgtcctctctagcatccgtgtgcccatcatagtgcccatcatgatgctagctatcaaggaagccgcctcggacatgtcaccctatgtgcggaaaacagctgcccacgccatccctaaactctacagtttggactctgaccagaaggatcagctgatagaagtcattgagaagcttctggctgacaagaccacgctggtggcgggcagtgtggtgatggcctttgaggaggtctgcccggagcgcatcgacctgattcacaaaaactaccggaaactctgtaacctgctgatcgacgtggaggagtggggccaggtggtcatcatcagcatgctcacccgctacgcccgcacgcagttcctgagccccacccagaacgaatccctactagaggagaacgcggaaaaagccttctacggctcagaggaggacgaggccaagggcgcggggtctgaggagacggccgccgcggccgccccctcccgaaagccctatgtcatggaccccgaccaccggctgctgctgcgcaacaccaaacccctgctgcagagccgcagcgccgcggtggtgatggcggtggcgcagctctacttccacctggcgcccaaggcggaagtgggcgtcatcgccaaggcgctggtgcgcctgctgcgcagccacagtgaggtgcagtacgttgtgctccagaacgtggccaccatgtccatcaagcgccggggtatgtttgagccctacctgaagagcttctacatcaggtccaccgaccccacccagattaagatcctgaagctggaagtgctgaccaacctggccaatgagaccaacattcctactgtcctacgggaattccagacctatattcgcagcatggacaaggactttgtggcagccacaatccaggccattggacgctgtgcaactaacatcggccgagtccgtgacacctgcctcaatggcctggtgcagctgctgtccaaccgtgatgagcttgtggttgcagagtcagtggtcgtcattaagaaattgctacagatgcagccagcacaacatggagagatcatcaaacacttggcaaagcttacagacaacatccaggtgcccatggcccgagccagcatcctgtggctcatcggagagtactgtgagcatgtccccaggattgcacctgatgtcttaagaaaaatggccaagtcattcacagcagaggaggatattgtcaagctgcaggtcatcaacctggcagccaagctctacctgaccaactctaaacagaccaagctgctgacccagtatgtgctgagtctggccaaatatgaccagaactatgatattcgcgaccgggcgcgcttcacccggcagctcatcgtcccttccgagcagggtggggccctcagccgccatgccaagaagctcttcctggcacccaaaccagctccagtcttggagtcatccttcaaagaccgggaccacttccagctgggctcactgtcccacctgcttaatgccaaggccacaggctaccaggagctcccagactggccggaggaagccccagacccatctgtgcgcaacgtggaggtacctgaatggaccaagtgctcaaatcgggagaagagaaaggagaaggaaaaacccttctactcggactctgagggggagtcaggccccacggagtccgcagacagtgaccctgagtctgagagtgaatcggacagtaagagcagcagtgagagcggctctggggagtccagcagtgagtccgacaatgaagaccaggatgaggatgaggagaaagggagaggcagtgagagtgaacagagtgaggaggatggtaagaggaagacaaagaagaaggtgccagagagaaaaggagaagcgtcatcctctgatgagggcagcgattccagcagtagctcatcagagtccgagatgacatcggagtccgaggaggagcagttagaacctgcctcctggagcaggaaaacacctcccagcagcaaaagtgctcctgcaaccaaggagatctccctgcttgatctagaggatttcacccctcccagtgtccagcctgtgtctcccccagcaattgtgtctaccagtctggctgctgacctggagggcctgacactcacagactccaccctggtaccgtcgcttctgagtccagtatcgggtgttgggcggcaggagctgctgcaccgggtagctggcgaggggctggctgtggactacaccttcagccgccaacctttctccggggatccccacatggtgtccgtgcacatccacttctccaacagctctgatacccccatcaagggcctgcatgtgggcactcccaaactgcctgctggcatcagcatccaagaatttcccgaaattgagtccctggcacctggagaatctgccactgctgtaatgggcattaatttctgtgactcaacccaggcagccaacttccagctgtgcacccagacccgacagttctacgtctccattcagccacctgttggggagctgatggcccctgtgttcatgagtgaaaatgagtttaagaaggaacagggtttgcagggaggacactgactggtggaagcctcgttctgctgaccctggatgcccggccagctggagctgcccagctgactgtcaacagcgagaaaatggtgattggcaccatgctggtaaaggatgtgatacaggctctgacccagtgacttccaaatgctgtgacctgtttggctcccatctatacctccccatgacacctaggctgtcagtctctctcatctttctctctctctctcatcatcctcctcatgccagatagcattcagggtgtcctctctccctctggaggaccaagccctcccctaatgccctccccatggattccttagtgatctgtgc

SEQ ID NO: 10776 - DNA, 4643 bp, Homo sapiens
ggcgccggtgcctttaagacctcagcgcgcggccctgattgagaaatccgcgcgcagcctccgccgctgcacactgcagcctctgctgaacccctgccgcgccgccgccttcgccagcccggaccggaccggcccgccttcccttcctccgctccagccggcctccggccccgcaacctcctcctcggcgaagtctccctggccgccccatgtcggccgcccccgcctacagcgaagacaagggcggctccgctggccccggggagcccgagtacggccacgaccccgcgagcggcggcatcttctcctccgactacaagcggcatgatgacctgaaggagatgctggacaccaacaaggattctctcaagctggaggccatgaagaggattgtggcgatgattgcccgaggaaagaatgcttcagacctgtttcccgcggtggtgaagaacgtggcctgtaagaacatagaggtgagcactacctggtgagggattgcttgtccccacctcccccaggaccacactcaagcttggggtgaggaaggaaatgatttagcccctgggggcccgacctgctgagaaatgtctctgagccaggagaagacactgtctccatgtccctgaactggatgtggatcaaggtgaagaagcttgtctatgtgtacctggtacgctacgctgaggagcagcaagacctggccctgctgtccatctccaccttccaacgtggcctaaaggatcccaaccagctgattcgtgccagtgccctccgtgtcctctctagcatccgtgtgcccatcatagtgcccatcatgatgctagctatcaaggaagccgcctcggacatgtcaccctatgtgcggaaaacagctgcccacgccatccctaaactctacagtttggactctgaccagaaggatcagctgatagaagtcattgagaagcttctggctgacaagaccacgctggtggcgggcagtgtggtgatggcctttgaggaggtctgcccggagcgcatcgacctgattcacaaaaactaccggaaactctgtaacctgctgatcgacgtggaggagtggggccaggtggtcatcatcagcatgctcacccgctacgcccgcacgcagttcctgagccccacccagaacgaatccctactagaggagaacgcggaaaaagccttctacggctcagaggaggacgaggccaagggcgcggggtctgaggagacggccgccgcggccgccccctcccgaaagccctatgtcatggaccccgaccaccggctgctgctgcgcaacaccaaacccctgctgcagagccgcagcgccgcggtggtgatggcggtggcgcagctctacttccacctggcgcccaaggcggaagtgggcgtcatcgccaaggcgctggtgcgcctgctgcgcagccacagtgaggtgcagtacgttgtgctccagaacgtggccaccatgtccatcaagcgccggggtatgtttgagccctacctgaagagcttctacatcaggtccaccgaccccacccagattaagatcctgaagctggaagtgctgaccaacctggccaatgagaccaacattcctactgtcctacgggaattccagacctatattcgcagcatggacaaggactttgtggcagccacaatccaggccattggacgctgtgcaactaacatcggccgagtccgtgacacctgcctcaatggcctggtgcagctgctgtccaaccgtgatgagcttgtggttgcagagtcagtggtcgtcattaagaaattgctacagatgcagccagcacaacatggagagatcatcaaacacttggcaaagcttacagacaacatccaggtgcccatggcccgagccagcatcctgtggctcatcggagagtactgtgagcatgtccccaggattgcacctgatgtcttaagaaaaatggccaagtcattcacagcagaggaggatattgtcaagctgcaggtcatcaacctggcagccaagctctacctgaccaactctaaacagaccaagctgctgacccagtatgtgctgagtctggccaaatatgaccagaactatgatattcgcgaccgggcgcgcttcacccggcagctcatcgtcccttccgagcagggtggggccctcagccgccatgccaagaagctcttcctggcacccaaaccagctccagtcttggagtcatccttcaaagaccgggaccacttccagctgggctcactgtcccacctgcttaatgccaaggccacaggctaccaggagctcccagactggccggaggaagccccagacccatctgtgcgcaacgtggaggtacctgaatggaccaagtgctcaaatcgggagaagagaaaggagaaggaaaaacccttctactcggactctgagggggagtcaggccccacggagtccgcagacagtgaccctgagtctgagagtgaatcggacagtaagagcagcagtgagagcggctctggggagtccagcagtgagtccgacaatgaagaccaggatgaggatgaggagaaagggagaggcagtgagagtgaacagagtgaggaggatggtaagaggaagacaaagaagaaggtgccagagagaaaaggagaagcgtcatcctctgatgagggcagcgattccagcagtagctcatcagagtccgagatgacatcggagtccgaggaggagcagttagaacctgcctcctggagcaggaaaacacctcccagcagcaaaagtgctcctgcaaccaaggagatctccctgcttgatctagaggattgtgagtttgggtggtaaaagtcacaggggaaaggaggcctggggagcatgaattagaacagcccatagggactctggatcgggttcctcaggtcttgtgggagcaggggagcagacagaacatatcttcaggcctgagagggcagcagggctgacctccccaggtctggggttgaggtctaggaatgggtattttgcgagagcctccaggcagccatgtgccccgctgtccatggtgctgaaatgcgtgctccttgatccctaggctccctgctcaacccaagccacctccactttgcctcctcatagtcttatctactcccacagtcacccctcccagtgtccagcctgtgtctcccccagcaattgtgtctaccagtctggctgctgacctggagggcctgacactcacagactccaccctggtaccgtcgcttctgagtccagtatcgggtgttgggcggcaggagctgctgcaccgggtagctggcgaggggctggctgtggactacaccttcagccgccaacctttctccggggatccccacatggtgtccgtgcacatccacttctccaacagctctgatacccccatcaagggcctgcatgtgggcactcccaaactgcctgctggcatcagcatccaagaatttcccgaaattggtgcgaagggctttggatggggtggaggaggaggctcctgggcagagtcagtctttctgtggttgctgataccctccttgtgccaggccaggggccaagctataggggcacagagatagcatctaacatgatcaacactctggtggacaagacagatgatgaaataagcaagttcacatcagggcgggaggtgcttgcagcagcagatttgggccttggttgtttcaggactaacttaaatgtggtgagggtgagtgggggaaagggtgcttagagttcaggaggaaaccgggaacagtctccagcagccaagaaagccaagattctgtagagggctggtcagctgtgacagtggagaggagagtagggctaggctgggttctagacctatcaggtgatggtggccctccctctccccttcactgccttataccacttcagagtccctggcacctggagaatctgccactgctgtaatgggcattaatttctgtgactcaacccaggcagccaacttccagctgtgcacccagacccgacagttctacgtctccattcagccacctgttggggagctgatggcccctgtgttcatgagtgaaaatgagtttaagaaggaacagggaaagctgatgggcatgaatgagatcacagagaaactcatgctgccagacacctgtcggagtgaccacattgtggtgcagaaagtgactgccactgccaacctgggtcgtgttccttgtgggacatctgatgagtacaggtttgcagggaggacactgactggtggaagcctcgttctgctgaccctggatgcccggccagctggagctgcccagctgactgtcaacagcgagaaaatggtgattggcaccatgctggtaaaggatgtgatacaggctctgacccagtgacttccaaatgctgtgacctgtttggctcccatctatacctccccatgacacctaggctgtcagtctctctcatctttctctctctctctcatcatcctcctcatgccagatagcattcagggtgtcctctctccctctggaggaccaagccctcccctaatgccctccccatggattccttagtgatctgtgcagagagagatggcagccactcccttcagtcctcccagatttctgtagctatttat

SEQ ID NO: 10777 - DNA, 3586 bp, Homo sapiens
gcctcctcgcggacacgccctccgctcggctggcgccggtgcctttaagacctcagcgcgcggccctgattgagaaatccgcgcgcagcctccgccgctgcacactgcagcctctgctgaacccctgccgcgccgccgccttcgccagcccggaccggaccggcccgccttcccttcctccgctccagccggcctccggccccgcaacctcctcctcggcgaagtctccctggccgccccatgtcggccgcccccgcctacagcgaagacaagggcggctccgctggccccggggagcccgagtacggccacgaccccgcgagcggcggcatcttctcctccgactacaagcggcatgatgacctgaaggagatgctggacaccaacaaggattctctcaagctggaggccatgaagaggattgtggcggaccacactcaagcttggggtgaggaaggaaatgatttagcccctgggggcccgacctgctgagaaatgtctctgagccaggagaagacactgtctccatgtccctgaactggatgtggatcaaggtgaagaagcttgtctatgtgtacctggtacgctacgctgaggagcagcaagacctggccctgctgtccatctccaccttccaacgtggcctaaaggatcccaaccagctgattcgtgccagtgccctccgtgtcctctctagcatccgtgtgcccatcatagtgcccatcatgatgctagctatcaaggaagccgcctcggacatgtcaccctatgtgcggaaaacagctgcccacgccatccctaaactctacagtttggactctgaccagaaggatcagctgatagaagtcattgagaagcttctggctgacaagaccacgctggtggcgggcagtgtggtgatggcctttgaggaggtctgcccggagcgcatcgacctgattcacaaaaactaccggaaactctgtaacctgctgatcgacgtggaggagtggggccaggtggtcatcatcagcatgctcacccgctacgcccgcacgcagttcctgagccccacccagaacgaatccctactagaggagaacgcggaaaaagccttctacggctcagaggaggacgaggccaagggcgcggggtctgaggagacggccgccgcggccgccccctcccgaaagccctatgtcatggaccccgaccaccggctgctgctgcgcaacaccaaacccctgctgcagagccgcagcgccgcggtggtgatggcggtggcgcagctctacttccacctggcgcccaaggcggaagtgggcgtcatcgccaaggcgctggtgcgcctgctgcgcagccacagtgaggtgcagtacgttgtgctccagaacgtggccaccatgtccatcaagcgccggggtatgtttgagccctacctgaagagcttctacatcaggtccaccgaccccacccagattaagatcctgaagctggaagtgctgaccaacctggccaatgagaccaacattcctactgtcctacgggaattccagacctatattcgcagcatggacaaggactttgtggcagccacaatccaggccattggacgctgtgcaactaacatcggccgagtccgtgacacctgcctcaatggcctggtgcagctgctgtccaaccgtgatgagcttgtggttgcagagtcagtggtcgtcattaagaaattgctacagatgcagccagcacaacatggagagatcatcaaacacttggcaaagcttacagacaacatccaggtgcccatggcccgagccagcatcctgtggctcatcggagagtactgtgagcatgtccccaggattgcacctgatgtcttaagaaaaatggccaagtcattcacagcagaggaggatattgtcaagctgcaggtcatcaacctggcagccaagctctacctgaccaactctaaacagaccaagctgctgacccagtatgtgctgagtctggccaaatatgaccagaactatgatattcgcgaccgggcgcgcttcacccggcagctcatcgtcccttccgagcagggtggggccctcagccgccatgccaagaagctcttcctggcacccaaaccagctccagtcttggagtcatccttcaaagaccgggaccacttccagctgggctcactgtcccacctgcttaatgccaaggccacaggctaccaggagctcccagactggccggaggaagccccagacccatctgtgcgcaacgtggaggtacctgaatggaccaagtgctcaaatcgggagaagagaaaggagaaggaaaaacccttctactcggactctgagggggagtcaggccccacggagtccgcagacagtgaccctgagtctgagagtgaatcggacagtaagagcagcagtgagagcggctctggggagtccagcagtgagtccgacaatgaagaccaggatgaggatgaggagaaagggagaggcagtgagagtgaacagagtgaggaggatggtaagaggaagacaaagaagaaggtgccagagagaaaaggagaagcgtcatcctctgatgagggcagcgattccagcagtagctcatcagagtccgagatgacatcggagtccgaggaggagcagttagaacctgcctcctggagcaggaaaacacctcccagcagcaaaagtgctcctgcaaccaaggagatctccctgcttgatctagaggatttcacccctcccagtgtccagcctgtgtctcccccagcaattgtgtctaccagtctggctgctgacctggagggcctgacactcacagactccaccctggtaccgtcgcttctgagtccagtatcgggtgttgggcggcaggagctgctgcaccgggtagctggcgaggggctggctgtggactacaccttcagccgccaacctttctccggggatccccacatggtgtccgtgcacatccacttctccaacagctctgatacccccatcaagggcctgcatgtgggcactcccaaactgcctgctggcatcagcatccaagaatttcccgaaattgagtccctggcacctggagaatctgccactgctgtaatgggcattaatttctgtgactcaacccaggcagccaacttccagctgtgcacccagacccgacagttctacgtctccattcagccacctgttggggagctgatggcccctgtgttcatgagtgaaaatgagtttaagaaggaacagggaaagctgatgggcatgaatgagatcacagagaaactcatgctgccagacacctgtcggagtgaccacattgtggtgcagaaagtgactgccactgccaacctgggtcgtgttccttgtgggacatctgatgagtacaggtttgcagggaggacactgactggtggaagcctcgttctgctgaccctggatgcccggccagctggagctgcccagctgactgtcaacagcgagaaaatggtgattggcaccatgctggtaaaggatgtgatacaggctctgacccagtgacttccaaatgctgtgacctgtttggctcccatctatacctccccatg

SEQ ID NO: 10778 - DNA, 21607 bp, Homo sapiens
gtgccagtgccctccgtgtcctctctagcatccgtgtgcccatcatagtgcccatcatgatgctagctatcaaggaagccgcctcggacatgtcaccctatgtgcggaaaacagctgcccacgccatccctaaactctacaggtatgccccagccctgtcccacgctccccaggaggctggttcctaagttctcaacccacccctggcctttcctaagtcttgcctgctgcttctcagagggtttgaggagggtagtttgggggactgacagagatggaggagaacaataaggctggggtgcaggaggtgagcatggcttggacagatattgggaaggctggggctgagagtggcaaattcccctcaccgatttctccctcagtttggactctgaccagaaggatcagctgatagaagtcattgagaagcttctggctgacaagaccacggtgcgtgtataggggcgctccgggaggggtggtgaccggcagccggccttccacccttcgcgttcaccctctcgtctttgttctttccccagctggtggcgggcagtgtggtgatggcctttgaggaggtctgcccggagcgcatcgacctgattcacaaaaactaccggaaactctgtaacctgctgatcgacgtggaggagtggggccaggtggtcatcatcagcatgctcacccgctacgcccgcacgcagttcctgagccccacccagaacgtaagtgggcccagcccaggcagagcgggccgaagtgtgtcccggggaggcgcccacagacccgtcggtctccccgtccaggaatccctactagaggagaacgcggaaaaagccttctacggctcagaggaggacgaggccaagggcgcggggtctgaggagacggccgccgcggccgccccctcccgaaagccctatgtcatggaccccgaccaccggctgctgctgcgcaacaccaaacccctgctgcagagccgcagcgccgcggtggtgatggcggtggcgcagctctacttccacctggcgcccaaggcggaagtgggcgtcatcgccaaggcgctggtgcgcctgctgcgcagccacaggtgcgctccgcccccagccccgccccctccctcgcctcctgccccgccccacgggctgcccggctccgccccctcacgcccaccagccgcttccacctctgcccacccgctccacactgaccgtagtcctgccctccgcactggtcctctccccgcaacgacttgccccaccttttcccctcatccgctgacccttgccccaaccgaggggcccggggtgctctgacccgtcctctccgcagtgaggtgcagtacgttgtgctccagaacgtggccaccatgtccatcaagcgccgggtgagcctgcgacggcgggctgtcctcgctgtccgagggccgcttctgcgggcactggaggcgttgtcggggctgggaccggggccggggaaagggaagatggaggaataccctggctgtgcagaggatggggcaggggaggctccaaatacagatagggagcagggcctggatcctgaggggccgctgaggggatgtccagtggaaaaagagctagtcagatctgagatggacgagggaagacttgaggagtggagggcagtggtgaggaggcaaggatcctgggcgctgggtcaggataggaggggtgtctctgggcagcgaggcaggcctggggcttcggtggagctccctagctgcctctcttgtgccagggtatgtttgagccctacctgaagagcttctacatcaggtccaccgaccccacccagattaagatcctgaaggtgagtgagggacagaagtgcatgtgcttcccagccctccccaccccatgtacccactcaaataactcacagtggcccccctggtgcctgcctattcctggggctgagcccaggagcccatgactgccccagctggagctgtttgttcagggagctgggctaaggagggtcagggggagaagggaactgctctttgcctagtacctggtatacacctgctactcttcataaatgaagtaacctgatatcacctcataataatcccaggatgtgtacattatattccttttataaaaatatagactctggccaggcacagtggctcacgcctaatcccagcactttgggaggccgagacaggcagatcgcctgaggtcaggagttcaagaccagcctggccaacatagcaaaacctcgtctcaacgaaaaatacaaaaattagccaggcgtggtggcaggtgcctgtaatcccagctactcgagaggctgaggctagagaattgcctgaacctgggagacagaggttgcagtgagctgagattgtgccattgcactccagcctgggtgacaagagcgaaactccatctcaatctaagaaaaagaaaaaaagactctgggaggtaactgccccaggtcacataattctgctgactccaaggttcacacttttctctcccacccacagtgttatggcccccacacacctgccccctcaggctctcctgcaaacattcacggacaaggaaagtggcgggagcccatacctccatttgattcctgctctgctgcctcattattgagtgatttccttcagcaacagttaatcttcctaacccttgtgaacatccactatgttctaggggtacatgatgagcaaactaatcagggaccctgcctttgtggagcttacagatgtggggaggaggagacattaagcagttaatcacaaggcaaatgtaaaagtccacttacaaaatatggaagaaagtgtggagagctataagggcataaaatagggagacctcatctagtctggtgccagggaagttttcccggaggatatgagacttgagctgaagcctgagagatgaacatgaattatgcagggacagaaatgggaagaactgctccacgcagaggaaacagcatctgcgaagaccctgggttaggaagtggagtgggattggggcctggaagacaagggggacagtgatgggagatgggaggtagacagcaagcagatcattcagggacttacagaccatggtgaatacgatggtctccatcctgaaagcaataggaagctttaagttttcaatgcagtagggaggtgacatggtcatactgtaagcatactgtgtagggaatccacttaagaggcaaactggtcctcttgctttttagacaagtttcataacctgtcaattccctcatcagtgtgaggatgatgcagggctgtcatgaggattgttttctggtctatgaagtgtatttggaatgaaagcacagaaagtccactggccaacccacccattttctgcctctccaaccctccctgcagctggaagtgctgaccaacctggccaatgagaccaacattcctactgtcctacgggaattccaggtacaggccagctcccagccagaagggcctgggagaggggcccatcagatccttgtgccctggtgggtaaacctcctcttatgagcccaaggctggagaaactattatcttacattcccgttccaatgtgtttggctggctttgggccaaggaatcactggattgggggtggagttgtcaccccctttcccaagtcttagtcaccggcatgataagccataaaatgaaaggccacagccttcttgaaggtcaccctcaagcctgcagagtcactgagggatttctttgtcatatcccacagacctatattcgcagcatggacaaggactttgtggcagccacaatccaggccattggacgctgtgcaactaacatcggccgagtccgtgacacctgcctcaatggcctggtgcagctgctgtccaaccgtgatggtcagtgtttccctgagtgtctaaccgtgatgatcagagggtgtctgcctgcaggtctgactctgctggccactggatatccaccagtctgcctagacacaatgtgtatccattggtctgtctgtcttgatcagggcccaagtgttcctacacctctgagggctgctagagaactgaagggggttgagagaaagagccaagggcctggggcactgcaggtgtgtctgtccacctgagtgtggccatctgactgtcttggggtccacacactcatttttgttctgtagagcttgtggttgcagagtcagtggtcgtcattaagaaattgctacagatgcagccagcacaacatggagagatcatcaaacacttggcaaagcttacagacaacatccaggtgagggagaagccatattttcactccccacttcaaggtcctccccatgatttcaagactgtataattacatatgctagccttatcaaaagtaacttccaaaccttaggtcttcaggtggaaggagcagagacactggaccatgtgaccctgaccttgttacccctgatttgctttccctttggagaccctcaatgagcacgatggactttactactactcttgttttctctctaaagctctagccaaccatggttgagtgacaaatcttgtgtttttctatcgcactgctaagctgaaacatctaaacaaggcattcccaaagattctggagagtaacatggaaataaagtactgagggtacaatgaatccagaaaatcaatcttttacatcatgactgacttagggtcttgaaagctctatgctaatgaagccctagggaagaggggaaatgctgtctaggaaatgtctaccttttaacctctctctatctcaccacccccaactcccatttccagagaacccataatacaacaggccagcacagatgaggagtgctgtttccctggaagtccacaatcctacccacccactttcccgtatttacccatcttcactcctctcccacaaccacaggtgcccatggcccgagccagcatcctgtggctcatcggagagtactgtgagcatgtccccaggattgcacctgatgtcttaagaaaaatggccaagtcattcacagcagaggaggatattgtcaagctgcaggtcatcaacctggcagccaagctctacctgaccaactctaaacaggtaaagattaagagatgaccccccagatactctggtccccagaaactccctagacagtattcttttggccctccctaggcagggctgaactctagctcctattttggaaaagaagaatcagggaaggtggctggtctgcccacataaccaatgctaccccagtgcccacaaagaccttgtagtgctggtggtcactgttgaagagactctcctatgaagctgtgacctccagtctgctagtacaagagtcctgtctgccaccttggaactctggggctgtgaagaaccacagttgattgggataagggaagggcccaacagtggcaggtactgatgggagaacatgcatcccagatgtggtctgtgcttctttccaaagcttgacaatgcttggccagtctgtgccaaagataagggggtgagtctctgcttgggcttgggtggtgctggtggccactgtcattcccaaggtgaaaggttataagagatacacagccaaggatgaggctcaactaagttgtagtatcagggtgttcagagcctcctagctgtctggcatctcctgagatggttccaggagattctcctaaaatgaagcataatgtgctgagcttttcaaggtgtcagggacatcaaacaccatgacgatttccacactctcccactcagttaagcaggacagggattggcaaactactgcccataggctgaatttggcctattcctgtttttgtaataaagttttgttggaacacagccctgctcattcatttacaaattacctatggctgcttttgtgctacaacagcagggttaactagttgcaacagactgtattgcccacaaagcctagaatagttattctctggcccttttataaaaagactctgccaatccttgaagcaaaacctctggctaggtggctggggtctacagatttatagcagggatatcccctggagactgtagcatccctgccatgtccactgtgcgtgggagtctttggatggtggcacttatctttttcagtggcttctttgatccattgtggccagagtgagccccagaggctcaaggtgaggtaggcagggccaccaagtgctgtgactgtaatcaggagtcaaaggacagcagcaacatgtggaggcaactgagtctgtataattaaatatgctagccttatcaaaagtaacttccaaaccttaggtcttcaggtggaaggaggagagacactggaccatgtgaccctgagcttgttatcagtgttgtgggcaaagcagattggagagagagaagttagagggggagagagagaagttagagggagaaagagcaccatggggaagcgttcaatcgttgaaaaaatatttgtatacttcctttgttcaggtgggaggaaggagcaagtgggaggaatgtttgaaaagatgaagcagcctgggtggggagccacccaggtaggtgggagtcttgacatgctcagcaatgagccagagtcctaaaccccaggatggtgaggttggcatgttttcataagcctgggcctgtccacatgtcatttcccccaagttgtcactgtgagctacatgtgcatttgttcatttatttaacatatatgtaggtgggagtctgacatgctcagcactgagccagagtcctaaaccccaggatggtgaggttggcatgttttcataagcctgggcctgtccacatgtcatttcccccaagttgttactgtgagctacatgtgcatttgttcatttatttaacatgtaggcctactatttgcctggtactgtgctgcgtcctgaggatatgacaatgagtgagacacatttacaggtctccagatactcacagccaagtaggagaaacaggacaaaaataaacattttaaacacagcagtaacagctgtcatcagggttggcacagcgagctgtgggtatatacagctgaaccctcccctaggaatgacccctgtcagggaacccagagtaggctgttcaggcaaatggacactcacctccagggcgcccttcacctgcaagtgagtttttgcaggccccttagaatggttatttgattcaataaagatttttgtcctccctttctttctcctttcttcccagcctcttctgggagtggtaaagaagggggagtccttggggtactaggagggaggtggtttggatgcgcacatgaccatgcttgcaaaacagtagtgatgcttcccatcctgggaccatgagtggcaatctgcccagctaaaaggccacagtaatctcagtcattctctccaatttggacatgggcccacggcatgccagatcctggcccaggatgaggccaaggaaatgaccaagatgaggcctctgccctgctattgatcagcagataatcagatactagaccagaggccacaaaggcataacatgcaggtggcgggggatgggggggttggtaatcaaagtggctattacatccacctggatatagaccctggggaaactgcctagcaggttagtttgcttttatgtgtcaggtgagatgtgtggcaggagggtctgccaggggcacagtgggatctacaaccctcccatgtgaccgcctttacagtgaatagaagattctgacaaattttgcagaattgcttttaaaaacgtaaactttttttaatatgctaaaggtaatacatgcttatcatagaacatttggaaaactcagaaaattataagtttaaactattaataagtccaccatttagaagaccaccattaattatatatttccttattttttattcctatatatagtcattcagaagttgtacttttgtctattgtccaatattttaaacttttctgcttcttttcaatgctttcatatttaatacttttttttccccattcacatttcaattaaacttttcacttagaattttctccaggctgggttcagtggctcacacctgtaatcccagcactttgggagcccaaggtgggtgggtcatttgaggtcatgaattcaagaccagcctgaccaacatggcaaaaccctgtctctactaaaagtacaaaaaaattagctgggtgtggtggtgcgctgaaatctcagctacttgggaggctgtggcaggagaattgcttgaacccaggaggtggaggttacagtgagctgagatggtaccaccacactccagcctgggccacagagcaagatccatctcaaaaataaataaaaattaaaaagaatttcctccaaatttttttctactttcacatttttaaatcaattgtattagttttctgctacataataaattactataaatttggtggcttcaaacaacacacgtttattttctcagtgtctatgggtcgagaattcaggtatggcttagttggatcttatgcaaggctacaactgaggtgtcagccaaggctgagtttttatctggaggctgtactggggaaaggtccacttccaagtcacatggtgccacgatccacttccttgcagttgtaggattgtggccctggcttcttgctggctgtcagctgggggctgcccttgccttctagaggccgtccttagctcattgccataggggcctcccaacacggatgcttaatttctccaaagccacaagggagaaagtctctagagccagtctgctagcaagaccgtcttctttttattttttaatttttatgggtacatagtaggtgtatatatttatggggtatgtgagatattttgatacaggcatataatgcataacaatcacatcagggaatggggtatccatcctctcaagcatttatcttttgtgttacaaacaatcaaattacactctcttagttatttataaatgtataataaattattgttgactgtagtcaccctgttgtgctgtcaaatactagatcttacacattctatctaactataattttgtacccattaactatccccacttcccccacccactacccttctcagcctctggtaaccattattctactctccaactccatgagctcaattcttttaatttttagccctcacaaataagtgagaacatgtgaagtttgtttttctgtgcttggcttatttcacttaaaataatgacctctagttctatccatgttgttgcaaatgacaggatctcattcttttttattctttttttatagtactgcattgtgcatatgtaccgtattttctttatctatttgtctgttgatagacacttaagttgctttcaaatcttggctatggtgaacagtgctgcaataaacgtaggtgtgcagatataacttcaatatgttgatttccttacttttgggtatatacatagcattgggattgctggatcatatggtagcactatttttagtttttgtttgtttgtttgagatggagtcttgcactgtcacccaggctggagtgcaatggcatgatctcagctcactgcaacctccgcctcccaggttcaaacgattctcctgcctcagcctcctgagtagctgggattacaggcgcccgccaccaagtctggctaattttcatatttttagtagagatggggtttcaccatgttggccaggctggtcttgaactcctggccgcaagtgatctgcccgactcggcctcccaaagtgctgggattacaggcgtgagccactgcacctggcctatttgtagtgtttttttttgagatggtgtttcactcttttttcccaggctggagtgcaatggcgtgatcttgcctcactgcaacctctgcctcctgggtgcaagtgattcttcttctgcctcagcctcccaagtagctgagattacaggtgcctgccaccacgcctagctaattttttgtatttttagtagagacagggtttcaccatgttggccaggatggtcttgatctcttgacctcgcgatccacccacctcggcctcccaaagtgctgggattacaggtgtgagccaccgtgcccggcctatgtttagttttttaaggaacctccaaactgttctccagacatttccactaacagtgtacaagggttgccttttctccatgttcttgtcagcatttgttattgcctatcttttggatataagcctacttggggtgagatgatatatctttttttgttttgttttgttttttgagacggagtcttgctctgtcacccaggctggagtgtgcagtggtgcgatcttggctcactgcaacctctgcctctgtggttcaagtgattctcctgcctcagcctcctgagtagctgggactacaggcgtgcgtcaccacgccccgttaatttctgtacttttagtaaagatggggtttcgctgtgttggtcaggctggtctcaactcctgatctcaggtgatccgcctgcctcagcctcccaaagtactgggattacaggcatgagccacccgtgcctggcctttcattgtagttttgatttgcatttctctgatgctcaatgatgttgatcaccttttcatatacgtgtttgctatctgtatgtcttcttttgagaaatgtctattcagctcttttgcccatttttaaattggattattgaatttttttttcctattgagttatttgatctccttacgtattctggttattaatcccttgtcagatgggtagtttgcaaattttttcctcctattctgtggcttgtctctttgttgattcctttgctgtgcagaacctttgtaacttgatgtgatcccatttgtctacttttgctttggttgcccgtgcttgtggggtatcactcaagaaatctttgcccagtacaatgtcctggagaatttctctaatgttttcttttattagtttcatagtttgaagtgttagatttaagtttttaatccactatgatttgatttttgcatatggtgagagataggggtctggttttattgttctgcatgtggatatcccgttttcccagcgccatttattgaagagactctcctttccctaatgtatgttcttgatacctttgtcaaaaatgaattcacggccaggcgtggtggctcatgcctgtaatcccagcatcttgggaggccgaggctggtggatcacctgaagtcaggagttcaagagcagcctggccagcatggcgaaaccctgtctctactaaaaatacaaaaattagctgagcgtggtggcgggtgcctgtaatcccagctacttgggaggctgaggcaggagaattgcttgaacccgggaggcggaggttgcagtgagccaagatcgcgccactgcactccagcctaggggacaagagcgagacttcatcttcgtccccccccgccaaaaaaaaaaaagccactgatttttttttttttttttttttttggagacggagttttgctcttgttgcccaggctggagtgcaatgggtttttttttttttttttttttgagatggagttctcactctgttgcccaggctctggactgcagtgacgcgatctccactcaccacaacctctgcctcccgggttcaagcaattctcctgcctcagcctcccgagtagctgggattacaggcatgcaccaccatgcccagctaattttgtatttttagtagagacagggtttctccatgttggtcagactggtctcgaactcctgacctcaggtattctgcctgcctcggcctcccaaagtgcttgctaggattacaggtgtgagccactgtgcctggacaatgctactgattttttttttttttgaaacggagtcttgctctgtcaccaggctggagtgcagtggcgccatcttggctcactgcaaccttcacctcccgggttcaagcggttctcctgcctcagcctcctgagtagctcggactacaggtgtgcatcaccacatccagctaatttttgtatttttagtagagacaggatttcatcatgttggccacgatggtctcaatctcttgatctcacgatctgcctgcctcggcctcccaaagtgctgggattacaggcatcagccaccgcacctggccaatgctactgatttttatgtggattttgtatcctgcgactttactgaatttattagttctaatagttttttggtggaatccttaagattttttaaatataagatcatatcatctgcaaacaaggataatttgaattcttttccaatttggataccctttatttctttctcctgtctgattgctctagatagaacttccaatacagagtcttcttaataaaacataatcataggatcatatatagtcatataccacctttgccatatcctgttggttagaagcaagtctcaggttttgcccatacccaaggtgagggattgcacaaaggcatgaacaccaggaggcagctactggtggggaagaccttagaatctgtctgccacatccatctagagcttaaacttactcatgtgtaatgtgtgaattgaggatatatttcaattttttttaacagccagttttctaagcatgattagcaggcatctgcaaggtagcatgtatgttggcataggttatggaaaggaagtcagtgtttcctgcttaaaattcctctctgacaactggagcctgttggtgagggggagccttgttctgttcttggcacactggagtgtatctcagaggccttcttgaacagcctgtaattcctgcacatcctggctagatgaggtgggggtcttggtggtgcacacaggatgccacaatccacagggaatggccccttggggtggagaagggtaatgaattattataggcaaatcctgcagtgttgaggtggtgggccagccccttcctgtgttggttgttaacatgcagttaaggctgtggacagatggatccaaataccaaacagttctttctagaactaggcaaggacttgaaggagggagtctgtgatcagccagctgggaaatctgtggaggaagacattgtccaaaccaaaagagggatcagcagcctcttgataattgactatgttggtaagggcatccactagccctggccatttagatggtgtctggccaagagaggggcaggttggtgatgaaatctgttgtgatggcatcttattttcatatttttaagtctattctattagcggtgcatgggattgggattgcttatctgtgactataacagtatcgcaggtgctgctttgctggaagggactgagctgaagagggcctgtgggccagattggaggtaggaatgtggaatcatagtggctctctagagtggtgtggggcaattctgccaaagcagctgctcagactctgggtcagcatctgaggggctttgccccttatggacatctgcttgatgtccctgccagattagctgggttaaccatgtccaaggctacacgtaacagtatgtcaccataaacctcaggaagaacagagtcagttccaggctccctcctgccggcccctgatgcccttgggcattctgcttgttgaccacttggtggttttgatcttggtcacaagtgatggaaacatggagacctgggccagggcaggctccttatgtcagcaggtaggcagtgaagggaagcagatggggtgcagctccagcagatgcaggcctaggtgcagtactgatgggctccttggcctgggaaaagccccttaatgatcctgcttcttttctgtaaaatgggggcaataatgcctacttctcagaaggcttggggagattagatgagctagtgtggagcacctagcacagagttggtgccagaaggcacttgataagtgatggctgctaccgctgttgccatgttaaggcaggttagattaggccaagatcatggcagaaatggagatattttaggtctgcagttgtagcttccctgactgcagactgtgaaccctacatgaccttggcaaatgcatgggcagctgcagtttgccctgatgtcattagaagcttccagggaaggataaagacctctgagacccctgggctgctcagaatctactaaatgggtggatagggcatgagggtggcccctgccaaagggacccctgtttatctgccctgtctttttgttgtctaattccccctgggtggtggagcctggaaactgtgaggtccagcagagcattccatacttccacataccctgctgccctagagtaaagaggctggacaggcctggagtggtagggaccacaaatctagggaagaatggagtccagagccaggagtggggaaagtccaaaaggaaaacctcttttgttggcccaaggcagttgtcaaagttgggatcatcaggaggcatgtccagagagatgagagaaaattctgagcccagaacaagggcaggtggggagggacagctgggtggaagcgccggtcctaagcagggagaggagacgttctgcctgaaagtgtcggcttaaagaatctgtttctgagcctcctgtgtccccatccccccgtcagctgacccacctcttcctgttcctccagaccaagctgctgacccagtatgtgctgagtctggccaaatatgaccagaactatgatattcgcgaccgggcgcgcttcacccggcagctcatcgtcccttccgagcagggtggggccctcagccgccatgccaagaagctcttcctggcacccaaaccagctccagtcttggagtcatccttcaaaggtgggagctgaaatcaagggtaaccttcctaggggaatggaaaggaactggccagagtctctgccccagaccttcctgaggcccctagccaggcaccaggcttctgtggacagtcctgctccctggctcactccttttgtccctcctgtggcaccaggaattactctttcaccctcccataaccactgccagcatcatctcacctgagggtctgccttcctggccaggatggacttgtgcctcctctcctctcaggctcccttttccatctccctccctgagcagacactaggctttggaatacataccaagatcttaaataccaaggacccaggaaggcagaaagcaaaacaacacacaaaggagaggtgtatatttttataaaggtcctgagaaagcagttgcctgcattctgtgagcttagtcactacagtcagtccaaatcccaggccccagggcttcagccttgcctctgttcctgggcttggcccttaaggcctcttttcccaagacaacggccttgagatgggcctgggagggaagggtcctcccgctgcttctccgggccccaggagtggaagccaggaacctacacagaagagagcctccttcacaaagctcagttcttctgggtatcttttcgttctttttctcttccctggacctcacgaatggggagattctgagggtgggcacagctttgaaattctcccaggaagaaggcaacagtccctttctccccgacaccatcctcactcacaggcctgtgctgccctcctccagcagtgcctcaactctgatccagacttctacacactcatgctctgactgttcatccctccctgctgagtccagagcctgactagacgtgcatgctgagcagacaggtcggcagcatctgtgggcccagagtctcctcctgcccacctctgtaggctgcctttccctggccctcagtccctgctctggcctggccagacagccttttcttccagcatgtgggcctaaaggtgcagtcagggtggaagagccattagggcacacatccatctccttcccctacccacctgggaagtcccaaccagaatcaccacccagccccacctggaaaacagctcccagagctttccctcactgctgctacctgcctgacctctaaacctatccctagaccgggaccacttccagctgggctcactgtcccacctgcttaatgccaaggccacaggctaccaggagctcccagactggccggaggaagccccagacccatctgtgcgcaacgtggaggtcagcggggtggagggttgaagtgtgtgtgtgtgtgtgtgtgtgtgtgtgtgtgtgtgtgtgtgtgtgtgtgtgtgtgttggtgggggcagacagtagggagccctggcagtgccggcccagccctcctaacaccctcccccacacacacaggaagaagatctctcccttattgagactcacgtgggcctgttgggcgaatacactgaggtcccaccttcgtgtgacgtgtgctctctcccctgccctgtctgtgtccctcttcttcccctgtgtgttgtgctcctgggccttcccatactctgtttccaccttggtttggcagtgctcctctgtgagcagcattccctcccctccatggacagtgcccctttcttcctcctctgttattccctttgtgggacagaccaggtagggcctcacaaagaggtggaataaagggtaagggcttgtgcctgcctgccttctccccaaccatgatgaaatgaccctgcaccctacccccatctccaggtacctgaatggaccaagtgctcaaatcgggagaagagaaaggagaaggaaaaacccttctactcggactctgagggggagtcaggccccacggagtccgcagacagtggtgagcagatggcagagctggggtcctctgtgctctgcccatgcatctgtgtgactgactatatgaggggtatatgtatatggttgtgtgtctaggggtgtgcacctgcttgtgaattgtttgtgcacctgagggattcatgttccaggtgtgtgtgcttgtgcaggtttctatccatggagtccatctgtgtttctgtcagttccagctggcatgtagggctgggggcaggtcagagaggtttgagggttcagtactgaatgtgaaggtggaacccaggtgtctgctccagacccaaggaggcctgcatatgagggaggaggcctcatattgttcctccacagaccctgagtctgagagtgaatcggacagtaagagcagcagtgagagcggctctggggagtccagcagtgagtccgacaatgaagaccaggatgaggatgaggagaaagggagaggcagtgagaggtgagaagggagctagccagatggctggtggggttcagggggctttcctggaaagagggctagcattgagctttagccagtctcctaagagcccctgagcccctcgtgagctgggtggggctgtcagctcacatgacgcctactttcgctggctgcaggagatctctgaggcctcatgggctggtgtggagaagcaaccagagtcctagagcctgagctggcacaagctggcttcaagctctcacggggtccctgctataggacctcaggtgtgaaccctcctggctcaggctccccacaccactccagcttttcagcatttctcctgcttctgtgaagcaaggagggagtgtccaggccaggcctgagccaacctttcccactccttcagtgaacagagtgaggaggatggtaagaggaagacaaagaagaaggtgccagagagaaaaggagaagcgtcatcctctgatgagggcagcgattccagcagtagctcatcagagtccgagatgacatcggagtccgaggaggagcagttagaacctgcctcctggagcaggaaaacagtgagagccttggggcagagtcagggtgtgctcatgggccagggccctccccaacctctgggccaggcccagacatctatctccctaccatccagaacagaacatgacatcttctacccaacccagaacatgccaaggtgctccccttccccacacccacatcccatttttctctttcagcctcccagcagcaaaagtgctcctgcaaccaaggagatctccctgcttgatctagaggattgtgagtttgggtggtaaaagtcacaggggaaaggaggcctggggagcatgaattagaacagcccatagggactctggatcgggttcctcaggtcttgtgggagcaggggagcagacagaacatatcttcaggcctgagagggcagcagggctgacctccccaggtctggggttgaggtctaggaatgggtattttgcgagagcctccaggcagccatgtgccccgctgtccatggtgctgaaatgcgtgctccttgatccctaggctccctgctcaacccaagccacctccactttgcctcctcatagtcttatctactcccacagtcacccctcccagtgtccagcctgtgtctcccccagcaattgtgtctaccagtctggctgctgacctggagggcctgacactcacagactccaccctggtaccgtcggtgagtgggatggaggaggggaccgggctggggcagggacacatccctgtgctgcatcctatggtgtggatgtgtgtggggggtgggtgtgatggaggatgtgatagctttgagtcccagctgctggatggccctaggggacaatgctgggacaggctctctccatcttgctcagttctgtccttccctacccctccactctagcttctgagtccagtatcgggtgttgggcggcaggagctgctgcaccgggtagctggcgaggggctggctgtggactacaccttcagccgccaacctttctccggggatccccacatggtgtccgtgcacatccacttctccaacagctctgatacccccatcaagggcctgcatgtgggcactcccaaactgcctgctggcatcagcatccaagaatttcccgaaattggtgcgaagggctttggatggggtggaggaggaggctcctgggcagagtcagtctttctgtggttgctgataccctccttgtgccaggccaggggccaagctataggggcacagagatagcatctaacatgatcaacactctggtggacaagacagatgatgaaataagcaagttcacatcagggcgggaggtgcttgcagcagcagatttgggccttggttgtttcaggactaacttaaatgtggtgagggtgagtgggggaaagggtgcttagagttcaggaggaaaccgggaacagtctccagcagccaagaaagccaagattctgtagagggctggtcagctgtgacagtggagaggagagtagggctaggctgggttctagacctatcaggtgatggtggccctccctctccccttcactgccttataccacttcagagtccctggcacctggagaatctgccactgctgtaatgggcattaatttctgtgactcaacccaggcagccaacttccagctgtggtatgtgcccaactcgaggtgggggtgagaggatgggctggaaagggacagggtaacaatgaactggaaatggaggtggtgcttagtggggatacatcatgattgggtgggtctggaagccatctcaggccctcattcctgacctcactctttcactgcctccaagctgtgcctctacacagggtgggaagtgaggggagagatgacagccttaattcttctccgtttcctcccacccctcccagcacccagacccgacagttctacgtctccattcagccacctgttggggagctgatggcccctgtgttcatgagtgaaaatgagtttaagaaggaacagggtgagtgctccctgggagtgggcagagagggaagtatagaagctgactccagaatgtccagcttggatggtagggagaatggtggtgtccttcatctagaccaggggtcagcaaactttctgtaacgggccaaagataaatgttttaggctttgagaatcatgtggtctctgttgcagttacaacacgactgtggctgttgaaacatagaaacatccacagacagtatgtaaatgaacgagtatggctgtgttccaagaaatttccatttatatttatagatactgaagtttaaatttcatgtaattttcatgtgtcatgaaatattaatcttttgattgctcccccaacacttaaaaaatattaaaaacattgtgggccatataggtggtgggctggatttggtctggaggctgtaatttgcaaaacctctggcctagaagaaagaagagtggcttgggcaagggaggagggaagatcatggttagttttggataagctgattttgaaatgcatttgggaaattcaggaggagctatttagtatgcaactgaaaatatgggtctatgcccaggaaacactttgaagctggagtcatgaacatagaggtggtaatggaagctgtgaatatgaatgagatcactctgggaggtgggagaaaataggaaggccaaggacagaaccttgggggaaaacctgaattctgcagaagaaagaggaggggagggataagagaaggagcacagggagaggtgggaggagaaccaggagagacaacaaggcagaaggtgtctgcaaaccacagttacctaagaccttcagagtcagcatataaaaggctactgccaacctgagggagagagggtcattgctaaaggagggacagaggccaactgcagtgggttgagggagaccacggctcaagtacatgcagtcctctttggaggactttagccatgaatgaggagggagacagggcattggcacgatgaaggatctcacttctggaaaggattttttggagacggggacacttgaacatgaacagattgaaggaacaaaaacaagaaaatgttattagtcatgaatgaaggggatagaagaaacaggagagggatgtcagtttctaaaaggaggtgaagaataggggaagcagtggagggaggaaagaggctgaagagaagactgctggtgtgcaggagagcagacggaggagctcccatggggggcctggatcatgtgagtggagagaagtcagccttgcagaatgaggagttctgggggtgctgtgaaggtttggaggcttcaggagccctggctaggtctggagctgctactgcagaggtacaattaaaaatgtacctgtgaatgctgcatgtgactactggattctggctgagagatcacagcagccacctgtgatctttttgtgagggcttagcttccaggagctgagtgggagttgaatgtgggttggagggccccccaggaaagatcaaagggtgtgaggttcaggatgggcgaacctcttaagaactgactggccactctcaaggggctggtagcccagatgtctgatggaggaagcgccaaatcagtctttggtaacaacatggataaaggcctgggtgggaggggtagagaggctgacaaaggcttcctgagggagggcccagtctgagagggaagtaccttctccccaagactgatgatttaaattctgacctgccctttgcatgataccttcccagcctgggagaacttgttgctcagtaagcagacccaggtgctggcctctgtacccaccatggcctctgccctcatcacgacctctacccccaggaaagctgatgggcatgaatgagatcaca

SEQ ID NO: 10779 - DNA, 2736 bp, Homo sapiens
gtgccagtgccctccgtgtcctctctagcatccgtgtgcccatcatagtgcccatcatgatgctagctatcaaggaagccgcctcggacatgtcaccctatgtgcggaaaacagctgcccacgccatccctaaactctacagtttggactctgaccagaaggatcagctgatagaagtcattgagaagcttctggctgacaagaccacgctggtggcgggcagtgtggtgatggcctttgaggaggtctgcccggagcgcatcgacctgattcacaaaaactaccggaaactctgtaacctgctgatcgacgtggaggagtggggccaggtggtcatcatcagcatgctcacccgctacgcccgcacgcagttcctgagccccacccagaacgaatccctactagaggagaacgcggaaaaagccttctacggctcagaggaggacgaggccaagggcgcggggtctgaggagacggccgccgcggccgccccctcccgaaagccctatgtcatggaccccgaccaccggctgctgctgcgcaacaccaaacccctgctgcagagccgcagcgccgcggtggtgatggcggtggcgcagctctacttccacctggcgcccaaggcggaagtgggcgtcatcgccaaggcgctggtgcgcctgctgcgcagccacagtgaggtgcagtacgttgtgctccagaacgtggccaccatgtccatcaagcgccggggtatgtttgagccctacctgaagagcttctacatcaggtccaccgaccccacccagattaagatcctgaagctggaagtgctgaccaacctggccaatgagaccaacattcctactgtcctacgggaattccagacctatattcgcagcatggacaaggactttgtggcagccacaatccaggccattggacgctgtgcaactaacatcggccgagtccgtgacacctgcctcaatggcctggtgcagctgctgtccaaccgtgatgagcttgtggttgcagagtcagtggtcgtcattaagaaattgctacagatgcagccagcacaacatggagagatcatcaaacacttggcaaagcttacagacaacatccaggtgcccatggcccgagccagcatcctgtggctcatcggagagtactgtgagcatgtccccaggattgcacctgatgtcttaagaaaaatggccaagtcattcacagcagaggaggatattgtcaagctgcaggtcatcaacctggcagccaagctctacctgaccaactctaaacagaccaagctgctgacccagtatgtgctgagtctggccaaatatgaccagaactatgatattcgcgaccgggcgcgcttcacccggcagctcatcgtcccttccgagcagggtggggccctcagccgccatgccaagaagctcttcctggcacccaaaccagctccagtcttggagtcatccttcaaagaccgggaccacttccagctgggctcactgtcccacctgcttaatgccaaggccacaggctaccaggagctcccagactggccggaggaagccccagacccatctgtgcgcaacgtggaggtacctgaatggaccaagtgctcaaatcgggagaagagaaaggagaaggaaaaacccttctactcggactctgagggggagtcaggccccacggagtccgcagacagtggtgtctgctccagacccaaggaggcctgcatatgagggaggaggcctcatattgttcctccacagaccctgagtctgagagtgaatcggacagtaagagcagcagtgagagcggctctggggagtccagcagtgagtccgacaatgaagaccaggatgaggatgaggagaaagggagaggcagtgagagtgaacagagtgaggaggatggtaagaggaagacaaagaagaaggtgccagagagaaaaggagaagcgtcatcctctgatgagggcagcgattccagcagtagctcatcagagtccgagatgacatcggagtccgaggaggagcagttagaacctgcctcctggagcaggaaaacacctcccagcagcaaaagtgctcctgcaaccaaggagatctccctgcttgatctagaggattgctccctgctcaacccaagccacctccactttgcctcctcatagtcttatctactcccacagtcacccctcccagtgtccagcctgtgtctcccccagcaattgtgtctaccagtctggctgctgacctggagggcctgacactcacagactccaccctggtaccgtcgcttctgagtccagtatcgggtgttgggcggcaggagctgctgcaccgggtagctggcgaggggctggctgtggactacaccttcagccgccaacctttctccggggatccccacatggtgtccgtgcacatccacttctccaacagctctgatacccccatcaagggcctgcatgtgggcactcccaaactgcctgctggcatcagcatccaagaatttcccgaaattgagtccctggcacctggagaatctgccactgctgtaatgggcattaatttctgtgactcaacccaggcagccaacttccagctgtgcacccagacccgacagttctacgtctccattcagccacctgttggggagctgatggcccctgtgttcatgagtgaaaatgagtttaagaaggaacagggaaagctgatgggcatgaatgagatcaca

SEQ ID NO: 10780 - DNA, 3697 bp, Homo sapiens
gagaaatccgcgcgcagcctccgccgctgcacactgcagcctctgctgaacccctgccgcgccgccgccttcgccagcccggaccggaccggcccgccttcccttcctccgctccagccggcctccggccccgcaacctcctcctcggcgaagtctccctggccgccccatgtcggccgcccccgcctacagcgaagacaagggcggctccgctggccccggggagcccgagtacggccacgaccccgcgagcggcggcatcttctcctccgactacaagcggcatgatgacctgaaggagatgctggacaccaacaaggattctctcaagctggaggccatgaagaggattgtggcgatgattgcccgaggaaagaatgcttcagacctgtttcccgcggtggtgaagaacgtggcctgtaagaacatagaggtgaagaagcttgtctatgtgtacctggtacgctacgctgaggagcagcaagacctggccctgctgtccatctccaccttccaacgtggcctaaaggatcccaaccagctgattcgtgccagtgccctccgtgtcctctctagcatccgtgtgcccatcatagtgcccatcatgatgctagctatcaaggaagccgcctcggacatgtcaccctatgtgcggaaaacagctgcccacgccatccctaaactctacagtttggactctgaccagaaggatcagctgatagaagtcattgagaagcttctggctgacaagaccacgctggtggcgggcagtgtggtgatggcctttgaggaggtctgcccggagcgcatcgacctgattcacaaaaactaccggaaactctgtaacctgctgatcgacgtggaggagtggggccaggtggtcatcatcagcatgctcacccgctacgcccgcacgcagttcctgagccccacccagaacgaatccctactagaggagaacgcggaaaaagccttctacggctcagaggaggacgaggccaagggcgcggggtctgaggagacggccgccgcggccgccccctcccgaaagccctatgtcatggaccccgaccaccggctgctgctgcgcaacaccaaacccctgctgcagagccgcagcgccgcggtggtgatggcggtggcgcagctctacttccacctggcgcccaaggcggaagtgggcgtcatcgccaaggcgctggtgcgcctgctgcgcagccacagtgaggtgcagtacgttgtgctccagaacgtggccaccatgtccatcaagcgccggggtatgtttgagccctacctgaagagcttctacatcaggtccaccgaccccacccagattaagatcctgaagctggaagtgctgaccaacctggccaatgagaccaacattcctactgtcctacgggaattccagacctatattcgcagcatggacaaggactttgtggcagccacaatccaggccattggacgctgtgcaactaacatcggccgagtccgtgacacctgcctcaatggcctggtgcagctgctgtccaaccgtgatgagcttgtggttgcagagtcagtggtcgtcattaagaaattgctacagatgcagccagcacaacatggagagatcatcaaacacttggcaaagcttacagacaacatccaggtgcccatggcccgagccagcatcctgtggctcatcggagagtactgtgagcatgtccccaggattgcacctgatgtcttaagaaaaatggccaagtcattcacagcagaggaggatattgtcaagctgcaggtcatcaacctggcagccaagctctacctgaccaactctaaacagaccaagctgctgacccagtatgtgctgagtctggccaaatatgaccagaactatgatattcgcgaccgggcgcgcttcacccggcagctcatcgtcccttccgagcagggtggggccctcagccgccatgccaagaagctcttcctggcacccaaaccagctccagtcttggagtcatccttcaaagaccgggaccacttccagctgggctcactgtcccacctgcttaatgccaaggccacaggctaccaggagctcccagactggccggaggaagccccagacccatctgtgcgcaacgtggaggtacctgaatggaccaagtgctcaaatcgggagaagagaaaggagaaggaaaaacccttctactcggactctgagggggagtcaggccccacggagtccgcagacagtgaccctgagtctgagagtgaatcggacagtaagagcagcagtgagagcggctctggggagtccagcagtgagtccgacaatgaagaccaggatgaggatgaggagaaagggagaggcagtgagagtgaacagagtgaggaggatggtaagaggaagacaaagaagaaggtgccagagagaaaaggagaagcgtcatcctctgatgagggcagcgattccagcagtagctcatcagagtccgagatgacatcggagtccgaggaggagcagttagaacctgcctcctggagcaggaaaacacctcccagcagcaaaagtgctcctgcaaccaaggagatctccctgcttgatctagaggatttcacccctcccagtgtccagcctgtgtctcccccagcaattgtgtctaccagtctggctgctgacctggagggcctgacactcacagactccaccctggtaccgtcgcttctgagtccagtatcgggtgttgggcggcaggagctgctgcaccgggtagctggcgaggggctggctgtggactacaccttcagccgccaacctttctccggggatccccacatggtgtccgtgcacatccacttctccaacagctctgatacccccatcaagggcctgcatgtgggcactcccaaactgcctgctggcatcagcatccaagaatttcccgaaattgagtccctggcacctggagaatctgccactgctgtaatgggcattaatttctgtgactcaacccaggcagccaacttccagctgtgcacccagacccgacagttctacgtctccattcagccacctgttggggagctgatggcccctgtgttcatgagtgaaaatgagtttaagaaggaacagggaaagctgatgggcatgaatgagatcacagagaaactcatgctgccagacacctgtcggagtgaccacattgtggtgcagaaagtgactgccactgccaacctgggtcgtgttccttgtgggacatctgatgagtacaggtttgcagggaggacactgactggtggaagcctcgttctgctgaccctggatgcccggccagctggagctgcccagctgactgtcaacagcgagaaaatggtgattggcaccatgctggtaaaggatgtgatacaggctctgacccagtgacttccaaatgctgtgacctgtttggctcccatctatacctccccatgacacctaggctgtcagtctctctcatctttctctctctctctcatcatcctcctcatgccagatagcattcagggtgtcctctctccctctggaggaccaagccctcccctaatgccctccccatggattccttagtgatctgtgcagagagagatggcagccactcccttcagtcctcccagatttctgtagctatttatgtagcaggctcaataaaatgtcttctctcta

SEQ ID NO: 10781 - DNA, 3893 bp, Homo sapiens
tcacgcccaccagccgcttccacctctgcccacccgctccacactgaccgtagtcctgccctccgcactggtcctctccccgcaacgacttgccccaccttttcccctcatccgctgacccttgccccaaccgaggggcccggggtgctctgacccgtcctctccgcagtgaggtgcagtacgttgtgctccagaacgtggccaccatgtccatcaagcgccgggtgagcctgcgacggcgggctgtcctcgctgtccgagggccgcttctgcgggcactggaggcgttgtcggggctgggaccggggccggggaaagggaagatggaggaataccctggctgtgcagaggatggggcaggggaggctccaaatacagatagggagcagggcctggatcctgaggggccgctgaggggatgtccagtggaaaaagagctagtcagatctgagatggacgagggaagacttgaggagtggagggcagtggtgaggaggcaaggatcctgggcgctgggtcaggataggaggggtgtctctgggcagcgaggcaggcctggggcttcggtggagctccctagctgcctctcttgtgccagggtatgtttgagccctacctgaagagcttctacatcaggtccaccgaccccacccagattaagatcctgaaggtgagtgagggacagaagtgcatgtgcttcccagccctccccaccccatgtacccactcaaataactcacagtggcccccctggtgcctgcctattcctggggctgagcccaggagcccatgactgccccagctggagctgtttgttcagggagctgggctaaggagggtcagggggagaagggaactgctctttgcctagtacctggtatacacctgctactcttcataaatgaagtaacctgatatcacctcataataatcccaggatgtgtacattatattccttttataaaaatatagactctggccaggcacagtggctcacgcctaatcccagcactttgggaggccgagacaggcagatcgcctgaggtcaggagttcaagaccagcctggccaacatagcaaaacctcgtctcaacgaaaaatacaaaaattagccaggcgtggtggcaggtgcctgtaatcccagctactcgagaggctgaggctagagaattgcctgaacctgggagacagaggttgcagtgagctgagattgtgccattgcactccagcctgggtgacaagagcgaaactccatctcaatctaagaaaaagaaaaaaagactctgggaggtaactgccccaggtcacataattctgctgactccaaggttcacacttttctctcccacccacagtgttatggcccccacacacctgccccctcaggctctcctgcaaacattcacggacaaggaaagtggcgggagcccatacctccatttgattcctgctctgctgcctcattattgagtgatttccttcagcaacagttaatcttcctaacccttgtgaacatccactatgttctaggggtacatgatgagcaaactaatcagggaccctgcctttgtggagcttacagatgtggggaggaggagacattaagcagttaatcacaaggcaaatgtaaaagtccacttacaaaatatggaagaaagtgtggagagctataagggcataaaatagggagacctcatctagtctggtgccagggaagttttcccggaggatatgagacttgagctgaagcctgagagatgaacatgaattatgcagggacagaaatgggaagaactgctccacgcagaggaaacagcatctgcgaagaccctgggttaggaagtggagtgggattggggcctggaagacaagggggacagtgatgggagatgggaggtagacagcaagcagatcattcagggacttacagaccatggtgaatacgatggtctccatcctgaaagcaataggaagctttaagttttcaatgcagtagggaggtgacatggtcatactgtaagcatactgtgtagggaatccacttaagaggcaaactggtcctcttgctttttagacaagtttcataacctgtcaattccctcatcagtgtgaggatgatgcagggctgtcatgaggattgttttctggtctatgaagtgtatttggaatgaaagcacagaaagtccactggccaacccacccattttctgcctctccaaccctccctgcagctggaagtgctgaccaacctggccaatgagaccaacattcctactgtcctacgggaattccaggtacaggccagctcccagccagaagggcctgggagaggggcccatcagatccttgtgccctggtgggtaaacctcctcttatgagcccaaggctggagaaactattatcttacattcccgttccaatgtgtttggctggctttgggccaaggaatcactggattgggggtggagttgtcaccccctttcccaagtcttagtcaccggcatgataagccataaaatgaaaggccacagccttcttgaaggtcaccctcaagcctgcagagtcactgagggatttctttgtcatatcccacagacctatattcgcagcatggacaaggactttgtggcagccacaatccaggccattggacgctgtgcaactaacatcggccgagtccgtgacacctgcctcaatggcctggtgcagctgctgtccaaccgtgatggtcagtgtttccctgagtgtctaaccgtgatgatcagagggtgtctgcctgcaggtctgactctgctggccactggatatccaccagtctgcctagacacaatgtgtatccattggtctgtctgtcttgatcagggcccaagtgttcctacacctctgagggctgctagagaactgaagggggttgagagaaagagccaagggcctggggcactgcaggtgtgtctgtccacctgagtgtggccatctgactgtcttggggtccacacactcatttttgttctgtagagcttgtggttgcagagtcagtggtcgtcattaagaaattgctacagatgcagccagcacaacatggagagatcatcaaacacttggcaaagcttacagacaacatccaggtgagggagaagccatattttcactccccacttcaaggtcctccccatgatttcaagactgtataattacatatgctagccttatcaaaagtaacttccaaaccttaggtcttcaggtggaaggagcagagacactggaccatgtgaccctgaccttgttacccctgatttgctttccctttggagaccctcaatgagcacgatggactttactactactcttgttttctctctaaagctctagccaaccatggttgagtgacaaatcttgtgtttttctatcgcactgctaagctgaaacatctaaacaaggcattcccaaagattctggagagtaacatggaaataaagtactgagggtacaatgaatccagaaaatcaatcttttacatcatgactgacttagggtcttgaaagctctatgctaatgaagccctagggaagaggggaaatgctgtctaggaaatgtctaccttttaacctctctctatctcaccacccccaactcccatttccagagaacccataatacaacaggccagcacagatgaggagtgctgtttccctggaagtccacaatcctacccacccactttcccgtatttacccatcttcactcctctcccacaaccacaggtgcccatggcccgagccagcatcctgtggctcatcggagagtactgtgagcatgtccccaggattgcacctgatgtcttaagaaaaatggccaagtcattcacagcagaggaggatattgtcaagctgcag

SEQ ID NO: 10782 - DNA, 466 bp, Homo sapiens
tcacgcccaccagccgcttccacctctgcccacccgctccacactgaccgtagtcctgccctccgcactggtcctctccccgcaacgacttgccccaccttttcccctcatccgctgacccttgccccaaccgaggggcccggggtgctctgacccgtcctctccgcagtgaggtgcagtacgttgtgctccagaacgtggccaccatgtccatcaagcgccggagcttgtggttgcagagtcagtggtcgtcattaagaaattgctacagatgcagccagcacaacatggagagatcatcaaacacttggcaaagcttacagacaacatccaggtgcccatggcccgagccagcatcctgtggctcatcggagagtactgtgagcatgtccccaggattgcacctgatgtcttaagaaaaatggccaagtcattcacagcagaggaggatattgtcaagctgcag

SEQ ID NO: 10783 - DNA, 3461 bp, Homo sapiens
gcacactgcagcctctgctgaacccctgccgcgccgccgccttcgccagcccggaccggaccggcccgccttcccttcctccgctccagccggcctccggccccgcaacctcctcctcggcgaagtctccctggccgccccatgtcggccgcccccgcctacagcgaagacaagggcggctccgctggccccggggagcccgagtacggccacgaccccgcgagcggcggcatcttctcctccgactacaagcggcatgatgacctgaaggagatgctggacaccaacaaggattctctcaagctggaggccatgaagaggattgtggcggatcccaaccagctgattcgtgccagtgccctccgtgtcctctctagcatccgtgtgcccatcatagtgcccatcatgatgctagctatcaaggaagccgcctcggacatgtcaccctatgtgcggaaaacagctgcccacgccatccctaaactctacagtttggactctgaccagaaggatcagctgatagaagtcattgagaagcttctggctgacaagaccacgctggtggcgggcagtgtggtgatggcctttgaggaggtctgcccggagcgcatcgacctgattcacaaaaactaccggaaactctgtaacctgctgatcgacgtggaggagtggggccaggtggtcatcatcagcatgctcacccgctacgcccgcacgcagttcctgagccccacccagaacgaatccctactagaggagaacgcggaaaaagccttctacggctcagaggaggacgaggccaagggcgcggggtctgaggagacggccgccgcggccgccccctcccgaaagccctatgtcatggaccccgaccaccggctgctgctgcgcaacaccaaacccctgctgcagagccgcagcgccgcggtggtgatggcggtggcgcagctctacttccacctggcgcccaaggcggaagtgggcgtcatcgccaaggcgctggtgcgcctgctgcgcagccacagtgaggtgcagtacgttgtgctccagaacgtggccaccatgtccatcaagcgccggggtatgtttgagccctacctgaagagcttctacatcaggtccaccgaccccacccagattaagatcctgaagctggaagtgctgaccaacctggccaatgagaccaacattcctactgtcctacgggaattccagacctatattcgcagcatggacaaggactttgtggcagccacaatccaggccattggacgctgtgcaactaacatcggccgagtccgtgacacctgcctcaatggcctggtgcagctgctgtccaaccgtgatgagcttgtggttgcagagtcagtggtcgtcattaagaaattgctacagatgcagccagcacaacatggagagatcatcaaacacttggcaaagcttacagacaacatccaggtgcccatggcccgagccagcatcctgtggctcatcggagagtactgtgagcatgtccccaggattgcacctgatgtcttaagaaaaatggccaagtcattcacagcagaggaggatattgtcaagctgcaggtcatcaacctggcagccaagctctacctgaccaactctaaacagaccaagctgctgacccagtatgtgctgagtctggccaaatatgaccagaactatgatattcgcgaccgggcgcgcttcacccggcagctcatcgtcccttccgagcagggtggggccctcagccgccatgccaagaagctcttcctggcacccaaaccagctccagtcttggagtcatccttcaaagaccgggaccacttccagctgggctcactgtcccacctgcttaatgccaaggccacaggctaccaggagctcccagactggccggaggaagccccagacccatctgtgcgcaacgtggaggtacctgaatggaccaagtgctcaaatcgggagaagagaaaggagaaggaaaaacccttctactcggactctgagggggagtcaggccccacggagtccgcagacagtgaccctgagtctgagagtgaatcggacagtaagagcagcagtgagagcggctctggggagtccagcagtgagtccgacaatgaagaccaggatgaggatgaggagaaagggagaggcagtgagagtgaacagagtgaggaggatggtaagaggaagacaaagaagaaggtgccagagagaaaaggagaagcgtcatcctctgatgagggcagcgattccagcagtagctcatcagagtccgagatgacatcggagtccgaggaggagcagttagaacctgcctcctggagcaggaaaacacctcccagcagcaaaagtgctcctgcaaccaaggagatctccctgcttgatctagaggatttcacccctcccagtgtccagcctgtgtctcccccagcaattgtgtctaccagtctggctgctgacctggagggcctgacactcacagactccaccctggtaccgtcgcttctgagtccagtatcgggtgttgggcggcaggagctgctgcaccgggtagctggcgaggggctggctgtggactacaccttcagccgccaacctttctccggggatccccacatggtgtccgtgcacatccacttctccaacagctctgatacccccatcaagggcctgcatgtgggcactcccaaactgcctgctggcatcagcatccaagaatttcccgaaattgagtccctggcacctggagaatctgccactgctgtaatgggcattaatttctgtgactcaacccaggcagccaacttccagctgtgcacccagacccgacagttctacgtctccattcagccacctgttggggagctgatggcccctgtgttcatgagtgaaaatgagtttaagaaggaacagggaaagctgatgggcatgaatgagatcacagagaaactcatgctgccagacacctgtcggagtgaccacattgtggtgcagaaagtgactgccactgccaacctgggtcgtgttccttgtgggacatctgatgagtacaggtttgcagggaggacactgactggtggaagcctcgttctgctgaccctggatgcccggccagctggagctgcccagctgactgtcaacagcgagaaaatggtgattggcaccatgctggtaaaggatgtgatacaggctctgacccagtgacttccaaatgctgtgacctgtttggctcccatctatacctccccatgacacctaggctgtcagtctctctcatctttctctctctctctcatcatcctcctcatgccagatagcattcagggtgtcctctctccctctggaggaccaagccctcccctaatgccctccccatggattccttagtgatctgtgcagagagagatggcagccactcccttcagtcctcccagatttctgtagct

SEQ ID NO: 10784 - DNA, 5124 bp, Homo sapiens
gggaccccagactgcgttaggcagcagatgaccgcctgaatctagatggagagaaacccaccatttttctaggccctggattatgtagaagatttagatactaagcctcaagagacgtctttcctctcatttacggtcttcctgcatatttaaaatttctaatacggtagacagagtcggtgtctttgaagctgttaatcaggcaatttcctgggcactccagctgcgggtcctcgcggccttctcggcttctccagcttcggtaggagaggatccggcgccgaatcactgactggcacaggtgttgggaaaatgatccacagtctatttctcataaactgttccggtgacatatttctagagaagcactggaagagcgttgtgagccagtctgtctgtgattatttctttgaagctcaagagaaagctgctgatgttgaaaatgtaccacctgtcatttcaacacctcaccactacctcatcagtatctaccgggataagctcttctttgtatctgtcatacagaccgaagtgccacctctctttgtaattgagttcctacatcgagttgctgacacttttcaggactactttggtgagtgttcagaggctgcaattaaggataatgtggtcatagtatatgaactcttagaagaaatgttagacaatggatttccactggctaccgaatctaacattttgaaagaattgattaaaccaccaacaattctacgctctgttgtcaactctattacaggcagtagtaatgttggggacacactccccaccgggcagctgtccaacataccatggcgtcgggcaggggtaaagtacacaaacaatgaagcctattttgatgttgttgaagaaatagacgcaattatagataaatcaggatctacagtctttgcagaaattcagggggtcattgatgcttgcattaaactatctggaatgcctgatctctccctttctttcatgaaccctaggcttctggatgatgtcagctttcacccctgcatccggttcaagcgttgggaatctgaaagagttttgtcatttattcctccagatggaaatttccgactcatatcataccgtgtcagctcacaaaatctagtggcaataccagtgtatgtgaaacatagtatcagctttaaggagaacagttcttgcggcagatttgatataacaattggaccaaagcagaatatggggaaaactattgaaggaattacagtgacagttcacatgccaaaagttgtgctgaacatgaacctgacacccacacaaggcagctatacatttgatccagtcaccaaggtactaacatgggatgtgggaaaaattactccacaaaagctcccaagtcttaaaggactggtaaatttacagtctggagcccccaaaccagaagagaatccgagcctcaacatacagtttaagatccagcagcttgctatttcaggcttaaaagtaaaccgtttggacatgtatggggagaaatataagccatttaaaggagtcaaatacgtcacgaaagctggaaagttccaagtgaggacatgagaagaggccaaaattcctcaggaccagtttgttttccaagtgtcattacgatgtatcactattaggtaccaagtgagtgggaatacatattctagttaaagcatttgtgtctagctacacaccgctaacaaagttacttagttatcaatgtaggattcttaaggagctttaagctaaggaaaccttttagtgacttagcttattttgtatcttttcacttaggaagattttggaggtgatttttttccataggaggataccatctggcggctgcacattgtaacagtaaaggcagaaagctgtagtgataacctctctcctaaaagagttaactggtctcatccagcagaagctatcttaaatctgtgatgtgtcaggtgcagccaaatatcacaccttctgatcttagccatcccaaaccagtatctgtcccgagaggaaattccccccacccccagaagtttacagaaaactgcctcttcaagtgtttgccttattcagcttttcacttgtgccattaagcaagcactgtagcaaaagccacttccacatggccctggcagggagcactgctgctccatgctccattctcactgtacttggtattgtattttttataaataagatttttatgtaaagcttagaatttgatttacagggaccttgctgcagtaaataccatctcaattttgtgccactggttcagctgttagcacagtaaaaaaatcatttgtatcaaaggggcaaatgctttattaaggtagtaaaagggaacattacttctgcttttaggaagttactgcaagcacaagcatttgtgcttttaagcaaattaaagtagtaaaagaaaaacttaagtgaaacctttgccatcttcatgttttataatataaagcttacccaacaccagttaagccatggttaacctaaatgcctcatgccccagttcagcaaaaggaggaaaatgtgcctgcctcacagtcatcagtctttttaaatcttttttgttgttgttcttaagggtttgaatttgtctgcattccttgtctttaggggaaattcccttttcatattgtgtgcttcccaaagctatagtcatagatttcttccagaaactattgtcataattgtcactggagtgcttaaatatacgtactatactgacaaaatacatggaagtgagttataatgaggcagaaacaaaatcctcggtaacattgatgatactctaccgatcaccgtggttttggaaagtcagtcaacagttgtattattgcactcaatttcattgtgacattttatttaacttcttcatcttggtggtccttgcccagttattttgcctcattagacatcaagaaatggagaaagactgaaagttaatatcttaagtgcttgttcttcatgtttccttcttgttatttatgctattctctttgtggctccattcttctttcaatcttctcagcttataaccgtctttcccttatgctaaggatagcccttacactcatcccatctatgctgtcaagggctgctggttggtgctggtacaaggagcccactcagcagttttcttacctttgcctgccctgcctttcatggaataagaaaggcaacgttttgcagcttccaaatttctgaagaaactaatctcagattggcagttaaagtcaaaatgttgccaaatatttattccttttgcctaagtttggctacccggttcaattgctttttatttttaatgtcttgactcttcagagttcgtacctcaaaagaacaatgagaacatttgctttgctttctgctgaatccctaatctcaacaatctatacctggactgtccagttctcctcctgtgctatcttctcttctatccaagtagaatgtacgccaggagctccttccctctagcaatttctactaaaatgtccaagtagaatgtttccttttacaatcaaattactgtatttattaatttgctagaatccagtaaatcattttggtagctctggctgtgctatcaataaaaagatgaaagcaacaagttgattttttttaggtctactattgattgaacattctccaatgggcaaggctcattgtcaaagcagggtgaacatgatcagattttcttctgcatcatcacacaagctgcgagtgttgctgcaaagcacttctcagtactccttccctaacctcagtatgttaatagccattcatacttggcttaagcatcaccattctggccacagtctgagagattagtgatcaaagctcccttccctatcactaccaccacctactgataacaaagatttctgaatacttagtagtagtaaaatatttttcaagcacagagttacagctaatcctggatcacttgttctaaattcataagggagtatatcaagagcaaatgaagtaaatgattctttcctgcgtgtgggagtcaccatcattttattcaaagggagttcctgtgataggttcattccttaagtggtgctacagaaggaccctaggaaaatgctgatcttgtcctgagaggcaactgatttgagaaaatgattatactacagcaggaaggcagcaccagtgaacatatggtaaatggcaaaaacaagacagttttagaaactgctaattcagtagcagccttggcctttcccttaactcaagcaggctggaatctgtctttatagtcggcaactttccaagataaagcagtgataatagcagttggcaacactaaatatcaatatcatcaccctttaatgacatgttacccctttcagatctagaaaatcagggaaaaagtgatgtcccaactctactctaaaaacctgctcctactattttagtcagtgtttctttaaggaagaagaggactatgtccccaaaagctaactctgttttatagccctggtggatccctgaaaaccctatttattctatactgggctttggaatatgaaaaatggacctgtgtggccgggcgtggtggatcacacctgtaatcccagcactttgggaggtcaaggtgggcggatcacttgaggtcaggagttcgagaccagcctggccaacatggtgaaactccatctctactaaaaatacaaaaattagccaggcatggtggcgcacacctgtaatcccagctacatgggaggctgaggcaggagaattgcttgaacccgggaggcagaggttgcagtgagctgagattgcaccactgcactgcagcctgggcaacagagcaagtctctgtcttgcagcagggggaaggacctgtggtactcctacaaacttaacaactttagcttttcggggaacagtggtggtctccacagatagctagaatcttctaagatgaaaataaactgtttcatccagctgctttctgcctgttaacctttgccacttccattccttcaagtgtgtaatccccagggttgtcttgtattacacacatccttgttaagtaaatataccactgttgatttcttcttccagtgcaacatttggattaaataaaaatctttagtttccaga

SEQ ID NO: 10785 - DNA, 27879 bp, Homo sapiens
agctgcgggtcctcgcggccttctcggcttctccagcttcggtaggagaggatccggcgccgaatcactgactggcacaggtgttggggtgagtgtgaggggcgggaaatctgtggactggggacagctccaaaacccgggagtaggctgaatagctggggcccccgactccgatctgggctctaggagcgtctttggtgctgttggcccgggcctcgcttcccccccactcccggccttccgggctttctcgccagcaaggccagaagggagcggtccacctgcagcccagtgttctcaggcgcctgagccccggaggtcaagcttactgggttccccctctatagtgagctggagtacagacggcaggaatctcagtcccaggtttctgctttggaggacaaaaccccaaacggacctgagcagacgtcctgttagcgggtggtgcctggaagagcctggggtgaggaatgcagtgagaagggtgttgcagttcttcaggagagaggtaacggggttctaagctgagcaggtggcagtgagtgtggaagagtgacgggcgatgtggctgtttgtatttggtagatttgtttgaacctgaaacttacagccttatgtgtgattaagaagatggtgccagtgacaggaggaggtattttatggagtttgagttttatcgaatttgaaacagtggtttacatggagattgtagaaagactttaaaaaaaattatgagaattaagcccgaaagactttcaaggtgagacccaaaacagatgaagtttcatataaaagggtaagaagtatttttgtttaggagaaagttatcaatgacataaaatgctgcaatggtcagaggaggaagctgaaatcagaataggtcgttggattttataattagaaagtcattgagctgtttgagagagatgctttaatagtaactgaggaaagactgcaagtgtagaccaatccttcatcatttggggcatgaagcaagattattgagagtggcaaggtgggggaaagtttggggtttgttttaaagaatacaagatatctatttgggggcaggaagcaagcaactatttgaagattcaagaaaaagtcttgtctcccagaagagaaggaaaggaatgggatcaagttacaagtgaaaggattaatttgggaaagacagagggacactttcaattgacactataggagaagtgaagtgaatgaggttaatgaagaattatcttaatttacgaatcttggccaggcgcggtggctcacgcctgtaatctcagcactttggcaggctgaagcgggcggatcacaaagtcaggagttcgagaccaacctggccaacatagtgaaaccctgtctctactaaaaatacaaaaattagccaggtgtggtggcacacgcctgtagtcccagctacttggtaggctgaggcaggagaatcccttgaacccgggaggcggaagttgcagtaagctgagacctcaccactgcactccaccctgagcgacagagcgagactctgcctcgaaaaaaaaaaaaaaaaaaaaaaaaaaaaaaaaaaaaaaaccttacgtatctttaggaaagctctctttgcaacaagattatattttcttacttaatcttatgatttttatttctaaccatttaatataatatacggccaggcacggtagggctcatgcctgtaatcccagcactttgagaggctgaggtgggtggatcacgaggtcaagagatcgagaccatcctggcaaatatggagaaaccccgtcactactaaaaatataaaaattatctgggcgtggtggcacgtgcctgtagtcccagctactcgggaggttgaggcaggagaatcgcttgaacccaggaagcggaggttgtggtaagctgagattgcgccactgcactccagcctggcaatagagtaagactccgtctcaaaaaaaaaaaaaacaaaccaatatactatgggcagatggagtgcggtggctcacgcctgtaatcctagcactttgggtgggtgaggcgggaaaatcacttgaggccaggagctggaaatcagcctgggcaacatagcgagactccatctctacaaaaaatttaaacattagccaggctttgtggcatgtggttgtagtcctagctactcaggaggtagaggcagaatgaggcagaaggatcacttgagcccaggagttcaaagttacagtgagctatgattggtccactgcacttcagcctgggcaacaaaacaagaccctatctcttaaaaaaaaatacatatacacatacgctatgggagttctttgcagatttaaatatttttaagtagctcagtactgtgtcaattcatgagtagcacatggtatttacagagaagaggacttctctctccctttggaaatgacctctctcccattacacagagaaggagagccatcatctgcctgcagtcaagtatacaaaccttcccttcaatctgaagagtagaaagtgttccttctccttagagaaggcaaaccctttgacctagtctctcagtagcatcctctcctgctatgtcagggtcctctttccgtttttccctctctcctatgtcagcttttccccctctattcacacctttccttcagcatttgaatgtattcttccttcactttatgaactgctgcatttattttcctgtcttttcatcctcttcacagctagacttcttgaatctactctacatatctctatttttttacacttcttgctatttatttcccagcccactgcaatgtcttatttctagcattccactgaactaccaccaaaactattttttttttctgagatggagtcttgctcttgtcgcccaggctggagtgcaatggcaatctcggctcactgcaacctccgcctccagagttcaagtgattcttccgcctcagcctcccgagtagctgggattacaggcgcctaccaccatgcccagctaacttttgtatttttagtagagacagggtttcgccatgttggccaggctggtctcgaactcctgacctcgtgatctgcccgcctcagcctcccaaagtgctgggattacaggtgtgagccaccgcacccagcccaccaaaactacctttaccaagatcaccagtgtcctctgtgtgttaaatcatgcattctcaaagcagataaaaactgcttcttgtgaggtgaaaaaaatataatactctttttatgtgtaaagcacaaatacaatacataaacagagaatattctgtggtattaaaattttatggtgatattaattagcttcatttaattattccacatttcataaatcataacatctggtacccctaaatatatacaactataatttgtcaatttacagttgaaaaagaaagaataataaaaagttttatgggtgaggaatttgattggcagggtggtgagaagatggagtctaaaagggctccttagcaggcattaaggaaaagaaagtttaaaaaacactcttaaatcaacagacattttcaattcttttttgttgttgttgagatggagtctcgctctgtcatccaggctagagtgcagtggcgccatctcggctcactgcagcctccacctcccgggttcaagcgattctcctgcctcagcctccagagcagccgggattacaggcacccaccaccacacccagctaatttgttggtatttttagtggagatgggatttcaccatgttggccaggctggtctcgaactcccgagctcaggtgatactcccactttggcctcccaaagtgctgggattataggtgtgagcaccacgcccagctgacattttcaattctcgtagcttaacctctttgtgccatgtaacagtatttaccactccattcttctggaaatacactaataagctatagttactaaaaaccaccctgtttttttttttttcttaggactcttcagtcacatcttggtcattctttaggtccacttccttgacccacctcctactcaaatgttggagttcctgccataagctctcttcatactatgcacattctttcttttgtttcaattctccttttgattaattcccattaacaaaaaatcctgattacttacaattctgattccaatctggcttctctaaagcaccagaagggtatatataatagttttttgaatatatttatttgggtcagatgtatccagaattggtcaaattacacaggaccaggccaagtgacacatctctctcatctccacacaccccctcctccaagcctaaatgttttttagcacaaaacctaaatgtttctcttatcttttcactgtaccccatcctcatagtcaagactctagaccaggccatcaccactcatctcccaactggtgtcacagtgttcagttaccgattatccagtttccgcagtgtaattagtatgatctttctaaaaatgtaaatcggattgcatgattaattaaaaaaattataaaatgactttacattgcactaagaataaagtccaaactccttaacaagtttagcatgctccatgaaccaatcagtctctgcttacctccttgtccagtttcatctcccctcttccctccaccttccatatttgctaaatttatactggatttatttgtcttgtgttctctctcacctctaagccttgtagattcccacagcacactatatttcctgtatcatcgtaggaattacatcttaactgtattaagttgtcttctctgctcatctctaaatgctgtgagtataggaactctaattttgtttgttcttatatacccagtgcctcaaaactctgtgttgaatgaatatgtggtcaagatattggctgagaatcagaagagtagatgcttttctggtctcattctctcaagttcagtataggcccttctgtgcctccatcatattatatatagaaggaatacatttttgtttttagacactgtcttccaagaatattttgactattgtaaatgcattgcttgtgaattacccaggatgattataaaatgtttagtaaaaaggatttatgatgtatttaagctgcagtcaaagctctggtgggtctgcctctgaacacagtttcttctagtggcttttaaataagctgggagaattctgttttatgactcaaaagccactaggaacaaaaagatggttgtggtaataatgagtgtgtagttttctcagaaagtttatgaaaataataattaaaaaaataactgcagctaccaaaaggacgataaataaagaaacaggctaatttacactgcaacatggtattatttaattgttatatgcattagaccttggtcataatatggatagaagaagtaagctctcttttcctattatagaaggttaagatgggttttaaagctaagcacagtcgagaacttacaagtgttatgctttcatctcagcactaaggataacaacaataaatctaggaggctggtttaactttctgtattctgagacctgaactactgccaataaaaacaacttcggtggaaactttcctggaaagaatttttcaccagcttaagaggatgagtagagatctggccctaaaataaagtaactacaaaatcacttactttcaaaacaagcaactctttcagagtgtattgtggcaaaggagcactataaatccttgtgaactatattttcgataggatgaatgattttagataacctgtgtcggtgcttttaaatataacttccactctaaataatttattaaacttcctcagcataacaactagaatgtcttttgcctcctaactaaacaagaaatgtcttttacctcctcctcttaaatcataagctaggctgggtgcagtggctcatgcctgtaatctcagcactttgggaggctgaggcgggcggatcacgaggtcaggagttcgagaccagcctggccaacatggtgaaaccccatctctactaaaaatacaaaaaattagctgggcatggtggcgcatgcctgtaatcctagctactcgggaggctgaggcaggagaatcgcttgaacccagcaggcggaggttgtggtaagaggaaatcgtgccattgcactccagcctgggcaatagagcaagactccgtctcaaaaaaaaaaaaaaatcataagctaaagcagcacattcatgcactgttcaatatattaactactaaccatatatggttatttaaatttaaattaattaaaattaaaacttcaggctaggcttggtggctcacacctgtaatcccagaactttgggagatcaaggtgggaagatcacttgagcccaggagtccaggatcagcctgggcaatataggcagactttgtctctacaaaacaaaaatttgaaactcagctgtgtgtggtgatgcacgcctgtaagcccagctactcaggagactgaagtgggaggatcgcttgggctctggaggtgggcgttggagtgagccaagatgacgcagctgcactccagcctgggcaacagagcgagaccctatctcaaaaaaaaaataaaaataaaaaagccgggcatggtggctcacgcctgtaatcccagcactttgggaggccgaggcgggtggatcatgaggtccggagatcgagaccatcctggctaacatggtgaaaccccatctctactaaaaatacaaaaaattagccaggcgtggtggcgggctcctgtagtcccagctactcgggaggctgaggcaggagaatggtgtgaacctgggaggcggagcttgcagtgagcagagatcacgccattgcgctcctgtctgggagacagagcaagactccgtctcaaaaaaaaattaattaaaatttcaaaaaaattaaaacttcagtattgggtacattagccacatttcaagtgctcaatagccatgggtgtagtggctaccatattagcacagataaaggacatttccatcattgcagaaagccctgttggacagtgctgtattagaacgtgttcctaataattagtctctacaaggcagataagagcaggagctcagaattcagctggatttaggtttgaatcctagcttactgcgtgatcttaggtaattgacctaacttttctgagatgacattgtcttatctgtaaaatggggataatagtagtatttatggtgtagcattgtgaaaataagatgagataaagtgtctagcatagtgtctggcccataataagtactcaatacattttagatagtattaattcatttattattcattatctttaatgaataaaacactttgaatggggactgagtacagtagcttcactttgggaggcgaaggcaggcggatcacttgaggccaacatggtgaaaccccatttctactaaaaacagaaaaactagctgggcatggtggtgcacacctgtaatcccagctactgaggaggctgaggcacgagaattgcttgcccatgggagacggaggttgcagtcagcagagatcacaccactgcactccagcctgggtgacagtgggagactctgctcaaacaaacaaacaagctttgttcccaagtagctgggattacaggcgcacgccaccatgcccggctaatttttgtatttttagtagagacagggttttgccatgctggccaggatggccttgaactcctgacctcaggtaatccaccagtcttggcctcccaaagtgctgggattacaggcgtgagccactgtgcctggccaaaaataaccacattgaatggggccaaaagattaatttttgcaaagaatgctgtgttccatatgtgactcacctgaagtgcccaaatctgagtctgcttgtggattacagtgctccacttgaagtcatacattatatatttcagatgctgattttcttccaagaaaaaggtgtaataataaaaatttagttgcagatcttatggttggatattcctgtttcatttaaaaaatgaaaatgaaaagtttatcagctaaagattatagttaaaatcagcaggttctatatagcaagtctaagtattctaatggcacttatattaatacccagacagaaatataagacacaaagcaagcctactaagcaaagcatctgactagataaagtagaaaaatttggcaggttccaaccctgaggtgtcagagtttattgctaataactcaagttgatttcttggctaaacagagggctttaaacaaagaaattttttggttctaattaaacaggaaccctaaactgttaacagtattcatactttattaatacaataattactaaaacatatcttagtaactagtattattgataactactgaacatgtgtcgaatgggaagaggagatcatcaccacatattctttaaatgtcagccgctttcataaaagaaagggttgatgttgttttctgtcaacagaatcaaatgaatcaattctggaaagtcttcctttcctctttggaatttatcttcattcatagaaactgtattcataggtcttaaattctttcttcttagactatagtactattacttggaatgattgagccactagactaaacacctgatactggtgcttatacacgtaaaagataggaacaaggtaagataattagacatttttccattgtcccccatattgcagggacaataaacttcttataggaagcataactaacactcagaaagtatgcaaatcacaatgtaaagcctaatgagttatcatagaaggaacacagcttgtaaacatcatgcaggtcaagaaataaaacattggccaggtgcggtgtctcactcctgtaatcctagcactttgggaggctgaggcaggcggatcacgaggtcaggagttcaagaccagcctggccaacatagtgaaacctcgtctctattaaaaatacaaaaaaaaaaaaaaactagccaggtgtggcggtgtgtgcctgtaatcccagctactagggaggctgaggcaggagaatctcgtgaacttgggaggcagaggtttcagtgagccgagataacaccattgcactccagcctgggcgacagtgtaagactccatctcaaaaaaaaaaaaaaaaggaaaataaaaaagaaataaaacattaccagcactctaggagatcatccccatggccctccactctccataaaggaaaccatttgatttaacgtagattagttttgcctgttctacaacttcatataaatggaatcatactgtgtatattcttttgcatctggcttcatttattcaacatcgtatttgtaagattcgtttgtatgtatatattctttgagtaaatgtcttttcaaatcctttgcccattttttaattggcttgtttatttatttattttttatgttttagaggcaaggtctccctctgtcacccaggctagggtgcagtggtgggatcatagttgactgcagcctcaaactcctggactcaggcaatcctcccacctcagcctcccaagtagcagggactacaggtatgagccactatgcctggctagtttttaaatttttttatagagacggggtctcaaactcctgggctcaagcaatcctccctcctcagcctcccagagtgctaggattacagttgtgagtcaccacacctggcccttcttattattgagtaaaagttctttatattttccggataggggtccctttaagatatatggtttcaaatatttactatcattttgtgaatttttgctttcttgataatgtcctttgaagcactaagttttaaatttgatggactctgggttatctattttttatttttcttgtctgtacttttggtatcgtatcttaaaaaacattgtctaatccagagtcaaaatctatgcatattttttctaagagttttatcattttggcttttccaattaggtctttgatacattttgtgttgctttttgtatccaatttcattcttttgtatgtggaaatccagttgttccagtaccatttgttgaaaaggttgttctctctccaactggtcacccaggtcttggcacccttgttgaaaatcagttgaccataaatgtaagggttaatgttctattgatctgtaggtctgtccttgtgccaataccacatagtagttttgtagtaagttttgaaatcaggaagcacgagttatccatcttcgttgttcctttttttttttaattcaaatatatatattttttcaatctttttaattctacatatttttgtaagcatccccccaattcttgtttcatagtaaatcagactgtagatgaagcatttcagaccttttgtcaatcatgtcaagtgtgaggggaagtcttttgtaagtcagccaagtatttcaaaatgaaaagcttttccaaaagtaaaggcagaagaccccgctttgaaggcgctggtcggcacagaagggcttgcaaaggtatgtagggaagtccaccggttacaggtgtaaggtgagtttaacctacggcgaccagctggccaggagcgccccaaggcagacgaggacgtggggcttgggcgcacggccgcctgcagccatctcgccccagatcctggctcaggaaacgcaggctcgggctggggtggatgtgtgcgccccagggccctggcacccgggggaccgagggctcctcccaggtccttggaacagcagagtggctcccaggaaggatgctcagctgcaggtgggggtccctgctcccaagcaccctggccagggaggaatggcgcaccccaccccgttcgcccctgttgttccttttcaagattgttttggctgttgatctttttcaattccttatgaatttaggattagcctgtcaaattccacgaaaaggcagctgggatttttttttttttttttttgagatggagtctcaatctgtcacccaggctggagtacagtggtgcaatcttgagtctcggctcactgcaacctccgcctcccgggttcaagcgattcttctgcctcagcctcctgagtagctgggactacaggtgcgtgccaccacgcctggctaattttagtagggacggggtttcaccgtcttagccaggatggtctcgatctcctgacctcgtgatccacccacctcggcctcccaaagtgttgggattacaggcgtgagccaccgcgcctggccttttttttttttttttagtagagacagagtttctgcacgttggccaggctggtcttgaactcccgacctcaggtgatccacctgcctcggcctccccaagtgctgggattataggcatgagccaccacgcccggcctgaaattgttttatttcattttcagttttgttttgtttttttttttttaatagagatgaggtctcactatgttgcataggctggtcttaaactcctgagctcaagcaatcctccttcctcagcctcccacagtgctgggtttataggcatgagttacaatgcctagcccatttttagtattttatagctatagtggatagaaatataattgatttttatattgacttgtgtcctgcaagcttgctgaactaaatttattagctctaataggtttttttttgtgtgtgtgtggattccttaggattttctatatataagattgtatcttctacagatacagttttacttcttcctttccaatttggaagccttttgttttattttcttgcttaattgccctggttcaaacctctagtaccatgttgaatagaaatgatgggactgggcatccttgttaggttttgttattaaggagaaagtgttcggtctttcacctttaaatataatattagctgtggggttttcatcaggttaaggaaattttttttttttttttttttttttttagatagtgtctcacttggtcacccaggctggagtgcagtggcgcaatcttagctctctacagcgtcgatcttcctcctgggctcaagcaattctcctgcttcatcctcctgagtacctaggactacaggcaagtgccaccatgcttggctaatttttgtattttttgtaaagatgatgttttgccctgttgcccaggctggtctcaaactcctgagctcaagcaatccgcccacctcagcctcccaaagtgctgagattacaggcatgtgccactgagcctggctgaggaagtttctttttgttcttaaatggctttcttttttttttttttttttcgtaaaaggatgttggattttgtcaaatgcaatttctgcaccttttgaaatgattgttttagttcttattgtatatcatgttgattgatttttgtatgttgaaccagccttgcattcttagaataaatcccacttggtcaaggtgtataatctttttgtgtatgttaaatgatatttaatgtataataaatttaaacctttctttgccccaacagaaaatgatccacagtctatttctcataaactgttccggtgacatatttctagagaagcactggaagagcgttgtgagccagtctgtctgtgattatttctttgaagctcaagagaaagctgctgatgttgaaaatgtaccacctgtcatttcaacacctcaccactacctcatcagtatctaccgggataagctcttctttgtatctgtcatacagaccgaagtgccacctctctttgtaattgagttcctacatcgagttgctgacacttttcaggttggttatctatcatacctttctaagttaaatgacccaagttagctgaaggtgagacatgattatattatttaattacccaggttttgatgtttactgtctgtctctctctgtttaagcgtaaattcataagcccttttctgtgtggtatacagttacacacatggctgctctattcactattttttatatgtattacagattacagttggctctccatatacatgggttctgcatccataaagtcacccaaccttacatggcaaatatttgaacaaaaaaatcgaactgaacatgtacaaacttcttctcattattacttgaacaatacagtataacaaatagttacatagcatttacactgtgttagatattacaagtaatctagaggtgatttaaagtatataggaggatgtgtataagttatgtgcaaatactatgccattttatgtcagcgacttgagaattgtgaactttggtatctacaggggatcctggaactaattcccacaaataccaagggatgactgtatatcatcaggaaacaataatgccctccgcatacagttctctcaatggtctcaagattttcattggttatgaactcttctatatttacattttattattttgtcttgcggaatataccaaataatttaagcttatctatatgtattttgggataatcagggtgaatgaagtttatagctcaaattccaatttaatgtttcaatactttctggtataatatgtaataggaattaaattcaacctagaaatatcaagaaaatattgaggaataatattaggactatagaggggttttttttgtttgcttgttttgttttgttttgttttgttttgtttgagacggagtctcactctgttccctaggctggagtgcagtagcatgatcttggctcaccgcaacctccgcctcccgggttcaagcaatcctcccgcctcagcctcccaagtagctgggaccacaggtgtgcaccatcacactcagctaatttttgtatttttagtagagacagggtttcaccatgttggccaggctggtcttgaattcctgacctcaagtgatgcatccgcctcagcctcccaaattgctgggattacaggcatgggccaccatgcccggactatagagggttttttcccccgctctgttttatatatgttcagcagcttaagcaatgaattatgctactctaagtttattcttcagaacaaaaagtatttagcaggcctttctttttgccttccattgtgtgatattttgtgtgtattttgtcaggactactttggtgagtgttcagaggctgcaattaaggataatgtggtcatagtatatgaactcttagaagaaatgttagacaatggatttccactggctaccgaatctaacattttgaaagaattgattaaaccaccaacaattctacgctctgttgtcaactctattacaggtaagatgaaaacatactgtgctagtaactgagcaattaaaactttgtaaacaactcattattgctcatgatctgacatattattaaggtagtacaatttggccataattaaagttactggtaaagttaaaatggatgtactatatatttattttcatggaaagaggctagaccttaagtgataaagaacttttggttattactctttttttttttctaaaacaccacaacaatattattaccattatttaacactaaatactaagactgaataaattgttccagttattcctaaagaagccagtatatgagcccacttagaagagaatttagtccatttatagactggcattttaatatttaaaatagcattacataactggtatgctgctactccacaattactagagaatagaaaatttaagacgcttaaccacacagtactacaatctcctccaagtctttgtttttatgcattcagaagatgtattaagaaaaaataggaaatagtttacttatgagatctcatgcattgtgggcctgtacttgtgttgtaagcttccagctgggtttaattcttgagtgtagctagaaattaggcacatccagataccaatattctttcgaaagcattaaagtcttttagacaaagattcctatgaaatgttatatgccactccaactccactgtcaaccattgtaaacccctgtccagtgccttgacctaaaaatgaggtgagagaggcctataagaaaaagatcattcagcagctctttattcatcctttgtgtaaggacgaatgttaggagaaattcaaagaaagataagatggtgtgtctgtactcctaaaacttatactctgaatgggacattggaaaaaaaattaagtaaataactgtataagactttaaaaagcaattccatacttcacagataaagtaatagcattggaaaataaatacacatgatgtaacgttaaattgaaaagtcagcacaaaactgaaaaaaattattcttatatataaatattcactccgacaaaaaagtatttacaatgattatacccagctaaatacagattatatttatttttgctttatactttctaattttccaaaataaacatgtattttatagtcagagaaaagttactaaaatatataatgcaaaacataacagattcattagatagtgtattacaaagttcaagagaatggttccattaatgaagtaatccctcctgaactgtggtgggtggccaccttggaaaatcagtagaattcaggaagtgaggaaggaataagagcattctccatggtggaactgtatgagaaaaaaacacacatgaaagagaaaaacctaaagttttattaatccctttagcagaagcagaactgtttttcacttgagaagttagagatcaaattaaaaagtagagaaagtccttcaaagctaggataaatatttagcttttatcataaagccagtgagcaaacattgaacgtttttgagcaggaagataacatgattataggttgcaggtaggaacaccaatcataagtagactgcaaaattgtagatacagtatgattgcgactatattttaaagtgcaattaaaaaccaaaattatcaaaatagaaaaaaatgcaaccttctggtggtggaaatattcaaagaaatataccaaaatgttaatattatattaaaatgttaataccataatattaacaaaaatgttaatggtagatatattttgttagtaagaagacaggtgtttttctttaaaccacttctctgaactctacctttttgttgttgttaagtatgtagtactttcgaatgggaaatataaattaaccaaaatattaagtaagtcacagctcaaagatatgtgttttggacaaccagacttatttttaggcatgtgtcagtttaccaggaaatgagctggatactgaatactagctatattgcagccgtatgggtatgctgaccttaaaataggaaaaggccagattccatttactccactgaggcgtgcttggcagcatctcatgtaaaataaagttgaatactgaagggcctagttataactctgtattctcactggagacattttattggcagaaggttttgaaacaaccaacctcttttttcatcagtggcagagattctgttgttgagccactggaattagattagattactgttaacacacaggaggcaaaagataagtaaataaatttaacctggtttggcaggtagacagagggccacatggcctatatttcttttctagaaatttgatcatgttggtatggatatgtctgacaattctagtgaccatccacaacttcattaagaaaaatccaaacattgaagaagcagctttttttttcctagtaataaattttctcatgactgttttatacatcagctttgccttctccttttttggtttctaggcagtagtaatgttggggacacactccccaccgggcagctgtccaacataccatggcgtcgggcaggggtaaagtacacaaacaatgaagcctattttgatgttgttgaagaaatagacgcaattatagataaatcaggtaattgtgtgcatgtcatcttatttggggaaaaacaattcatctgacacagatgaatagaaaactgaagtcctggccgggcgcggtggctcacgcctgtaatcccagccctttgggaggccaaggcaggcggaacatgaggtcagagttcgagaccagcctggccaacatggtgaaactctgtctctactaaagatacaaaaaattagccgggcatggtggcgcgcacctgtaatcccagctactcgggaggctgaggcaggaaaattgcttgaacccaggaggcagaggttgcaatgagacaagatcatgccattgcactccagcctggctctgtctcaacaaaaaaaaaaaaaagaagaagaaaggaaaagaaaattgaagtcctttggcagtatggtttcggtggaaaggcattcattatctgatgatttttaaatctgtttgtttatttatttatttatttgagacggggtctcacactgttgtccaggctggagtgcaatcacatgatcttggctcactggaaccttcacctcctggattcaagcgatcctgctgcttcagcttcccaagtagctgggattacaggcatgagccaccacacctggctaaattttttttttttttttgagacgcagtttcactcttattgcccagggtggagtgcaatggtgcaatctcagctcaccgcaacctccgcctcccgggttcaagcagttcttctgcctcagcctcccgagtacctgggattacaggcatgcaccagcatgcccagctaattttgtgtttttggtggagatgggatttctccacgttggtcaggctggtctcgaactcctgaacttaggtgatctgcccgtttcggcctcccaaagtgttaggattacaggcgtgagccaccgctcccggccctggctaattttttgtatttttagtagagacggggtttcacaatgttggccaggctggtctcaagctcctaacctcaagtgatccacctgccttggcctcccaaagggctgggattacaggcgtgagccactgcacctggcccataaatctgtttattttgcccataggttacatataattttcataaccactagttgaggtctgccaaacatgtaaatcagaactcataatgccttactttaagccaattattaccctatgtacctctacctcttgctatttattccttctaacatttattgaaaatctgctatataccatgcttttgctactacattatgtgcagtacttctggtaaaagcccctatctgattatttttcactttcttttttttttttaagtacagggtcttgctcttttgcctaggctggagtgcattggcgcagtccctgcttactgtagccttgacctccagctcatgtgatcctcctacctcaaactcctgagtagcctatagtcccagccaatcaggaggtacacgccacacgccaccatgcctggctaacttttatttgttttttttgtacagacagggtctcaccatgttgcccaggctggtcttgaactcctgggctcaatcagtttacctacctcagcctcccaaagtgctgggattacaggcatcagccaccacacccaatctgattatctttttaaccagacaaaacaatagtactctataagaatcgtaaaattttattattaaaaatagcagccgggcatggtggatcacgcctgtaattccagcactttgggaggccgaggcaggcagatcacttgaggtcaggagtttgagaccagcctggccaacatggtaaaaccccgtctctactataaatacaaaaattagctgggcgtggtggcaggcgcctgtaaacccagctacttgggaggctgaggcaggagaattgcttgaccctgggaggcagaggttgcagtgagccaagattgcaccactgcactccagcctgggtgacagagtgagactccatctctaaaaaaacaaaaaaagaaaaaagaaaaaaaatctagtccttcctttacatttattttacacataaggaaagcccagaagggttaagtgaactgttccaggtcacacaacttgttaatatgtaatgatggcttattgtgaattatagtcaatatcttctcttccatgagtccccttttcattataacattccatcttatagaataatagatttttgccaggcacggtggctcacacctgtaatcccagcactttgggaggcttaggcaggaagatcacttgagcccaggagttcaagaccagcctaggcaacatagcaagaccccatatctatcaaaaatttaaaagattagctaggcatggcttccttaatcctacctattcagaaggctgaggcaggaggattgcttgagcccaggagttcaatgctgtggtgaactatgttcacaccactgtactccagcctggatggcagagggagaccctgtctcttaaaaaaaaagagatatctttctattatggatcctatttcttaaaagttaacttagtccatttcataatacacttgccacattttaaaattctattgaagccgggcgcggtggctcacacctgtaatcccagcactttaggaggctgaggcgggtggatcacgaggttaggagatccagaccatcctggctaacacagtgaaaccccatctctactaaaaatacaaaaaattagctgggtgtggtggcaggcgcctgtagtcccagctactcgagagactgaggcaggagaatggcgtgaacccgggagacagagcttgcagtgagcccagatagcgccactgcactccatccagcctgggtgacagagcaagactccgtctcaaaaaaaaaattaaaaaaaaataaaattctattgaaaatggttttggttggtttgttttattttgtttttgagacagagtctcacattgtcgcccaggctgtagtgcagtgttgtggtttcagctcactgcaacctccgccttctacgttcaagcgattctcctgcctcagcctcccaagtagctgggactacacgcacacaccaccacgcctggctaattttttgtatttttagtagaaacggggttttgccatgttgcccaggctggtcccaaactcctgagctcagataatctacccacgtcagcctccctaagtgctaggattacaggcatgagccactgcgtcctgccaaatgttttaaactcatatccagtcatcttacagggttggctccataaaggaaacagtttaattttccttagaattagcatattctggctgggtatggtagctcacacctgtaatcccagcactttgggaagctaaggtaggcggattgcttgagcccagaagtttgagaccagcctgggcaacataacaagaccctgtctctacaaaaaaaatacaaaaattagccaggcgtggaggtgcatgcctgtagtaccagctgcttgggaggctgaggtgggaggattgcttgagcccaggaggttgaggctggctatcatagcaccactacgctccagcctgggtgacagagcaagaccctgtctcaaaaaaaaaaaaattatattctacagtggcatacctgtagtctcagttactctggggaccagctgggactagctagtcagactttatctcttaaaaataaaagaattattattatattccagccagagttaagtatggaccttgtcccctgacctgttaatagagatgtaaagcttcagttaatctgacacccagagggtatctctattgttctagatgtagtgattgttgggctaggtgtcatggcacgcacctatattcccagctatttgggaggctagggcaggaggattacttgagcccaggagtgaggctgcagtgagctatgatcatacaactgcactccaaccttggcaacagagcaagactctgtctctaaaaacaataaataaaaataaaaagatacagtgataggtctagtgaagactcatattccattgatgttatcttccttttttttttctttcttcaggatctacagtctttgcagaaattcagggggtcattgatgcttgcattaaactatctggaatgcctgatctctccctttctttcatggtaagttttattctcctgttttatagccccttgaatgcctaatacatgtgaagtactaaatgaaatgataaatattgagataagtttgcatcttagattgcaaaggattatctcagaaatattcctagcagagtttcctaagacagtcgcttacatgatgagcgtggtctttgtggaaagactaagggaggtctttgcctgagtgtgctagaaggggcttaaaattggctggctggcttctgcaaatatccagtatcatttttactgaataattatttgctttgctgatatgaaaggacactggtcttttgtatcattttagagtcagcatgatatactgctaggaacaattaagagaactgacttctggtgttgtcaccagtttgctctgaccttaagtcctctgaacctcagttttttaatctgttaaagggaaataatactacttgccttttctcctttatagttattgaaattcaaataaaataatgtacataaaatatttacaaactttaaagcattatgaaactataaggttgtgtagatgtggtcataaactcttccatgactgctttatcttcagggaacatatttgtcaaggtatctgagtacagttcccatattcattatagtctatgaacgactgtcttctgtttttctggcagaaccctaggcttctggatgatgtcagctttcacccctgcatccggttcaagcgttgggaatctgaaagagttttgtcatttattcctccagatggaaatttccgactcatatcataccgtgtcagctcacaaaagtatgttgatgcatcagccagaatctgccatcatacatatcaagtacaactcacctttccctgtttctttctgaaagttgagtacttgaggtcatcactgctcactttaaccatagctcaccaggagacccagtgagaacgggtgaaaatacgcacctaaaataatccgtatactttgaatgtatgagtgtagagtggtactaagtgagactagagtaaaatctatagccaagaacaagcaaaccatacataacctgggcaaaaattgtggtaccggtcctttgcaaggttatgcatggtcaaattatggcactggttctttgctcaggttatgcatggtccattttgctctgcttctgaaagctgagtactttgcaagcagagcaaaacggaccatgcataacctgggcaaaaccatgaaccattgccataatcttaccatagtctgtagagtttgtggccaacaaggagacagacctacctgtagttcgtgaggacattccccaatttacctgcttcaagtacgtcttctctgcgttgagtttttaaggaactgtttagcattgaggggccgggtgcagtggttcactcctgtaatcccaacactttgggaggccaatgtgggcagatcacttggggtcaagagttctagaccagtctggtcaacatggtgaaaccctgtctctactaaaaacacaaaattagccaggcgtggtagcgtgtgcctatataatctcaactacttaggaggctgaggcatgagaatcacttgaacctggaaggcagaggttgcagtgacagatcacaccactgcactacagcctggccaacagggtaaaactccatctcaaaaaaaaaaaaaatttagcattggggatcggagttataggtagtttgtttcttgaaaataccaaaagttatttgagtaacatcatgacagaactcaaaaacagagaaattatttctcggctcttttcttttccttttttttttttttttttttttttaagccggagtttggctcttgttgctcaggctggagtgcaatggtgaaatctcggcttactgcaacctccacctccagggttcaagtgattctcctgcctcggcctcccaagtagctgggattacaggcatgcaccaccacacccggctaattttgtgtttttagtagaggcggggttattccatgttggtcagactggtctcgaactccagacctcaggtgatctgcccacctcagcctcccaaagtgctgggattacaggcgtgagccaccgtgcctggcctgtttcttggctcttatcacataggaactgttttcatttatataaaacatattttacattatttttcagtgggatcataattcattttaaactagggccatttgccccaattgtttttgtttgtttgttttatgttattttgttttgtttgtttgttttgagacggagtttcactattgtcacccaggctggagtgcaatggtgtgatcttggctcactgcaacctctacctcctgggttcaagcgattctcctgcctcagcctcccaagtagctgggattacaggcacctgccaccgcgcccagctaatttttgttttttgttattttttttttttattagagaggggatttcaccatgttggccaggctggtctcaaactcctgacctccagtgatctgcctgccttggcctcccaaagtgctgggattacaggtgtgagccactgcacccagccaccccaattgtttatactgttattaaacttcagatttctgtcttgatttgtatacagttcccagcacagtggtacaagaacattatgctgtactcagctcccccttgtgtagatactgaatctgcagttctagaggtactgccatcttggtatccttggaggactggttgcaaaaatcagcagatgctcgagtcccttacataaaatggtgtagtatttgcatataacctatgcacatcctcctgtatactttaaatcatctccaagttacttgtgatagtacactgtaaacactgtgtaaataattgttataccatgttgactttttatttttattgtagttatattgttattttttactttttttttttttttttttttttttttttttgagatggcgtctcgctcctttgcccaggctggagtgcagtggcacgatctcagctcactgcaatctccgcttcccaggttcaagcgattctcctgcctcaggcttccaaatagctgggactacaggcatgagccaccacacccagctaatttttgtatttttagtagagacgaggtttcaccatgttggccaggctggtcttgaactcctcacctcagcctcccaaagtactgagattacaggtgtgagccaccgcgcccagccctagctaatttttgtagagacgaggtttcatcatgttggccaggctggtctcaaactcctgacctcaggtgatcccctcccaaccctggtctcggcctcccaaagtgctgggattacaggcatgagccaccacgcctggccaattttgtgaaataatattttcaatcctcagctggtcaaattcaaggatgcagaactgtggctacagagagccaactctgtagtaccttattgtggagttaaaggcagggtaggatactctggacagaggttttcaggatacctctggagctctccccacaccattaattgtgtttgtgcttttgtatctttctctgtttctctttttagtctagtggcaataccagtgtatgtgaaacatagtatcagctttaaggagaacagttcttgcggcagatttgatataacaattggaccaaagcagaatatggggaaaactattgaaggaattacagtgacagttcacatgccaaaagttgtgctgaacatgaacctgacacccacacaaggcagctatacatttgatccagtcaccaaggtacagccacttcaaatcaagagtgagcaagtgtttctgcaatctattttgtgatttgtggggaggaatggagggaaaggtttggcaccttgtttaaaactaaagttcgtatcaaaacctagagagcatactgtgctgtgcttctgccactggctgcagaaggaatcctgcagctgctactgagtagatgaacagaaaaatgtgtcattctgtcctttttcagagtgtgccttcactcatccattattaatccagagcctgactctgctatctaataagaaagaagtaaaagcttttttaaaaagagaaaacattatgtagattgaagaagatattatgatggtctatgaattactaagttttctatataaattgatcactaagacctttttcttcctttataatttaaaagcattatttcatactctttcacagggctaggaaagttgcttcctcactctacttaaatttttgtgtaacagagggttttcagagaaactgtagcagatgattttctctcagcttcctgattagctggtaaatatgattgttttcaatagcagagtcattgagctacctgataaatgaaaagacatgttttttgaataacatcatagaatgttaaagattatttaatacagttgtaaggattcaaagaacctcctcctggagaccacacagggctgagaaagggagcttcagattcctggccctttaccacagcttcaactatgacagctttgctttctttctcatctgctgttgagccttcacaccgaagatttcatttgaacaatgggtttcacagctaaaagttttaaaaacaccatcttaagtcaatctaattattttacagaaaaataaacagaggctgggcgcagtggcttacgcctgtaatcccagcactttgggaggccgaggtgggtggatcacctgaggtcaggagttcgagaccagcctgaccaacatggagaaaccccatctctactaaaactacaaaattagctgggcatggtggcgcatgcctgtatcccagctgcttgggaggctgaggcaggagcatcgcttgaacctgggaggcagagtttgtggtgagccaagattgcaccattgcactccatcctaggcaacaagagtgaaactctgtctcaaaaaaaaaagaaaaagaaacaggcccagagaaaagtgaagatggttatgatggagaacatttgaaatcagagggccttaggttcaaatcccagccttacctctgactaactatgtgaccttgagcgagtcatttgatctctgagccttaatgtcctctgagctttaatttcctcatttgtaaatagaagacaaaagctacttcacagccctcaatgagacaacatatgaataatgctaagcacggtgctaatacaaaagaaaatgctcaacaaatgtagattctctgctctcactccccattcaaagtcacagaattaatcagaggtaaactcactgtagatgccagatctcttgttttcaagagactgcacttcagtttgtacagaagtttatgatatctttgaactttgtttttgagggtttgtctttaataaatggttctatttgtttttcattttttgtctttttaaggtactaacatgggatgtgggaaaaattactccacaaaagctcccaagtcttaaaggactggtaaatttacagtctggagcccccaaaccagaagagaatccgagcctcaacatacagtttaagatccagcagcttgctatttcaggtaaggataaggttgacttgtagttaagggtaattgagttttgcaagctcatttattaggcatttagaagagtaacaaaagtttccttctctagaaagagcagtagcccatttgccttttatactgtgcttggtggggcagtctcacaggcaccgaccaaatgatttttcagagcaccttatttcaaacagcttcccctcacctccgccctcatttaagcaccaaaaagagagttattcatattcacagaaagtagaattatacttcacagacattccctgcctgtgtgggaatcttaaccaaaaccataccatcaaagtgcaataatttgtaaatgatagaagagacatttcttccaaatggtggaagggacactggttaatgtcagatttaccatatagcgctcattgctaacattatattggttgggatgatgataatttattctttttcattctttttgatacaggcttaaaagtaaaccgtttggacatgtatggggagaaatataagccatttaaaggagtcaaatacgtcacgaaagctggaaagttccaagtgaggacatgagaagaggccaaaattcctcaggaccagtttgttttccaagtgtcattacgatgtatcactattaggtaccaagtgagtgggaatacatattctagttaaagcatttgtgtctagctacacaccgctaacaaagttacttagttatcaatgtaggattcttaaggagctttaagctaaggaaaccttttagtgacttagcttattttgtatcttttcacttaggaagattttggaggtgatttttttccataggaggataccatctggcggctgcacattgtaacagtaaaggcagaaagctgtagtgataacctctctcctaaaagagttaactggtctcatccagcagaagctatcttaaatctgtgatgtgtcaggtgcagccaaatatcacaccttctgatcttagccatcccaaaccagtatctgtcccgagaggaaattccccccacccccagaagtttacagaaaactgcctcttcaagtgtttgccttattcagcttttcacttgtgccattaagcaagcactgtagcaaaagccacttccacatggccctggcagggagcactgctgctccatgctccattctcactgtacttggtattgtattttttataaataagatttttatgtaaagcttagaatttgatttacagggaccttgctgcagtaaataccatctcaattttgtgccactggttcagctgttagcacagtaaaaaaatcatttgtatcaaaggggcaaatgctttattaaggtagtaaaagggaacattacttctgcttttaggaagttactgcaagcacaagcatttgtgcttttaagcaaattaaagtagtaaaa

SEQ ID NO: 10786 - DNA, 2320 bp, Homo sapiens
agctgcgggtcctcgcggccttctcggcttctccagcttcggtaggagaggatccggcgccgaatcactgactggcacaggtgttgggatagtgtctcacttggtcacccaggctggagtgcagtggcgcaatcttagctctctacagcgtcgatcttcctcctgggctcaagcaattctcctgcttcatcctcctgagtacctaggactacagaaaatgatccacagtctatttctcataaactgttccggtgacatatttctagagaagcactggaagagcgttgtgagccagtctgtctgtgattatttctttgaagctcaagagaaagctgctgatgttgaaaatgtaccacctgtcatttcaacacctcaccactacctcatcagtatctaccgggataagctcttctttgtatctgtcatacagaccgaagtgccacctctctttgtaattgagttcctacatcgagttgctgacacttttcaggactactttggtgagtgttcagaggctgcaattaaggataatgtggtcatagtatatgaactcttagaagaaatgttagacaatggatttccactggctaccgaatctaacattttgaaagaattgattaaaccaccaacaattctacgctctgttgtcaactctattacaggcagtagtaatgttggggacacactccccaccgggcagctgtccaacataccatggcgtcgggcaggggtaaagtacacaaacaatgaagcctattttgatgttgttgaagaaatagacgcaattatagataaatcaggatctacagtctttgcagaaattcagggggtcattgatgcttgcattaaactatctggaatgcctgatctctccctttctttcatgaaccctaggcttctggatgatgtcagctttcacccctgcatccggttcaagcgttgggaatctgaaagagttttgtcatttattcctccagatggaaatttccgactcatatcataccgtgtcagctcacaaaatctagtggcaataccagtgtatgtgaaacatagtatcagctttaaggagaacagttcttgcggcagatttgatataacaattggaccaaagcagaatatggggaaaactattgaaggaattacagtgacagttcacatgccaaaagttgtgctgaacatgaacctgacacccacacaaggcagctatacatttgatccagtcaccaaggtactaacatgggatgtgggaaaaattactccacaaaagctcccaagtcttaaaggactggtaaatttacagtctggagcccccaaaccagaagagaatccgagcctcaacatacagtttaagatccagcagcttgctatttcaggcttaaaagtaaaccgtttggacatgtatggggagaaatataagccatttaaaggagtcaaatacgtcacgaaagctggaaagttccaagtgaggacatgagaagaggccaaaattcctcaggaccagtttgttttccaagtgtcattacgatgtatcactattaggtaccaagtgagtgggaatacatattctagttaaagcatttgtgtctagctacacaccgctaacaaagttacttagttatcaatgtaggattcttaaggagctttaagctaaggaaaccttttagtgacttagcttattttgtatcttttcacttaggaagattttggaggtgatttttttccataggaggataccatctggcggctgcacattgtaacagtaaaggcagaaagctgtagtgataacctctctcctaaaagagttaactggtctcatccagcagaagctatcttaaatctgtgatgtgtcaggtgcagccaaatatcacaccttctgatcttagccatcccaaaccagtatctgtcccgagaggaaattccccccacccccagaagtttacagaaaactgcctcttcaagtgtttgccttattcagcttttcacttgtgccattaagcaagcactgtagcaaaagccacttccacatggccctggcagggagcactgctgctccatgctccattctcactgtacttggtattgtattttttataaataagatttttatgtaaagcttagaatttgatttacagggaccttgctgcagtaaataccatctcaattttgtgccactggttcagctgttagcacagtaaaaaaatcatttgtatcaaaggggcaaatgctttattaaggtagtaaaagggaacattacttctgcttttaggaagttactgcaagcacaagcatttgtgcttttaagcaaattaaagtagtaaaa

SEQ ID NO: 10787 - DNA, 1127 bp, Homo sapiens
ttctttcttcaggatctacagtctttgcagaaattcagggggtcattgatgcttgcattaaactatctggaatgcctgatctctccctttctttcatggtaagttttattctcctgttttatagccccttgaatgcctaatacatgtgaagtactaaatgaaatgataaatattgagataagtttgcatcttagattgcaaaggattatctcagaaatattcctagcagagtttcctaagacagtcgcttacatgatgagcgtggtctttgtggaaagactaagggaggtctttgcctgagtgtgctagaaggggcttaaaattggctggctggcttctgcaaatatccagtatcatttttactgaataattatttgctttgctgatatgaaaggacactggtcttttgtatcattttagagtcagcatgatatactgctaggaacaattaagagaactgacttctggtgttgtcaccagtttgctctgaccttaagtcctctgaacctcagttttttaatctgttaaagggaaataatactacttgccttttctcctttatagttattgaaattcaaataaaataatgtacataaaatatttacaaactttaaagcattatgaaactataaggttgtgtagatgtggtcataaactcttccatgactgctttatcttcagggaacatatttgtcaaggtatctgagtacagttcccatattcattatagtctatgaacgactgtcttctgtttttctggcagaaccctaggcttctggatgatgtcagctttcacccctgcatccggttcaagcgttgggaatctgaaagagttttgtcatttattcctccagatggaaatttccgactcatatcataccgtgtcagctcacaaaagtatgttgatgcatcagccagaatctgccatcatacatatcaagtacaactcacctttccctgtttctttctgaaagttgagtacttgaggtcatcactgctcactttaaccatagctcaccaggagacccagtgagaacgggtgaaaatacgcacctaaaataatccgtatactttgaatgtatgagtgtagagtggtactaagtgagactagagtaaaatctatagcc

SEQ ID NO: 10788 - DNA, 462 bp, Homo sapiens
ttctttcttcaggatctacagtctttgcagaaattcagggggtcattgatgcttgcattaaactatctggaatgcctgatctctccctttctttcatgaaccctaggcttctggatgatgtcagctttcacccctgcatccggttcaagcgttgggaatctgaaagagttttgtcatttattcctccagatggaaatttccgactcatatcataccgtgtcagctcacaaaagtatgttgatgcatcagccagaatctgccatcatacatatcaagtacaactcacctttccctgtttctttctgaaagttgagtacttgaggtcatcactgctcactttaaccatagctcaccaggagacccagtgagaacgggtgaaaatacgcacctaaaataatccgtatactttgaatgtatgagtgtagagtggtactaagtgagactagagtaaaatctatagcc

SEQ ID NO: 10789 - DNA, 12502 bp, Homo sapiens
ggggtgagtgtgaggggcgggaaatctgtggactggggacagctccaaaacccgggagtaggctgaatagctggggcccccgactccgatctgggctctaggagcgtctttggtgctgttggcccgggcctcgcttcccccccactcccggccttccgggctttctcgccagcaaggccagaagggagcggtccacctgcagcccagtgttctcaggcgcctgagccccggaggtcaagcttactgggttccccctctatagtgagctggagtacagacggcaggaatctcagtcccaggtttctgctttggaggacaaaaccccaaacggacctgagcagacgtcctgttagcgggtggtgcctggaagagcctggggtgaggaatgcagtgagaagggtgttgcagttcttcaggagagaggtaacggggttctaagctgagcaggtggcagtgagtgtggaagagtgacgggcgatgtggctgtttgtatttggtagatttgtttgaacctgaaacttacagccttatgtgtgattaagaagatggtgccagtgacaggaggaggtattttatggagtttgagttttatcgaatttgaaacagtggtttacatggagattgtagaaagactttaaaaaaaattatgagaattaagcccgaaagactttcaaggtgagacccaaaacagatgaagtttcatataaaagggtaagaagtatttttgtttaggagaaagttatcaatgacataaaatgctgcaatggtcagaggaggaagctgaaatcagaataggtcgttggattttataattagaaagtcattgagctgtttgagagagatgctttaatagtaactgaggaaagactgcaagtgtagaccaatccttcatcatttggggcatgaagcaagattattgagagtggcaaggtgggggaaagtttggggtttgttttaaagaatacaagatatctatttgggggcaggaagcaagcaactatttgaagattcaagaaaaagtcttgtctcccagaagagaaggaaaggaatgggatcaagttacaagtgaaaggattaatttgggaaagacagagggacactttcaattgacactataggagaagtgaagtgaatgaggttaatgaagaattatcttaatttacgaatcttggccaggcgcggtggctcacgcctgtaatctcagcactttggcaggctgaagcgggcggatcacaaagtcaggagttcgagaccaacctggccaacatagtgaaaccctgtctctactaaaaatacaaaaattagccaggtgtggtggcacacgcctgtagtcccagctacttggtaggctgaggcaggagaatcccttgaacccgggaggcggaagttgcagtaagctgagacctcaccactgcactccaccctgagcgacagagcgagactctgcctcgaaaaaaaaaaaaaaaaaaaaaaaaaaaaaaaaaaaaaaaccttacgtatctttaggaaagctctctttgcaacaagattatattttcttacttaatcttatgatttttatttctaaccatttaatataatatacggccaggcacggtagggctcatgcctgtaatcccagcactttgagaggctgaggtgggtggatcacgaggtcaagagatcgagaccatcctggcaaatatggagaaaccccgtcactactaaaaatataaaaattatctgggcgtggtggcacgtgcctgtagtcccagctactcgggaggttgaggcaggagaatcgcttgaacccaggaagcggaggttgtggtaagctgagattgcgccactgcactccagcctggcaatagagtaagactccgtctcaaaaaaaaaaaaaacaaaccaatatactatgggcagatggagtgcggtggctcacgcctgtaatcctagcactttgggtgggtgaggcgggaaaatcacttgaggccaggagctggaaatcagcctgggcaacatagcgagactccatctctacaaaaaatttaaacattagccaggctttgtggcatgtggttgtagtcctagctactcaggaggtagaggcagaatgaggcagaaggatcacttgagcccaggagttcaaagttacagtgagctatgattggtccactgcacttcagcctgggcaacaaaacaagaccctatctcttaaaaaaaaatacatatacacatacgctatgggagttctttgcagatttaaatatttttaagtagctcagtactgtgtcaattcatgagtagcacatggtatttacagagaagaggacttctctctccctttggaaatgacctctctcccattacacagagaaggagagccatcatctgcctgcagtcaagtatacaaaccttcccttcaatctgaagagtagaaagtgttccttctccttagagaaggcaaaccctttgacctagtctctcagtagcatcctctcctgctatgtcagggtcctctttccgtttttccctctctcctatgtcagcttttccccctctattcacacctttccttcagcatttgaatgtattcttccttcactttatgaactgctgcatttattttcctgtcttttcatcctcttcacagctagacttcttgaatctactctacatatctctatttttttacacttcttgctatttatttcccagcccactgcaatgtcttatttctagcattccactgaactaccaccaaaactattttttttttctgagatggagtcttgctcttgtcgcccaggctggagtgcaatggcaatctcggctcactgcaacctccgcctccagagttcaagtgattcttccgcctcagcctcccgagtagctgggattacaggcgcctaccaccatgcccagctaacttttgtatttttagtagagacagggtttcgccatgttggccaggctggtctcgaactcctgacctcgtgatctgcccgcctcagcctcccaaagtgctgggattacaggtgtgagccaccgcacccagcccaccaaaactacctttaccaagatcaccagtgtcctctgtgtgttaaatcatgcattctcaaagcagataaaaactgcttcttgtgaggtgaaaaaaatataatactctttttatgtgtaaagcacaaatacaatacataaacagagaatattctgtggtattaaaattttatggtgatattaattagcttcatttaattattccacatttcataaatcataacatctggtacccctaaatatatacaactataatttgtcaatttacagttgaaaaagaaagaataataaaaagttttatgggtgaggaatttgattggcagggtggtgagaagatggagtctaaaagggctccttagcaggcattaaggaaaagaaagtttaaaaaacactcttaaatcaacagacattttcaattcttttttgttgttgttgagatggagtctcgctctgtcatccaggctagagtgcagtggcgccatctcggctcactgcagcctccacctcccgggttcaagcgattctcctgcctcagcctccagagcagccgggattacaggcacccaccaccacacccagctaatttgttggtatttttagtggagatgggatttcaccatgttggccaggctggtctcgaactcccgagctcaggtgatactcccactttggcctcccaaagtgctgggattataggtgtgagcaccacgcccagctgacattttcaattctcgtagcttaacctctttgtgccatgtaacagtatttaccactccattcttctggaaatacactaataagctatagttactaaaaaccaccctgtttttttttttttcttaggactcttcagtcacatcttggtcattctttaggtccacttccttgacccacctcctactcaaatgttggagttcctgccataagctctcttcatactatgcacattctttcttttgtttcaattctccttttgattaattcccattaacaaaaaatcctgattacttacaattctgattccaatctggcttctctaaagcaccagaagggtatatataatagttttttgaatatatttatttgggtcagatgtatccagaattggtcaaattacacaggaccaggccaagtgacacatctctctcatctccacacaccccctcctccaagcctaaatgttttttagcacaaaacctaaatgtttctcttatcttttcactgtaccccatcctcatagtcaagactctagaccaggccatcaccactcatctcccaactggtgtcacagtgttcagttaccgattatccagtttccgcagtgtaattagtatgatctttctaaaaatgtaaatcggattgcatgattaattaaaaaaattataaaatgactttacattgcactaagaataaagtccaaactccttaacaagtttagcatgctccatgaaccaatcagtctctgcttacctccttgtccagtttcatctcccctcttccctccaccttccatatttgctaaatttatactggatttatttgtcttgtgttctctctcacctctaagccttgtagattcccacagcacactatatttcctgtatcatcgtaggaattacatcttaactgtattaagttgtcttctctgctcatctctaaatgctgtgagtataggaactctaattttgtttgttcttatatacccagtgcctcaaaactctgtgttgaatgaatatgtggtcaagatattggctgagaatcagaagagtagatgcttttctggtctcattctctcaagttcagtataggcccttctgtgcctccatcatattatatatagaaggaatacatttttgtttttagacactgtcttccaagaatattttgactattgtaaatgcattgcttgtgaattacccaggatgattataaaatgtttagtaaaaaggatttatgatgtatttaagctgcagtcaaagctctggtgggtctgcctctgaacacagtttcttctagtggcttttaaataagctgggagaattctgttttatgactcaaaagccactaggaacaaaaagatggttgtggtaataatgagtgtgtagttttctcagaaagtttatgaaaataataattaaaaaaataactgcagctaccaaaaggacgataaataaagaaacaggctaatttacactgcaacatggtattatttaattgttatatgcattagaccttggtcataatatggatagaagaagtaagctctcttttcctattatagaaggttaagatgggttttaaagctaagcacagtcgagaacttacaagtgttatgctttcatctcagcactaaggataacaacaataaatctaggaggctggtttaactttctgtattctgagacctgaactactgccaataaaaacaacttcggtggaaactttcctggaaagaatttttcaccagcttaagaggatgagtagagatctggccctaaaataaagtaactacaaaatcacttactttcaaaacaagcaactctttcagagtgtattgtggcaaaggagcactataaatccttgtgaactatattttcgataggatgaatgattttagataacctgtgtcggtgcttttaaatataacttccactctaaataatttattaaacttcctcagcataacaactagaatgtcttttgcctcctaactaaacaagaaatgtcttttacctcctcctcttaaatcataagctaggctgggtgcagtggctcatgcctgtaatctcagcactttgggaggctgaggcgggcggatcacgaggtcaggagttcgagaccagcctggccaacatggtgaaaccccatctctactaaaaatacaaaaaattagctgggcatggtggcgcatgcctgtaatcctagctactcgggaggctgaggcaggagaatcgcttgaacccagcaggcggaggttgtggtaagaggaaatcgtgccattgcactccagcctgggcaatagagcaagactccgtctcaaaaaaaaaaaaaaatcataagctaaagcagcacattcatgcactgttcaatatattaactactaaccatatatggttatttaaatttaaattaattaaaattaaaacttcaggctaggcttggtggctcacacctgtaatcccagaactttgggagatcaaggtgggaagatcacttgagcccaggagtccaggatcagcctgggcaatataggcagactttgtctctacaaaacaaaaatttgaaactcagctgtgtgtggtgatgcacgcctgtaagcccagctactcaggagactgaagtgggaggatcgcttgggctctggaggtgggcgttggagtgagccaagatgacgcagctgcactccagcctgggcaacagagcgagaccctatctcaaaaaaaaaataaaaataaaaaagccgggcatggtggctcacgcctgtaatcccagcactttgggaggccgaggcgggtggatcatgaggtccggagatcgagaccatcctggctaacatggtgaaaccccatctctactaaaaatacaaaaaattagccaggcgtggtggcgggctcctgtagtcccagctactcgggaggctgaggcaggagaatggtgtgaacctgggaggcggagcttgcagtgagcagagatcacgccattgcgctcctgtctgggagacagagcaagactccgtctcaaaaaaaaattaattaaaatttcaaaaaaattaaaacttcagtattgggtacattagccacatttcaagtgctcaatagccatgggtgtagtggctaccatattagcacagataaaggacatttccatcattgcagaaagccctgttggacagtgctgtattagaacgtgttcctaataattagtctctacaaggcagataagagcaggagctcagaattcagctggatttaggtttgaatcctagcttactgcgtgatcttaggtaattgacctaacttttctgagatgacattgtcttatctgtaaaatggggataatagtagtatttatggtgtagcattgtgaaaataagatgagataaagtgtctagcatagtgtctggcccataataagtactcaatacattttagatagtattaattcatttattattcattatctttaatgaataaaacactttgaatggggactgagtacagtagcttcactttgggaggcgaaggcaggcggatcacttgaggccaacatggtgaaaccccatttctactaaaaacagaaaaactagctgggcatggtggtgcacacctgtaatcccagctactgaggaggctgaggcacgagaattgcttgcccatgggagacggaggttgcagtcagcagagatcacaccactgcactccagcctgggtgacagtgggagactctgctcaaacaaacaaacaagctttgttcccaagtagctgggattacaggcgcacgccaccatgcccggctaatttttgtatttttagtagagacagggttttgccatgctggccaggatggccttgaactcctgacctcaggtaatccaccagtcttggcctcccaaagtgctgggattacaggcgtgagccactgtgcctggccaaaaataaccacattgaatggggccaaaagattaatttttgcaaagaatgctgtgttccatatgtgactcacctgaagtgcccaaatctgagtctgcttgtggattacagtgctccacttgaagtcatacattatatatttcagatgctgattttcttccaagaaaaaggtgtaataataaaaatttagttgcagatcttatggttggatattcctgtttcatttaaaaaatgaaaatgaaaagtttatcagctaaagattatagttaaaatcagcaggttctatatagcaagtctaagtattctaatggcacttatattaatacccagacagaaatataagacacaaagcaagcctactaagcaaagcatctgactagataaagtagaaaaatttggcaggttccaaccctgaggtgtcagagtttattgctaataactcaagttgatttcttggctaaacagagggctttaaacaaagaaattttttggttctaattaaacaggaaccctaaactgttaacagtattcatactttattaatacaataattactaaaacatatcttagtaactagtattattgataactactgaacatgtgtcgaatgggaagaggagatcatcaccacatattctttaaatgtcagccgctttcataaaagaaagggttgatgttgttttctgtcaacagaatcaaatgaatcaattctggaaagtcttcctttcctctttggaatttatcttcattcatagaaactgtattcataggtcttaaattctttcttcttagactatagtactattacttggaatgattgagccactagactaaacacctgatactggtgcttatacacgtaaaagataggaacaaggtaagataattagacatttttccattgtcccccatattgcagggacaataaacttcttataggaagcataactaacactcagaaagtatgcaaatcacaatgtaaagcctaatgagttatcatagaaggaacacagcttgtaaacatcatgcaggtcaagaaataaaacattggccaggtgcggtgtctcactcctgtaatcctagcactttgggaggctgaggcaggcggatcacgaggtcaggagttcaagaccagcctggccaacatagtgaaacctcgtctctattaaaaatacaaaaaaaaaaaaaaactagccaggtgtggcggtgtgtgcctgtaatcccagctactagggaggctgaggcaggagaatctcgtgaacttgggaggcagaggtttcagtgagccgagataacaccattgcactccagcctgggcgacagtgtaagactccatctcaaaaaaaaaaaaaaaaggaaaataaaaaagaaataaaacattaccagcactctaggagatcatccccatggccctccactctccataaaggaaaccatttgatttaacgtagattagttttgcctgttctacaacttcatataaatggaatcatactgtgtatattcttttgcatctggcttcatttattcaacatcgtatttgtaagattcgtttgtatgtatatattctttgagtaaatgtcttttcaaatcctttgcccattttttaattggcttgtttatttatttattttttatgttttagaggcaaggtctccctctgtcacccaggctagggtgcagtggtgggatcatagttgactgcagcctcaaactcctggactcaggcaatcctcccacctcagcctcccaagtagcagggactacaggtatgagccactatgcctggctagtttttaaatttttttatagagacggggtctcaaactcctgggctcaagcaatcctccctcctcagcctcccagagtgctaggattacagttgtgagtcaccacacctggcccttcttattattgagtaaaagttctttatattttccggataggggtccctttaagatatatggtttcaaatatttactatcattttgtgaatttttgctttcttgataatgtcctttgaagcactaagttttaaatttgatggactctgggttatctattttttatttttcttgtctgtacttttggtatcgtatcttaaaaaacattgtctaatccagagtcaaaatctatgcatattttttctaagagttttatcattttggcttttccaattaggtctttgatacattttgtgttgctttttgtatccaatttcattcttttgtatgtggaaatccagttgttccagtaccatttgttgaaaaggttgttctctctccaactggtcacccaggtcttggcacccttgttgaaaatcagttgaccataaatgtaagggttaatgttctattgatctgtaggtctgtccttgtgccaataccacatagtagttttgtagtaagttttgaaatcaggaagcacgagttatccatcttcgttgttcctttttttttttaattcaaatatatatattttttcaatctttttaattctacatatttttgtaagcatccccccaattcttgtttcatagtaaatcagactgtagatgaagcatttcagaccttttgtcaatcatgtcaagtgtgaggggaagtcttttgtaagtcagccaagtatttcaaaatgaaaagcttttccaaaagtaaaggcagaagaccccgctttgaaggcgctggtcggcacagaagggcttgcaaaggtatgtagggaagtccaccggttacaggtgtaaggtgagtttaacctacggcgaccagctggccaggagcgccccaaggcagacgaggacgtggggcttgggcgcacggccgcctgcagccatctcgccccagatcctggctcaggaaacgcaggctcgggctggggtggatgtgtgcgccccagggccctggcacccgggggaccgagggctcctcccaggtccttggaacagcagagtggctcccaggaaggatgctcagctgcaggtgggggtccctgctcccaagcaccctggccagggaggaatggcgcaccccaccccgttcgcccctgttgttccttttcaagattgttttggctgttgatctttttcaattccttatgaatttaggattagcctgtcaaattccacgaaaaggcagctgggatttttttttttttttttttgagatggagtctcaatctgtcacccaggctggagtacagtggtgcaatcttgagtctcggctcactgcaacctccgcctcccgggttcaagcgattcttctgcctcagcctcctgagtagctgggactacaggtgcgtgccaccacgcctggctaattttagtagggacggggtttcaccgtcttagccaggatggtctcgatctcctgacctcgtgatccacccacctcggcctcccaaagtgttgggattacaggcgtgagccaccgcgcctggccttttttttttttttttagtagagacagagtttctgcacgttggccaggctggtcttgaactcccgacctcaggtgatccacctgcctcggcctccccaagtgctgggattataggcatgagccaccacgcccggcctgaaattgttttatttcattttcagttttgttttgtttttttttttttaatagagatgaggtctcactatgttgcataggctggtcttaaactcctgagctcaagcaatcctccttcctcagcctcccacagtgctgggtttataggcatgagttacaatgcctagcccatttttagtattttatagctatagtggatagaaatataattgatttttatattgacttgtgtcctgcaagcttgctgaactaaatttattagctctaataggtttttttttgtgtgtgtgtggattccttaggattttctatatataagattgtatcttctacagatacagttttacttcttcctttccaatttggaagccttttgttttattttcttgcttaattgccctggttcaaacctctagtaccatgttgaatagaaatgatgggactgggcatccttgttaggttttgttattaaggagaaagtgttcggtctttcacctttaaatataatattagctgtggggttttcatcaggttaaggaaattttttttttttttttttttttttttagatagtgtctcacttggtcacccaggctggagtgcagtggcgcaatcttagctctctacagcgtcgatcttcctcctgggctcaagcaattctcctgcttcatcctcctgagtacctaggactacaggcaagtgccaccatgcttggctaatttttgtattttttgtaaagatgatgttttgccctgttgcccaggctggtctcaaactcctgagctcaagcaatccgcccacctcagcctcccaaagtgctgagattacaggcatgtgccactgagcctggctgaggaagtttctttttgttcttaaatggctttcttttttttttttttttttcgtaaaaggatgttggattttgtcaaatgcaatttctgcaccttttgaaatgattgttttagttcttattgtatatcatgttgattgatttttgtatgttgaaccagccttgcattcttagaataaatcccacttggtcaaggtgtataatctttttgtgtatgttaaatgatatttaatgtataataaatttaaacctttctttgccccaacagaaaatgatccacagtctatttctcataaactgttccggtgacatatttctagagaagcactggaagagcgttgtgagccagtctgtctgtgattatttctttgaagctcaagagaaagctgctgatg

SEQ ID NO: 10790 - DNA, 550 bp, Homo sapiens
ggggtgagtgtgaggggcgggaaatctgtggactggggacagctccaaaacccgggagtaggctgaatagctggggcccccgactccgatctgggctctaggagcgtctttggtgctgttggcccgggcctcgcttcccccccactcccggccttccgggctttctcgccagcaaggccagaagggagcggtccacctgcagcccagtgttctcaggcgcctgagccccggaggtcaagcttactgggttccccctctatagtgagctggagtacagacggcaggaatctcagtcccaggtttctgctttggaggacaaaaccccaaacggacctgagcagacgtcctgttagcgggtggtgcctggaagagcctggggtgaggaatgcagtgagaagggtgttgcagttcttcaggagagagaaaatgatccacagtctatttctcataaactgttccggtgacatatttctagagaagcactggaagagcgttgtgagccagtctgtctgtgattatttctttgaagctcaagagaaagctgctgatg

SEQ ID NO: 10791 - DNA, 3525 bp, Homo sapiens
ccgggacccgcagttccagggtcttttccaatacctgctgcgccccaaggccagtggcgccactgagaggtacggggccctagggccagggggccaccagtggctcagagagcccggccacagccactggggtggggctcactgctcagccctaggctgaggccagggtgctttgtgtcccacacaaggctgcgtccccgtcatcaccattatagaggccctgcttctgcaccacgggtctgccgggggcggggcctggtctcagctctctctgctgcccacatcaaccctcataagcttggaggttggccctgtgggtgctccattttgcagatggacaaaccgagcctgagcccaggaagcaggaggcctgggaccggccacaggcctcctgccctcagcccacgccagcctttgtcccgatggctttactgtcccgggtgtgctgacgccaggggtctccccaaacccaggggagcaggaggtcccgagaggcgatgagtgaggatgggagcgggctcagctgtgcgagagggagcagtggcgacgtggccccggcctgcagtcaccaggtcggggagcgggcagcactcacggccacactgtgtcctcaggttggcgccactccaccagctgctgcagcccatggccggctgtgcccgcgtggcccagtgtgcccaggccgtgcccacgctgctgcaggcattcttctcagcagtgacccaggtgagctcgctgcctggggccccccattcccacaggcctcacaactgaggggcaggccagagccagcactggggggccctcttgagctctgcagaaggctgctcccgccacacccaccatccacggtccctgtgagggtcagggaggcacatgccacagccccggcaggccccgtcccttgtcccatcccctttattccagcaggccccgttccccagtccccgtcccatccccttcatcccggcaggccacgtcccccaatccccgtcccatccccttcatcccggcaggtcctgtctcccatcccagcaggctccatccaactgccccagcaggccctgtcttccgtccccaggacagggcaagtgagtggcctgggctctggccacacagctggggccggagcagtttgtccccctgctgcccctgataattcagcatccccatctgaggccaaaataaaggctcccacaggctggtgccccccatctcccccattgctgcttcccacctcggggagctctacaagccagtgcaggagagcctgggaggtggggaggccggcagggggctgggcgttgcttgggcgcacccttggccaaacaagacgtgtgcctggccttgcagagcgggagttggcagaggagccgtggaacagaagcgacacctctgccgggggcacttgggccagcccagggcttccctccctgtgcccggatgctgccagctgagtctctgtgtccctgggtgttggggaaggcagtggacgaggagtctccagcccctcacctgccccccagccctcaccatggcttcacccccaaccttagggcctgcagtgggggtggggctgagcctgtttcccactcctgacccccaggtggctgacgggtccctgatcaaccagctggcgctgctgctcctgggcaggagcgactcgctctacccggccccagggtacgctgccggtgtgcacaggtaggtccctcctgcgctcctgccacagccctgggcgggtgcctcctggactcctccccctctcccctcccccctccccttcagtggcttcggcaccacccctagctgggccctcagcagcctcagaccctgccacccccacccacagccccacacccagccccaggcacttctctctgcttctcaagaacattcccgtccttctttctgccgagcctgtcctcttcagggttagctcaggtccctcttccccgtcttgtcccctggggtccttctctccaaaggcctgatgcatgcaggcccatcctggttccactctgagcctgggcctgaggccagcgctggtgccagccttctccccagtgagaacagtttctctgaggctggcagtcttctgtgttcctctatcggagggtgcagcatacacctaccactcagacgcttcccgggtttctccaggcccttggcctggatggggatggggtcataggtctgcacagagcaggcgtagacccggctttctgggcagtgtgctgagttctcagttcctggccctgtgtacgctgaaaccctccctggtggtggagctggcaagagacctgctggagttcctgggcagcgtgaatggtctctgcagcagggcgagcctcgtcaccagcgtggtaaggcgggcgctggcctcccacagccgctcctgacccaggaggcctgggtgggggctgaatctctgtccccgggcctaggtgtgggccatcggcgagtacctgtcggtgacctacgatcggaggtgcaccgtggagcagatcaacaagttcttcgaagccctggaggctctgctattcgaggtcacccagtgccgcccctctgctgccctgcccaggtgtcccccccaggtggtcaccgtgctgatgaccacgctgacgaagctggcctcccggagccaagatctgatccccaggtgcctggtcagggagggagcgaagccttctggctcctggggaagagaggtggcttctgaggtcttcccatccaggtgttgtgaaatggtcgcagcagcgcaggtcctgggtgggccctgctgagctaaagccactctgctgggcgcttcaggcctggcccctccacacagacccctgtcctgggaggggagcatctgcagctgacggagggaccttctttccccagggcctctttattgctgtcaaagatgaggaccctggctcacagtccagccaccagctccacgcacagcgaggagggcgcggaagccatccgtacccgggccacagagctgctgaccctgctgaagatgcctagcgtggcccagtttgtgctcacacccagcacggaggtgtgcagcccccgctatcaccgcgatgccaacacggccctgcccctggccctgcgcacggtcagccggctggtggagagggaggccggcctcatgccagggtgaagggacagtggccagggacttcggtgcagattaagagcctgggcagccagcttgctactgaggccaggctgataggagctcaggagggcgcgggagtcctgggagaggaggcaaggcccacggtgggcttggcaccctcacagacacgcggggctggcccccctgctcaccctctgggctttgtctccgagccttttgctcccaggcaacactgagctgagctgaggggtgccatggagcggctctgattggaggcttgaggccctgtggctgggtcgggtggaggctgctgggtctgtttcctagtcttttgtttttggacagttgatgggcaagaagagctgcagtaaaagtaaatctccttt

SEQ ID NO: 10792 - DNA, 2337 bp, Homo sapiens
ccgggacccgcagttccagggtcttttccaatacctgctgcgccccaaggccagtggcgccactgagaggtacggggccctagggccagggggccaccagtggctcagagagcccggccacagccactggggtggggctcactgctcagccctaggctgaggccagggtgctttgtgtcccacacaaggctgcgtccccgtcatcaccattatagaggccctgcttctgcaccacgggtctgccgggggcggggcctggtctcagctctctctgctgcccacatcaaccctcataagcttggaggttggccctgtgggtgctccattttgcagatggacaaaccgagcctgagcccaggaagcaggaggcctgggaccggccacaggcctcctgccctcagcccacgccagcctttgtcccgatggctttactgtcccgggtgtgctgacgccaggggtctccccaaacccaggggagcaggaggtcccgagaggcgatgagtgaggatgggagcgggctcagctgtgcgagagggagcagtggcgacgtggccccggcctgcagtcaccaggtcggggagcgggcagcactcacggccacactgtgtcctcaggttggcgccactccaccagctgctgcagcccatggccggctgtgcccgcgtggcccagtgtgcccaggccgtgcccacgctgctgcaggcattcttctcagcagtgacccaggtggctgacgggtccctgatcaaccagctggcgctgctgctcctgggcaggagcgactcgctctacccggccccagggtacgctgccggtgtgcacaggtaggtccctcctgcgctcctgccacagccctgggcgggtgcctcctggactcctccccctctcccctcccccctccccttcagtggcttcggcaccacccctagctgggccctcagcagcctcagaccctgccacccccacccacagccccacacccagccccaggcacttctctctgcttctcaagaacattcccgtccttctttctgccgagcctgtcctcttcagggttagctcaggtccctcttccccgtcttgtcccctggggtccttctctccaaaggcctgatgcatgcaggcccatcctggttccactctgagcctgggcctgaggccagcgctggtgccagccttctccccagtgagaacagtttctctgaggctggcagtcttctgtgttcctctatcggagggtgcagcatacacctaccactcagacgcttcccgggtttctccaggcccttggcctggatggggatggggtcataggtctgcacagagcaggcgtagacccggctttctgggcagtgtgctgagttctcagttcctggccctgtgtacgctgaaaccctccctggtggtggagctggcaagagacctgctggagttcctgggcagcgtgaatggtctctgcagcagggcgagcctcgtcaccagcgtggtgtgggccatcggcgagtacctgtcggtgacctacgatcggaggtgcaccgtggagcagatcaacaagttcttcgaagccctggaggctctgctattcgaggtcacccagtgccgcccctctgctgccctgcccaggtgtcccccccaggtggtcaccgtgctgatgaccacgctgacgaagctggcctcccggagccaagatctgatccccagggcctctttattgctgtcaaagatgaggaccctggctcacagtccagccaccagctccacgcacagcgaggagggcgcggaagccatccgtacccgggccacagagctgctgaccctgctgaagatgcctagcgtggcccagtttgtgctcacacccagcacggaggtgtgcagcccccgctatcaccgcgatgccaacacggccctgcccctggccctgcgcacggtcagccggctggtggagagggaggccggcctcatgccagggtgaagggacagtggccagggacttcggtgcagattaagagcctgggcagccagcttgctactgaggccaggctgataggagctcaggagggcgcgggagtcctgggagaggaggcaaggcccacggtgggcttggcaccctcacagacacgcggggctggcccccctgctcaccctctgggctttgtctccgagccttttgctcccaggcaacactgagctgagctgaggggtgccatggagcggctctgattggaggcttgaggccctgtggctgggtcgggtggaggctgctgggtctgtttcctagtcttttgtttttggacagttgatgggcaagaagagctgcagtaaaagtaaatctccttt

SEQ ID NO: 10793 - DNA, 2665 bp, Homo sapiens
ctgttcagcgggcacctcagcaccctcagattgagcttccccaacctctttaaggtatatttgggcatccctgggtgccagggcaggggcatggtaagtccctggggctcctcccctctttccagcggggttcagggcgagtcctggctgagcatagagccctgtgagtcccgggcctggaatgcggtgtgcagggtgaggtggggatctggggtgtccctgcagcgtcacgtgattgacggtgctgtccaagaactcccttgtgggtgttttggagagggggctgtgacacaagacggtgagtttgttctcacagcactggggcagggctgctgcctggtaggatccctcccccgggagccctgcctggtgccttgggcacttgggtgccatttgccttttttttttcttttgagatggagtctcattcctgtcacctaggctggagtgcagtggcgcaatctcagctcactgcaacccccgcctcctgggttcaagcgattctcctgcgtcagccacctgagtagttgagattacaggcacccaccaccatgtccagctaatttttggtatttttagtagagatggggtttcgacatgttggccaggctggtctcgaactcctgacctcagatgatcctcctgccttgacctcccaaagtgctgggattacaggcatgagccaccgcacccggcctggtgccatttgcttttgaagtgtcttttgcagcctcgcctcgctgtaaggtcttttcaactgaggtggggaatcctctttctggagaaaaaccaggacagtggaaaattattgacctgttggtacgaaagtagatacaggctgggggcagtggctcacacctgtaatcccagcacctcgggaggccaaggcaggaggatcttgaggccaggagttcaagaccagcctgggcaacacagggagacctcttgtctacaaaaagtaaacagcctcacatggtggtgtgtgcctgtagtctcagctgctcaggaggctgaggtgggaggatcacttgagcctgggaggttgaggttgcagtgagctatgattgcaccactgcactccagcctgggcgacagagcaagaccctgtctcaaaaaaataaaaagcgggaggaggcaaaggtagaagccctcctggggactgcaggtctgggacagctgtggggccctagctggctcctccctctgccgcctgctccacagctccgagccgtgtccgaaccgctgtgctgtgcccacagttcctggcctggaacagcccacccctcacctccgagtttgtggcgctcctcccggccctggtggacgctggcacagccctggagatgctgcacgcgctgctggacctgccctgcttgacggcggtgctggacctgcagctcaggtgggcccctcaccctctgccagcgctgcgtctcccagccagctggttccacacactgggccccctcctcgctgctcctgacccctacaccggggaccctccttcttccccccccaacacctgaccagtcctcccctgcaaagccacctctaggacagggtgtgtctgtcacccttggccacttgccaagggcagcccctgcaccctggagtgcctcacccgtcttcacgcccaggcctggagcctcccatgccaagcccttcctggcacccgaggtgctgtgatattagggacacctgccgtgtgtctccctgacgggggtgcccttgagtgcaggggccgcatcccagcctggccttgggcgtctgtccacgcaggtcagcaccggctgcatccgagaggccactctgggacacctctctcagggcccccagctgcctggaggccttccgggacccgcagttccagggtcttttccaatacctgctgcgccccaaggccagtggcgccactgagaggtacggggccctagggccagggggccaccagtggctcagagagcccggccacagccactggggtggggctcactgctcagccctaggctgaggccagggtgctttgtgtcccacacaaggctgcgtccccgtcatcaccattatagaggccctgcttctgcaccacgggtctgccgggggcggggcctggtctcagctctctctgctgcccacatcaaccctcataagcttggaggttggccctgtgggtgctccattttgcagatggacaaaccgagcctgagcccaggaagcaggaggcctgggaccggccacaggcctcctgccctcagcccacgccagcctttgtcccgatggctttactgtcccgggtgtgctgacgccaggggtctccccaaacccaggggagcaggaggtcccgagaggcgatgagtgaggatgggagcgggctcagctgtgcgagagggagcagtggcgacgtggccccggcctgcagtcaccaggtcggggagcgggcagcactcacggccacactgtgtcctcaggttggcgccactccaccagctgctgcagcccatggccggctgtgcccgcgtggcccagtgtgcccaggccgtgcccacgctgctgcaggcattcttctcagcagtgacccaggtgagctcgctgcctggggccccccattcccacaggcctcacaactgaggggcaggccagagccagcactggggggccctcttgagct

SEQ ID NO: 10794 - DNA, 576 bp, Homo sapiens
ctgttcagcgggcacctcagcaccctcagattgagcttccccaacctctttaagctccgagccgtgtccgaaccgctgtgctgtgcccacagttcctggcctggaacagcccacccctcacctccgagtttgtggcgctcctcccggccctggtggacgctggcacagccctggagatgctgcacgcgctgctggacctgccctgcttgacggcggtgctggacctgcagctcaggtcagcaccggctgcatccgagaggccactctgggacacctctctcagggcccccagctgcctggaggccttccgggacccgcagttccagggtcttttccaatacctgctgcgccccaaggccagtggcgccactgagaggttggcgccactccaccagctgctgcagcccatggccggctgtgcccgcgtggcccagtgtgcccaggccgtgcccacgctgctgcaggcattcttctcagcagtgacccaggtgagctcgctgcctggggccccccattcccacaggcctcacaactgaggggcaggccagagccagcactggggggccctcttgagct

SEQ ID NO: 10795 - DNA, 16120 bp, Homo sapiens
cggaagttgaccggggtgcggagctcctgggctgcagctcctggagtttccgaggttcgtgcgcgtctggtggcggcggcgtgatgttctcggcaggagcggagagtttgctccaccaggccaggtacgggggagctgcggccccggccctccttcctgcatctctccctaggggcacacgggggtgggtctcacagggcaggggcttgggcgccagccttgcaggaacccgactggactcgccctcgagacttggggatcgggtaaggcaacacggcggccaggcttggggtgaggaggtcggggagggtcatggtgggtccccggaggaggtgacacttgagcagagtcttggtgagtgaaagcaagtggggtgggacccagtcgacagtttagtcaaaggcttggcggtgagaactccgcgtctggcaggaaatcgggcagccgggagatttcagtgcctcacagtcaagaacgcaaagtcacagtgtccggaggcctgctaaggaataaggctgtgtgccaggctggggagctggaggccatccgagggctttgcggaaccgtgggagggttttgtgacttaaaaagatctctcttgcgcggatgtattagctaggctgagaaatcaccctccaggctggtttcaggctgtgtctggactcccagtaacgagtgagtagctccttcctcaccaactaaccagtcatgggggaaaacagtgtaagccaggactgaacagactcacggtccaccaaacaggcaaagacttcatactacatgtttaaaagaagaaaatgctgaccgggcgtggtggctcacgcctgtaatcccaccactttgggaggccaaggcaggcggatcacctgaggtcaggagttcgagaccagcgtgcccaacatgaggaaaccacgtctctactgaaaatacaaaaaaaaaaaaaaaaaaaaaaattagccgggcgtggtggtgggtgactgtaatcccagctactcgggaggctgaggcaggaggattgcttgaacctgtgaggtggaggttacagtgagctgagatggcgccactgcactccaggctgggggacagagcgaaactccgtctcaaaagaaaaaagaaaaaaagtaaagaaaatacagccagcactacagccccttggtaaacgtaaacaaacttggtgaggtgagaggccgaagcaggagaagtgcatgaacccaggaggccgagggtgcagtgagccaagatcgcaccactggactccagtctgggtgacagaacgagactccatgtcaaaacaaacaagcaaacctggactcagagctagaccaattggtgggaaagattcgggtggttgaaattgctgtgattatagtgagtgaggtcttgaaggcaggttaagttctaaagcccgaacaggacaaaaatctctgatcaaaataacccttaagagtccactcattaggaagaggcttggtgaatatgcagcaccatctcccagcagctcaacataggcaaccttcccttcaatcctggacagatatgtcattcatgtgaatgtggggactatatgaaaatgaaaaatactggcatctcagcatgtaacatgttaatcccaaggtccttgccaagagacaaggaaaaacacccactgagaacttcattcccagtcacattctgctcaaggtcataaacttgtgacatgaaaaacaaaaggaagagccctctttatttatttatttatttatttatttatttatttttattagagtctcttttgagacagagtctccctctgtcgcccaggctggagtacaatggcgcaatctcagttcactgcaacctccgcctcctgggttcaagcaattctcctgcctcagcctcccaagtagctgggattacaggcgcccgccaccacacccggctgattttttgtatctttagtagagatgggatttcaccacattgtccaggctggtctcgaattcctgacctcaggtgatccgcctgactcggcccctcgaagtgccgggattacaggtgtgagccaccatacccggctgagccctcactatttaaatacctgtttctctgcctccctggctcgggtgggcagccgtttttgaggatagagtgtggttgaatttccctatgtaacatacatgagttctgcagttgccctctgttagggtttcaagaaggttaatctattagggcttaccagttttcacaatattcttaagcctgtgatttctgatgatattttaaaataaatgactgtagtttgagggttaaggtttggagccggccaggcgcagtgactggcccacgcctgtaatccgaacacttcgggaggccgagttaggaggatcgcttgaggctaggactttgagaccagcctggacaacatagcgagacccgtctctacaaaacagaatttttaaaaaacttagccaggtgtggtggcacgtacccatagtcacagctactcaggaggctgaggcaggaggatcacttgagccaaggaggttgaggctgcggtaagctatgatggtgccactgcactccagctcgggtgacagagggagaccctgtctccaaagaaagccaaaaagatttggagtgaactttagtttctctctaaatgtgtcagagatacggaaagcaagggtgcaaaaagtgatcaaagatagcgctgcaagctgaaggataaatggagagagcgggaagcgagtaaaggatgggggcatggaggggtgccccgcaaggtcggggatttccaggaggaagagcctcagcccactagctcgggagctagtggggcatgtatcaggcacagggtctgtgcgaagggacagaagcaaaagaaacaggacatggagtctggagaaggaaggcggggccgggctcttggaggcagcgttggggtctgtaggagtttggatttgaaagcagtggggagctgttgaagggtttgggtgggttggattttagagagaagcttgagacttggagaatatgctgaagggaatttaatcgggatgaggggttccacctttctgggaaagattttccattgtgtgtatatatgtatatgtgtgtatatataatttatatataacattttatatattatatattacatatatatttagtaatatataatataattatatgttatatattatatgttatattatatatcattatatataatatataatgatatataatattttatatataatcaaaaaaagaataaaaaaaattcactgggcttagtgtagtcccagctacttgaaaggctgaggtgggagaactgcttgagctagaagatcaggctgcagtgagctgagattatgccactgcactccagcctgggtgacagcataagactctatctcaaaaaatatatatatagatagatagatagatataaaaatatatttttatatgtaatatatataaaatatatattatatacatttttgagatagagcatattatatattatatataacatatataacaactatataacatatataacataacatatataacaacataatatatagcatatattatgtataacatatattagatataacatatataacattagaaataatgtatataacataacataacgtatataacgcatataacaacatatataacgtatataacataacacgttatatatgatatataacatataacatgttatatatcataacgtgttatatgtcatataacatgattattatatatcatatataacatgataacatatatatcatatataacatatataacattatatataacatatatattatattatatatatatatttttttttgaagtagagtcttactctgtcacccaggctggagtgcagtggcacaatctcagctcactgcagcctgatcttccagctcaagcagttctcccacctcagcctttcaagtggctgggactacaccatgcccagtgaattttttttatttttatttttttttgtttttgagacggagttttgctctcgttgcccaagctggggtgcaatggcatgatctcagctcactgcaacctcctcctcccgggttcaagtgattctcctgcctcagcctcctgagtagctgggattacaggcttgtgccaccacgcccagctatttttttttgtatttttagtagaaacggggtttctccatgttagccagctggtcttgaactcctgacctcaggtgatcagcccgcctcggcctcccaaaatgctaggattacaggtgtgagccaccgtgcgtggccgaattttttttattcttttgtagagatggggtctcactgttttgcccaggatggtctcagacatctgcactcaactcatcctcccacctcagcgtcccaaagtgctgggattacaggtggcctggggagggcacagccacgtagggggcccttctcagggagtccccagagtcccctggcacagcaacccctttgcgcattattggttctttcttttagactgggatagaaacctaaaaacaggcttccatttgggacttttcagtatcttacctgtggcttactagggagattttaaaattaagccaattagttattcgagtaaaaaaacataatgggcttaccttacaatatgtcatgacatttgttctttaatatataagattttattctcaggccaggcgtggtggctcacgcttgtcatcccagcactttgggaggccgaggtgggcagatcatgaggtcaggagttttgagaccagcctggccaacatggtgaaaccccgtctctactaaaaatgcaaaaattagccgggcgtaggccaggcgcggtggctcacgcctgtaatcccagcactttgggaggccgaggtgggcagatcacgatgtcaggagatcaagaccatcctggccaacatggtgaaaccctgtctttactaaaaaatacaaaaaaattagccgggcgtggtggtgggtgcctgtaatcccatctactcggaagactgaggcaggagaattgcttgaaccccggaggcgaaggttgcagtgagccgagatcatgacactatattccagcccgggtgacagagcaagactccatctcggggaaaaaaaaaatttattcttgtttccataagcaaaaggctcattgaagacatcttttgaaaggcaccttattctagagtaaatttcctactcttgaatgagacccctaaaaagaatcggttttagtccttctgccctgggaacaagaaaatctaagtgcatggggcctccgtgagtgagattcgtcatagtgcgctgcagcgatggatcgggaaatcccagggtgagaggaaccagctcagggaatcagcgaatttatctcgagagccatgagccgtggaaccgtgttcctccacacactcggcttctcttttctaaagagggattttccctgctccaagggttatcctttttttggttccgagcagcgagtgcttctgggtcctgaagtcctcttctttgtttagggagatccaggacgaggagctgaagaagttctgttcccggatctgtaaactgctgcaggcggaggacttggggccggacaccctcgactccctgcagaggctcttcctcatcatctcagccacgaagtacagccggaggtgagtgtggcgacggctcaggccggctcctcacacagcggccccaggagaacccagcccacgcccagcaggtcactgcagatgctccttgggggttgagtcatttgtccacttaaaccagtgctgaaggtccatcctcatgtaaaatgctctgtccactggcccaagggtgcccggccaggtgctctggggcaccgggtgctcctgccacggtcgtgacgtgttaccgcccaccacgggcatctcgccttccaggctggagaagacatgcgtagacctgctgcaggccaccctcggcctgcctgcatgccccgagcagctccaggtgctttgcgccgccatcctgcgagagatgtccccctctgacagcctcagcctggcctgggaccacacgcagaacagccggcagctgagcctggtggcctccgttctcttggcccaggtagcgcagcagtcaccaccccagttggcaccggatggctgcttcccaaggaacaggggagacaggaagcaggggcgccagagccggcaggtggctgcttgttgtagacgcatctcggtgctgagtgcctggcacacttgaggctggggcatgccctgttgactggaacggggtcccatgcccagcaggcccacgtggtatgttggtgctcaggagaggtggtggagtttggtttctcagacagagccttgagacagcgagtcagtggaggctgggcctccagaccttctttttggggtttttgttttgttttttagaaacagggtctcactctgctgtccagtgtagagtgccatggagtgatcaatgctcactgcagcctcgacctccctggctcaagcaatcctcccatctcagcctcctgagtagctgggattacaggcatgcatcaccacacccagttaatgtttgtatttttttgtagggacctggggtctcactatgttgcccaggctggtctcaaacttctgggctcaagcaatccaccctccttggccaggagtttttgccaagtccatgtcctccctccctctgtgtcgggagcaggcctgggcactcagcgtggggatccaggggttcacaggctgcctttgtgtgagagaagctgctatctctgctcatgggttgcccaggggtgcagagtctgcaggaaggttgcgatggagctgggcttttccctccgttcccagcctgcagcgtcatgagttgcctcctgtgctggggtgcagcctgcggttgctttagttctgtgtgggcgagagcttgtgggccccggcgtactcagggcgttgtacttcatcactggggtcatcctggttggtgcccagccccctcacctcacagacctcctgcaggccacctccaggcctccgagatgaccccggtaatgctgtggtagctcctggcctttggaacaagatgactccggctcttcttgtttgtttcacccgcccttctcctcaagcaactcatttttttcagtggaagatgatcttgcagaactgctgccaggcgccagcggtgcaccccccgcccggcacgtggcctcccagccacccagccgccctcctccctgccctgacggccctgcccctgtgctgggtgtctctggtgctgctcagatgtttcagcacctgggtgtgcagagtgaggtgggtggtttaaagactgggatccacactggaggccccgcaggacggggtgtcctgtgtctgcggccagggccatggtggccgccagtgtgtttttagcattgaatcagccgtgccctcacccaggccccctccagcctcagcgatgcagctcccagggagagaggctggaggcggagcaggcaccttgtggcccggggtgggcctgcgcgggacatcctccctgccacctgctaggccggggtctcagcgaccgacgcttctcaggagtgtcacacagacttccgaaatgggggagctggtctctggcacaggccagtaccccagcgtttgccctgtttgatttgaagggtgacagaaacgaggaggtcagagccgtgggccagggcgtgctacgagcgctggagagccggcagcctgagggacccagcctcagacacctcctccccgtcatggccaaggtcgtggtcctcagcccgggcaccctccaggagggtacgcggggcccctcccaagaggctgttgggggtctgccttcccaggtccttccctgagggcccatggtgggttgggagtgtggggggcaggtgggggacacggggaggcccgagggtttgggacgctgcaggattctgttttctgagaaaagtcggccagcatcccaacaacccaggcatctgtaggattcaacctcacctccccatgccaccccacccactgcagaccaggccaccctgctcagcaagcggctggtcgactggctgcgctacgccagcctccagcaagggctcccacactccggcggcttcttctccacgcccagggcccggcaggtgaggctgggactgttctggaaccatggggaacagagtcacagacaacccctccctgagagctcctgtgcccacagcggcgaggcctgctgtcgttccgcggggtccaggacgagcctgcctctgctgcggggcttgggtcaggcagggccacagccccctgacccgtgtggctctgggggtctgtgcgcgggttcagtcccagggcctgcggagcagggtgtgcgacgcgcgtctgcctgggggtcaggtggggatggtgtttttgcatcacacagggcgggccgctgcccgggctcatgttcaggcagcttctcctccacctcctgaggagcttgtgctaaaggctggcgtttttcccggcctcggccccctccgcccactcctgcctgtccttcccacagccgggccccgtcaccgaggtggacggggcggtagccacagacttcttcacggtgctctccagcggccaccgcttcacagacgaccagtggctgaacgtgcaggccttctctatgctgcgggcgtggctgctgcacagcggccccgagggcccgggcaccctggacacaggtgtgcggggtggggggatgacgtcagacaggggtgggaggtgggcgcactatgggttggtcgcagggggacacgggcggaggtggggggactcgggtgtgcccaggatgcagcagaggtcaggactgagcaacgcagcctgctgacctggagctaggcggagagcactccctggccagcatctttggggtccagggtcagcaccggggatcctctggacaccccgtgaccctcatgcaatgtgcagatgtgagagctcccacttaaggcaggcacccttaaggttgttggagtgacgccactgagctcctcccggctgctctgtggacttgttggggaagaagcctcagccaccctgaagggcggccgtgatggggaagctgccgggtgggtggacgtcctgagacggtgacgcctcacgcctcccgggaggggctgcggcctgtgctctcctcctgcccttccaagcagggcagcaggcatgtcccagcccgggagccacacgtcagcctgctgagagttcccacctcccgcagatgacaggtcagagcaggagggctccactctgtcggtgatctccgccacctcctctgccggccgcctgctgccgccccgggagcggcttcgggaggtggccttcgagtactgccagcgcctcattgagcaaagtaaccgacgtgagtcccccacccagggcactggcctccccagggctcgacgcacctgctctgcaaggccacctgaggccagcacagcttccctgagctactgctccacagagggggtccctgggtagccggtttggagcaggggcatttttgcttctggggtcagccccaagtgttcttcaggctccaccccagcccccagcccggccctgtcccacctgggcccctcgcctcagtcccactcaagtcctcctgggggcctgtcccacccccctgctcccggtcctgcctggagcttccagagcacaagctgccccctcattgggccactctaaggctgagacagagccggctgactttttcccctccttccaggagccctgaggaagggggactccgacctgcagaaagctgtaagtggctggggaccaggggatgggaggcagcgactcggcccatttgatgtggtccatgtcccgcagtgcctggtggaggccgtgctggtgctggacgtgctgtgccggcaggacccgtccttcctgtaccgaagtctctcctgcctgaaggccctgcacgggcgggtgcgcggggacccggcctctgtgcgggtgctgctgcccctcgcccacttcttcctgagccacggtgagcccagggtggggtggcgctgactcggggctctgcttctgcctttagttttaggatggaatttcttcttcccttttttttttttttttttttgattgaatagagacaggggtcttgctgtgttgcccaggctggtctggaactcgtggcctcaagcgatcctcctgccttggcctcccaaagtgctgggattacgggcatgagccaccgtgcccagctcatatttctttttgatggattgctgtgccagatgttggtaatttttaaacttttaaatagagaaataaacagactctttttgctgtgtccctagcccaggaaacctgaaagtctaggaaccagcaccttccaaagaatgtgccatagtgtgtgtgactcacgagctgtccgtgtccctgggcgagggagaccaagtgccgcttccccagcgtcccagcgtaggacgcctcggagcccttggtgtcctggagagcaggcctgagactcagggcccctaaccagtcacagaagcacggccagggcgaggtcaagacgtgtgccctggcgggccctggtcttgcaggggaagcggctgcagtggactcggaagccgtctaccagcacctgttcaccaggatcccggtggagcagttccacagccccatgctggcctttgaattcatccagttctgcagggacaacctccacctgttcagcgggcacctcagcaccctcagattgagcttccccaacctctttaaggtatatttgggcatccctgggtgccagggcaggggcatggtaagtccctggggctcctcccctctttccagcggggttcagggcgagtcctggctgagcatagagccctgtgagtcccgggcctggaatgcggtgtgcagggtgaggtggggatctggggtgtccctgcagcgtcacgtgattgacggtgctgtccaagaactcccttgtgggtgttttggagagggggctgtgacacaagacggtgagtttgttctcacagcactggggcagggctgctgcctggtaggatccctcccccgggagccctgcctggtgccttgggcacttgggtgccatttgccttttttttttcttttgagatggagtctcattcctgtcacctaggctggagtgcagtggcgcaatctcagctcactgcaacccccgcctcctgggttcaagcgattctcctgcgtcagccacctgagtagttgagattacaggcacccaccaccatgtccagctaatttttggtatttttagtagagatggggtttcgacatgttggccaggctggtctcgaactcctgacctcagatgatcctcctgccttgacctcccaaagtgctgggattacaggcatgagccaccgcacccggcctggtgccatttgcttttgaagtgtcttttgcagcctcgcctcgctgtaaggtcttttcaactgaggtggggaatcctctttctggagaaaaaccaggacagtggaaaattattgacctgttggtacgaaagtagatacaggctgggggcagtggctcacacctgtaatcccagcacctcgggaggccaaggcaggaggatcttgaggccaggagttcaagaccagcctgggcaacacagggagacctcttgtctacaaaaagtaaacagcctcacatggtggtgtgtgcctgtagtctcagctgctcaggaggctgaggtgggaggatcacttgagcctgggaggttgaggttgcagtgagctatgattgcaccactgcactccagcctgggcgacagagcaagaccctgtctcaaaaaaataaaaagcgggaggaggcaaaggtagaagccctcctggggactgcaggtctgggacagctgtggggccctagctggctcctccctctgccgcctgctccacagctccgagccgtgtccgaaccgctgtgctgtgcccacagttcctggcctggaacagcccacccctcacctccgagtttgtggcgctcctcccggccctggtggacgctggcacagccctggagatgctgcacgcgctgctggacctgccctgcttgacggcggtgctggacctgcagctcaggtgggcccctcaccctctgccagcgctgcgtctcccagccagctggttccacacactgggccccctcctcgctgctcctgacccctacaccggggaccctccttcttccccccccaacacctgaccagtcctcccctgcaaagccacctctaggacagggtgtgtctgtcacccttggccacttgccaagggcagcccctgcaccctggagtgcctcacccgtcttcacgcccaggcctggagcctcccatgccaagcccttcctggcacccgaggtgctgtgatattagggacacctgccgtgtgtctccctgacgggggtgcccttgagtgcaggggccgcatcccagcctggccttgggcgtctgtccacgcaggtcagcaccggctgcatccgagaggccactctgggacacctctctcagggcccccagctgcctggaggccttccgggacccgcagttccagggtcttttccaatacctgctgcgccccaaggccagtggcgccactgagaggtacggggccctagggccagggggccaccagtggctcagagagcccggccacagccactggggtggggctcactgctcagccctaggctgaggccagggtgctttgtgtcccacacaaggctgcgtccccgtcatcaccattatagaggccctgcttctgcaccacgggtctgccgggggcggggcctggtctcagctctctctgctgcccacatcaaccctcataagcttggaggttggccctgtgggtgctccattttgcagatggacaaaccgagcctgagcccaggaagcaggaggcctgggaccggccacaggcctcctgccctcagcccacgccagcctttgtcccgatggctttactgtcccgggtgtgctgacgccaggggtctccccaaacccaggggagcaggaggtcccgagaggcgatgagtgaggatgggagcgggctcagctgtgcgagagggagcagtggcgacgtggccccggcctgcagtcaccaggtcggggagcgggcagcactcacggccacactgtgtcctcaggttggcgccactccaccagctgctgcagcccatggccggctgtgcccgcgtggcccagtgtgcccaggccgtgcccacgctgctgcaggcattcttctcagcagtgacccaggtgagctcgctgcctggggccccccattcccacaggcctcacaactgaggggcaggccagagccagcactggggggccctcttgagctctgcagaaggctgctcccgccacacccaccatccacggtccctgtgagggtcagggaggcacatgccacagccccggcaggccccgtcccttgtcccatcccctttattccagcaggccccgttccccagtccccgtcccatccccttcatcccggcaggccacgtcccccaatccccgtcccatccccttcatcccggcaggtcctgtctcccatcccagcaggctccatccaactgccccagcaggccctgtcttccgtccccaggacagggcaagtgagtggcctgggctctggccacacagctggggccggagcagtttgtccccctgctgcccctgataattcagcatccccatctgaggccaaaataaaggctcccacaggctggtgccccccatctcccccattgctgcttcccacctcggggagctctacaagccagtgcaggagagcctgggaggtggggaggccggcagggggctgggcgttgcttgggcgcacccttggccaaacaagacgtgtgcctggccttgcagagcgggagttggcagaggagccgtggaacagaagcgacacctctgccgggggcacttgggccagcccagggcttccctccctgtgcccggatgctgccagctgagtctctgtgtccctgggtgttggggaaggcagtggacgaggagtctccagcccctcacctgccccccagccctcaccatggcttcacccccaaccttagggcctgcagtgggggtggggctgagcctgtttcccactcctgacccccaggtggctgacgggtccctgatcaaccagctggcgctgctgctcctgggcaggagcgactcgctctacccggccccagggtacgctgccggtgtgcacaggtaggtccctcctgcgctcctgccacagccctgggcgggtgcctcctggactcctccccctctcccctcccccctccccttcagtggcttcggcaccacccctagctgggccctcagcagcctcagaccctgccacccccacccacagccccacacccagccccaggcacttctctctgcttctcaagaacattcccgtccttctttctgccgagcctgtcctcttcagggttagctcaggtccctcttccccgtcttgtcccctggggtccttctctccaaaggcctgatgcatgcaggcccatcctggttccactctgagcctgggcctgaggccagcgctggtgccagccttctccccagtgagaacagtttctctgaggctggcagtcttctgtgttcctctatcggagggtgcagcatacacctaccactcagacgcttcccgggtttctccaggcccttggcctggatggggatggggtcataggtctgcacagagcaggcgtagacccggctttctgggcagtgtgctgagttctcagttcctggccctgtgtacgctgaaaccctccctggtggtggagctggcaagagacctgctggagttcctgggcagcgtgaatggtctctgcagcagggcgagcctcgtcaccagcgtggtaaggcgggcgctggcctcccacagccgctcctgacccaggaggcctgggtgggggctgaatctctgtccccgggcctaggtgtgggccatcggcgagtacctgtcggtgacctacgatcggaggtgcaccgtggagcagatcaacaagttcttcgaagccctggaggctctgctattcgaggtcacccagtgccgcccctctgctgccctgcccaggtgtcccccccaggtggtcaccgtgctgatgaccacgctgacgaagctggcctcccggagccaagatctgatccccaggtgcctggtcagggagggagcgaagccttctggctcctggggaagagaggtggcttctgaggtcttcccatccaggtgttgtgaaatggtcgcagcagcgcaggtcctgggtgggccctgctgagctaaagccactctgctgggcgcttcaggcctggcccctccacacagacccctgtcctgggaggggagcatctgcagctgacggagggaccttctttccccagggcctctttattgctgtcaaagatgaggaccctggctcacagtccagccaccagctccacgcacagcgaggagggcgcggaagccatccgtacccgggccacagagctgctgaccctgctgaagatgcctagcgtggcccagtttgtgctcacacccagcacggaggtgtgcagcccccgctatcaccgcgatgccaacacggccctgcccctggccctgcgcacggtcagccggctggtggagagggaggccggcctcatgccagggtgaagggacagtggccagggacttcggtgcagattaagagcctgggcagccagcttgctactgaggccaggctgataggagctcaggagggcgcgggagtcctgggagaggaggcaaggcccacggtgggcttggcaccctcacagacacgcggggctggcccccctgctcaccctctgggctttgtctccgagccttttgctcccaggcaacactgagctgagctgaggggtgccatggagcggctctgattggaggcttgaggccctgtggctgggtcgggtggaggctgctgggtctgtttcctagtcttttgtttttggacagttgatgggcaagaagagctgcagtaaaagtaaatctcctttaa

SEQ ID NO: 10796 - DNA, 3078 bp, Homo sapiens
cggaagttgaccggggtgcggagctcctgggctgcagctcctggagtttccgaggttcgtgcgcgtctggtggcggcggcgtgatgttctcggcaggagcggagagtttgctccaccaggccagggtgacagaaacgaggaggtcagagccgtgggccagggcgtgctacgagcgctggagagccggcagcctgagggacccagcctcagacacctcctccccgtcatggccaaggtcgtggtcctcagcccgggcaccctccaggaggaccaggccaccctgctcagcaagcggctggtcgactggctgcgctacgccagcctccagcaagggctcccacactccggcggcttcttctccacgcccagggcccggcagccgggccccgtcaccgaggtggacggggcggtagccacagacttcttcacggtgctctccagcggccaccgcttcacagacgaccagtggctgaacgtgcaggccttctctatgctgcgggcgtggctgctgcacagcggccccgagggcccgggcaccctggacacagatgacaggtcagagcaggagggctccactctgtcggtgatctccgccacctcctctgccggccgcctgctgccgccccgggagcggcttcgggaggtggccttcgagtactgccagcgcctcattgagcaaagtaaccgacgagccctgaggaagggggactccgacctgcagaaagcttgcctggtggaggccgtgctggtgctggacgtgctgtgccggcaggacccgtccttcctgtaccgaagtctctcctgcctgaaggccctgcacgggcgggtgcgcggggacccggcctctgtgcgggtgctgctgcccctcgcccacttcttcctgagccacggggaagcggctgcagtggactcggaagccgtctaccagcacctgttcaccaggatcccggtggagcagttccacagccccatgctggcctttgaattcatccagttctgcagggacaacctccacctgttcagcgggcacctcagcaccctcagattgagcttccccaacctctttaagttcctggcctggaacagcccacccctcacctccgagtttgtggcgctcctcccggccctggtggacgctggcacagccctggagatgctgcacgcgctgctggacctgccctgcttgacggcggtgctggacctgcagctcaggtcagcaccggctgcatccgagaggccactctgggacacctctctcagggcccccagctgcctggaggccttccgggacccgcagttccagggtcttttccaatacctgctgcgccccaaggccagtggcgccactgagaggttggcgccactccaccagctgctgcagcccatggccggctgtgcccgcgtggcccagtgtgcccaggccgtgcccacgctgctgcaggcattcttctcagcagtgacccaggtggctgacgggtccctgatcaaccagctggcgctgctgctcctgggcaggagcgactcgctctacccggccccagggtacgctgccggtgtgcacaggtaggtccctcctgcgctcctgccacagccctgggcgggtgcctcctggactcctccccctctcccctcccccctccccttcagtggcttcggcaccacccctagctgggccctcagcagcctcagaccctgccacccccacccacagccccacacccagccccaggcacttctctctgcttctcaagaacattcccgtccttctttctgccgagcctgtcctcttcagggttagctcaggtccctcttccccgtcttgtcccctggggtccttctctccaaaggcctgatgcatgcaggcccatcctggttccactctgagcctgggcctgaggccagcgctggtgccagccttctccccagtgagaacagtttctctgaggctggcagtcttctgtgttcctctatcggagggtgcagcatacacctaccactcagacgcttcccgggtttctccaggcccttggcctggatggggatggggtcataggtctgcacagagcaggcgtagacccggctttctgggcagtgtgctgagttctcagttcctggccctgtgtacgctgaaaccctccctggtggtggagctggcaagagacctgctggagttcctgggcagcgtgaatggtctctgcagcagggcgagcctcgtcaccagcgtggtgtgggccatcggcgagtacctgtcggtgacctacgatcggaggtgcaccgtggagcagatcaacaagttcttcgaagccctggaggctctgctattcgaggtcacccagtgccgcccctctgctgccctgcccaggtgtcccccccaggtggtcaccgtgctgatgaccacgctgacgaagctggcctcccggagccaagatctgatccccagggcctctttattgctgtcaaagatgaggaccctggctcacagtccagccaccagctccacgcacagcgaggagggcgcggaagccatccgtacccgggccacagagctgctgaccctgctgaagatgcctagcgtggcccagtttgtgctcacacccagcacggaggtgtgcagcccccgctatcaccgcgatgccaacacggccctgcccctggccctgcgcacggtcagccggctggtggagagggaggccggcctcatgccagggtgaagggacagtggccagggacttcggtgcagattaagagcctgggcagccagcttgctactgaggccaggctgataggagctcaggagggcgcgggagtcctgggagaggaggcaaggcccacggtgggcttggcaccctcacagacacgcggggctggcccccctgctcaccctctgggctttgtctccgagccttttgctcccaggcaacactgagctgagctgaggggtgccatggagcggctctgattggaggcttgaggccctgtggctgggtcgggtggaggctgctgggtctgtttcctagtcttttgtttttggacagttgatgggcaagaagagctgcagtaaaagtaaatctcctttaa

SEQ ID NO: 10797 - DNA, 1891 bp, Homo sapiens
tgacgggtccctgatcaaccagctggcgctgctgctcctgggcaggagcgactcgctctacccggccccagggtacgctgccggtgtgcacaggtaggtccctcctgcgctcctgccacagccctgggcgggtgcctcctggactcctccccctctcccctcccccctccccttcagtggcttcggcaccacccctagctgggccctcagcagcctcagaccctgccacccccacccacagccccacacccagccccaggcacttctctctgcttctcaagaacattcccgtccttctttctgccgagcctgtcctcttcagggttagctcaggtccctcttccccgtcttgtcccctggggtccttctctccaaaggcctgatgcatgcaggcccatcctggttccactctgagcctgggcctgaggccagcgctggtgccagccttctccccagtgagaacagtttctctgaggctggcagtcttctgtgttcctctatcggagggtgcagcatacacctaccactcagacgcttcccgggtttctccaggcccttggcctggatggggatggggtcataggtctgcacagagcaggcgtagacccggctttctgggcagtgtgctgagttctcagttcctggccctgtgtacgctgaaaccctccctggtggtggagctggcaagagacctgctggagttcctgggcagcgtgaatggtctctgcagcagggcgagcctcgtcaccagcgtggtaaggcgggcgctggcctcccacagccgctcctgacccaggaggcctgggtgggggctgaatctctgtccccgggcctaggtgtgggccatcggcgagtacctgtcggtgacctacgatcggaggtgcaccgtggagcagatcaacaagttcttcgaagccctggaggctctgctattcgaggtcacccagtgccgcccctctgctgccctgcccaggtgtcccccccaggtggtcaccgtgctgatgaccacgctgacgaagctggcctcccggagccaagatctgatccccaggtgcctggtcagggagggagcgaagccttctggctcctggggaagagaggtggcttctgaggtcttcccatccaggtgttgtgaaatggtcgcagcagcgcaggtcctgggtgggccctgctgagctaaagccactctgctgggcgcttcaggcctggcccctccacacagacccctgtcctgggaggggagcatctgcagctgacggagggaccttctttccccagggcctctttattgctgtcaaagatgaggaccctggctcacagtccagccaccagctccacgcacagcgaggagggcgcggaagccatccgtacccgggccacagagctgctgaccctgctgaagatgcctagcgtggcccagtttgtgctcacacccagcacggaggtgtgcagcccccgctatcaccgcgatgccaacacggccctgcccctggccctgcgcacggtcagccggctggtggagagggaggccggcctcatgccagggtgaagggacagtggccagggacttcggtgcagattaagagcctgggcagccagcttgctactgaggccaggctgataggagctcaggagggcgcgggagtcctgggagaggaggcaaggcccacggtgggcttggcaccctcacagacacgcggggctggcccccctgctcaccctctgggctttgtctccgagccttttgctcccaggcaacactgagctgagctgaggggtgccatggagcggctctgattggaggcttgaggccctgtggctgggtcgggtggaggctgctgggtctgtttcctagtcttttgtttttggacagttgatgggcaagaagagc

SEQ ID NO: 10798 - DNA, 917 bp, Homo sapiens
tgacgggtccctgatcaaccagctggcgctgctgctcctgggcaggagcgactcgctctacccggccccagggtacgctgccggtgtgcacagtgtgctgagttctcagttcctggccctgtgtacgctgaaaccctccctggtggtggagctggcaagagacctgctggagttcctgggcagcgtgaatggtctctgcagcagggcgagcctcgtcaccagcgtggtgtcccccccaggtggtcaccgtgctgatgaccacgctgacgaagctggcctcccggagccaagatctgatccccagggcctctttattgctgtcaaagatgaggaccctggctcacagtccagccaccagctccacgcacagcgaggagggcgcggaagccatccgtacccgggccacagagctgctgaccctgctgaagatgcctagcgtggcccagtttgtgctcacacccagcacggaggtgtgcagcccccgctatcaccgcgatgccaacacggccctgcccctggccctgcgcacggtcagccggctggtggagagggaggccggcctcatgccagggtgaagggacagtggccagggacttcggtgcagattaagagcctgggcagccagcttgctactgaggccaggctgataggagctcaggagggcgcgggagtcctgggagaggaggcaaggcccacggtgggcttggcaccctcacagacacgcggggctggcccccctgctcaccctctgggctttgtctccgagccttttgctcccaggcaacactgagctgagctgaggggtgccatggagcggctctgattggaggcttgaggccctgtggctgggtcgggtggaggctgctgggtctgtttcctagtcttttgtttttggacagttgatgggcaagaagagc

SEQ ID NO: 10799 - DNA, 1726 bp, Homo sapiens
gaaacgaggaggtcagagccgtgggccagggcgtgctacgagcgctggagagccggcagcctgagggacccagcctcagacacctcctccccgtcatggccaaggtcgtggtcctcagcccgggcaccctccaggagggtacgcggggcccctcccaagaggctgttgggggtctgccttcccaggtccttccctgagggcccatggtgggttgggagtgtggggggcaggtgggggacacggggaggcccgagggtttgggacgctgcaggattctgttttctgagaaaagtcggccagcatcccaacaacccaggcatctgtaggattcaacctcacctccccatgccaccccacccactgcagaccaggccaccctgctcagcaagcggctggtcgactggctgcgctacgccagcctccagcaagggctcccacactccggcggcttcttctccacgcccagggcccggcaggtgaggctgggactgttctggaaccatggggaacagagtcacagacaacccctccctgagagctcctgtgcccacagcggcgaggcctgctgtcgttccgcggggtccaggacgagcctgcctctgctgcggggcttgggtcaggcagggccacagccccctgacccgtgtggctctgggggtctgtgcgcgggttcagtcccagggcctgcggagcagggtgtgcgacgcgcgtctgcctgggggtcaggtggggatggtgtttttgcatcacacagggcgggccgctgcccgggctcatgttcaggcagcttctcctccacctcctgaggagcttgtgctaaaggctggcgtttttcccggcctcggccccctccgcccactcctgcctgtccttcccacagccgggccccgtcaccgaggtggacggggcggtagccacagacttcttcacggtgctctccagcggccaccgcttcacagacgaccagtggctgaacgtgcaggccttctctatgctgcgggcgtggctgctgcacagcggccccgagggcccgggcaccctggacacaggtgtgcggggtggggggatgacgtcagacaggggtgggaggtgggcgcactatgggttggtcgcagggggacacgggcggaggtggggggactcgggtgtgcccaggatgcagcagaggtcaggactgagcaacgcagcctgctgacctggagctaggcggagagcactccctggccagcatctttggggtccagggtcagcaccggggatcctctggacaccccgtgaccctcatgcaatgtgcagatgtgagagctcccacttaaggcaggcacccttaaggttgttggagtgacgccactgagctcctcccggctgctctgtggacttgttggggaagaagcctcagccaccctgaagggcggccgtgatggggaagctgccgggtgggtggacgtcctgagacggtgacgcctcacgcctcccgggaggggctgcggcctgtgctctcctcctgcccttccaagcagggcagcaggcatgtcccagcccgggagccacacgtcagcctgctgagagttcccacctcccgcagatgacaggtcagagcaggagggctccactctgtcggtgatctccgccacctcctctgccggccgcctgctgccgccccgggagcggcttcgggaggtggccttcgagtactgccagcgcctcattgagcaaagtaaccgac

SEQ ID NO: 10800 - DNA, 786 bp, Homo sapiens
gaaacgaggaggtcagagccgtgggccagggcgtgctacgagcgctggagagccggcagcctgagggacccagcctcagacacctcctccccgtcatggccaaggtcgtggtcctcagcccgggcaccctccaggagggtacgcggggcccctcccaagaggctgttgggggtctgccttcccaggtccttccctgagggcccatggtgggttgggagtgtggggggcaggtgggggacacggggaggcccgagggtttgggacgctgcaggattctgttttctgagaaaagtcggccagcatcccaacaacccaggcatctgtaggattcaacctcacctccccatgccaccccacccactgcagaccaggccaccctgctcagcaagcggctggtcgactggctgcgctacgccagcctccagcaagggctcccacactccggcggcttcttctccacgcccagggcccggcagccgggccccgtcaccgaggtggacggggcggtagccacagacttcttcacggtgctctccagcggccaccgcttcacagacgaccagtggctgaacgtgcaggccttctctatgctgcgggcgtggctgctgcacagcggccccgagggcccgggcaccctggacacagatgacaggtcagagcaggagggctccactctgtcggtgatctccgccacctcctctgccggccgcctgctgccgccccgggagcggcttcgggaggtggccttcgagtactgccagcgcctcattgagcaaagtaaccgac

SEQ ID NO: 10801 - DNA, 10132 bp, Homo sapiens
gcctgcatgccccgagcagctccaggtgctttgcgccgccatcctgcgagagatgtccccctctgacagcctcagcctggcctgggaccacacgcagaacagccggcagctgagcctggtggcctccgttctcttggcccaggtagcgcagcagtcaccaccccagttggcaccggatggctgcttcccaaggaacaggggagacaggaagcaggggcgccagagccggcaggtggctgcttgttgtagacgcatctcggtgctgagtgcctggcacacttgaggctggggcatgccctgttgactggaacggggtcccatgcccagcaggcccacgtggtatgttggtgctcaggagaggtggtggagtttggtttctcagacagagccttgagacagcgagtcagtggaggctgggcctccagaccttctttttggggtttttgttttgttttttagaaacagggtctcactctgctgtccagtgtagagtgccatggagtgatcaatgctcactgcagcctcgacctccctggctcaagcaatcctcccatctcagcctcctgagtagctgggattacaggcatgcatcaccacacccagttaatgtttgtatttttttgtagggacctggggtctcactatgttgcccaggctggtctcaaacttctgggctcaagcaatccaccctccttggccaggagtttttgccaagtccatgtcctccctccctctgtgtcgggagcaggcctgggcactcagcgtggggatccaggggttcacaggctgcctttgtgtgagagaagctgctatctctgctcatgggttgcccaggggtgcagagtctgcaggaaggttgcgatggagctgggcttttccctccgttcccagcctgcagcgtcatgagttgcctcctgtgctggggtgcagcctgcggttgctttagttctgtgtgggcgagagcttgtgggccccggcgtactcagggcgttgtacttcatcactggggtcatcctggttggtgcccagccccctcacctcacagacctcctgcaggccacctccaggcctccgagatgaccccggtaatgctgtggtagctcctggcctttggaacaagatgactccggctcttcttgtttgtttcacccgcccttctcctcaagcaactcatttttttcagtggaagatgatcttgcagaactgctgccaggcgccagcggtgcaccccccgcccggcacgtggcctcccagccacccagccgccctcctccctgccctgacggccctgcccctgtgctgggtgtctctggtgctgctcagatgtttcagcacctgggtgtgcagagtgaggtgggtggtttaaagactgggatccacactggaggccccgcaggacggggtgtcctgtgtctgcggccagggccatggtggccgccagtgtgtttttagcattgaatcagccgtgccctcacccaggccccctccagcctcagcgatgcagctcccagggagagaggctggaggcggagcaggcaccttgtggcccggggtgggcctgcgcgggacatcctccctgccacctgctaggccggggtctcagcgaccgacgcttctcaggagtgtcacacagacttccgaaatgggggagctggtctctggcacaggccagtaccccagcgtttgccctgtttgatttgaagggtgacagaaacgaggaggtcagagccgtgggccagggcgtgctacgagcgctggagagccggcagcctgagggacccagcctcagacacctcctccccgtcatggccaaggtcgtggtcctcagcccgggcaccctccaggagggtacgcggggcccctcccaagaggctgttgggggtctgccttcccaggtccttccctgagggcccatggtgggttgggagtgtggggggcaggtgggggacacggggaggcccgagggtttgggacgctgcaggattctgttttctgagaaaagtcggccagcatcccaacaacccaggcatctgtaggattcaacctcacctccccatgccaccccacccactgcagaccaggccaccctgctcagcaagcggctggtcgactggctgcgctacgccagcctccagcaagggctcccacactccggcggcttcttctccacgcccagggcccggcaggtgaggctgggactgttctggaaccatggggaacagagtcacagacaacccctccctgagagctcctgtgcccacagcggcgaggcctgctgtcgttccgcggggtccaggacgagcctgcctctgctgcggggcttgggtcaggcagggccacagccccctgacccgtgtggctctgggggtctgtgcgcgggttcagtcccagggcctgcggagcagggtgtgcgacgcgcgtctgcctgggggtcaggtggggatggtgtttttgcatcacacagggcgggccgctgcccgggctcatgttcaggcagcttctcctccacctcctgaggagcttgtgctaaaggctggcgtttttcccggcctcggccccctccgcccactcctgcctgtccttcccacagccgggccccgtcaccgaggtggacggggcggtagccacagacttcttcacggtgctctccagcggccaccgcttcacagacgaccagtggctgaacgtgcaggccttctctatgctgcgggcgtggctgctgcacagcggccccgagggcccgggcaccctggacacaggtgtgcggggtggggggatgacgtcagacaggggtgggaggtgggcgcactatgggttggtcgcagggggacacgggcggaggtggggggactcgggtgtgcccaggatgcagcagaggtcaggactgagcaacgcagcctgctgacctggagctaggcggagagcactccctggccagcatctttggggtccagggtcagcaccggggatcctctggacaccccgtgaccctcatgcaatgtgcagatgtgagagctcccacttaaggcaggcacccttaaggttgttggagtgacgccactgagctcctcccggctgctctgtggacttgttggggaagaagcctcagccaccctgaagggcggccgtgatggggaagctgccgggtgggtggacgtcctgagacggtgacgcctcacgcctcccgggaggggctgcggcctgtgctctcctcctgcccttccaagcagggcagcaggcatgtcccagcccgggagccacacgtcagcctgctgagagttcccacctcccgcagatgacaggtcagagcaggagggctccactctgtcggtgatctccgccacctcctctgccggccgcctgctgccgccccgggagcggcttcgggaggtggccttcgagtactgccagcgcctcattgagcaaagtaaccgacgtgagtcccccacccagggcactggcctccccagggctcgacgcacctgctctgcaaggccacctgaggccagcacagcttccctgagctactgctccacagagggggtccctgggtagccggtttggagcaggggcatttttgcttctggggtcagccccaagtgttcttcaggctccaccccagcccccagcccggccctgtcccacctgggcccctcgcctcagtcccactcaagtcctcctgggggcctgtcccacccccctgctcccggtcctgcctggagcttccagagcacaagctgccccctcattgggccactctaaggctgagacagagccggctgactttttcccctccttccaggagccctgaggaagggggactccgacctgcagaaagctgtaagtggctggggaccaggggatgggaggcagcgactcggcccatttgatgtggtccatgtcccgcagtgcctggtggaggccgtgctggtgctggacgtgctgtgccggcaggacccgtccttcctgtaccgaagtctctcctgcctgaaggccctgcacgggcgggtgcgcggggacccggcctctgtgcgggtgctgctgcccctcgcccacttcttcctgagccacggtgagcccagggtggggtggcgctgactcggggctctgcttctgcctttagttttaggatggaatttcttcttcccttttttttttttttttttttgattgaatagagacaggggtcttgctgtgttgcccaggctggtctggaactcgtggcctcaagcgatcctcctgccttggcctcccaaagtgctgggattacgggcatgagccaccgtgcccagctcatatttctttttgatggattgctgtgccagatgttggtaatttttaaacttttaaatagagaaataaacagactctttttgctgtgtccctagcccaggaaacctgaaagtctaggaaccagcaccttccaaagaatgtgccatagtgtgtgtgactcacgagctgtccgtgtccctgggcgagggagaccaagtgccgcttccccagcgtcccagcgtaggacgcctcggagcccttggtgtcctggagagcaggcctgagactcagggcccctaaccagtcacagaagcacggccagggcgaggtcaagacgtgtgccctggcgggccctggtcttgcaggggaagcggctgcagtggactcggaagccgtctaccagcacctgttcaccaggatcccggtggagcagttccacagccccatgctggcctttgaattcatccagttctgcagggacaacctccacctgttcagcgggcacctcagcaccctcagattgagcttccccaacctctttaaggtatatttgggcatccctgggtgccagggcaggggcatggtaagtccctggggctcctcccctctttccagcggggttcagggcgagtcctggctgagcatagagccctgtgagtcccgggcctggaatgcggtgtgcagggtgaggtggggatctggggtgtccctgcagcgtcacgtgattgacggtgctgtccaagaactcccttgtgggtgttttggagagggggctgtgacacaagacggtgagtttgttctcacagcactggggcagggctgctgcctggtaggatccctcccccgggagccctgcctggtgccttgggcacttgggtgccatttgccttttttttttcttttgagatggagtctcattcctgtcacctaggctggagtgcagtggcgcaatctcagctcactgcaacccccgcctcctgggttcaagcgattctcctgcgtcagccacctgagtagttgagattacaggcacccaccaccatgtccagctaatttttggtatttttagtagagatggggtttcgacatgttggccaggctggtctcgaactcctgacctcagatgatcctcctgccttgacctcccaaagtgctgggattacaggcatgagccaccgcacccggcctggtgccatttgcttttgaagtgtcttttgcagcctcgcctcgctgtaaggtcttttcaactgaggtggggaatcctctttctggagaaaaaccaggacagtggaaaattattgacctgttggtacgaaagtagatacaggctgggggcagtggctcacacctgtaatcccagcacctcgggaggccaaggcaggaggatcttgaggccaggagttcaagaccagcctgggcaacacagggagacctcttgtctacaaaaagtaaacagcctcacatggtggtgtgtgcctgtagtctcagctgctcaggaggctgaggtgggaggatcacttgagcctgggaggttgaggttgcagtgagctatgattgcaccactgcactccagcctgggcgacagagcaagaccctgtctcaaaaaaataaaaagcgggaggaggcaaaggtagaagccctcctggggactgcaggtctgggacagctgtggggccctagctggctcctccctctgccgcctgctccacagctccgagccgtgtccgaaccgctgtgctgtgcccacagttcctggcctggaacagcccacccctcacctccgagtttgtggcgctcctcccggccctggtggacgctggcacagccctggagatgctgcacgcgctgctggacctgccctgcttgacggcggtgctggacctgcagctcaggtgggcccctcaccctctgccagcgctgcgtctcccagccagctggttccacacactgggccccctcctcgctgctcctgacccctacaccggggaccctccttcttccccccccaacacctgaccagtcctcccctgcaaagccacctctaggacagggtgtgtctgtcacccttggccacttgccaagggcagcccctgcaccctggagtgcctcacccgtcttcacgcccaggcctggagcctcccatgccaagcccttcctggcacccgaggtgctgtgatattagggacacctgccgtgtgtctccctgacgggggtgcccttgagtgcaggggccgcatcccagcctggccttgggcgtctgtccacgcaggtcagcaccggctgcatccgagaggccactctgggacacctctctcagggcccccagctgcctggaggccttccgggacccgcagttccagggtcttttccaatacctgctgcgccccaaggccagtggcgccactgagaggtacggggccctagggccagggggccaccagtggctcagagagcccggccacagccactggggtggggctcactgctcagccctaggctgaggccagggtgctttgtgtcccacacaaggctgcgtccccgtcatcaccattatagaggccctgcttctgcaccacgggtctgccgggggcggggcctggtctcagctctctctgctgcccacatcaaccctcataagcttggaggttggccctgtgggtgctccattttgcagatggacaaaccgagcctgagcccaggaagcaggaggcctgggaccggccacaggcctcctgccctcagcccacgccagcctttgtcccgatggctttactgtcccgggtgtgctgacgccaggggtctccccaaacccaggggagcaggaggtcccgagaggcgatgagtgaggatgggagcgggctcagctgtgcgagagggagcagtggcgacgtggccccggcctgcagtcaccaggtcggggagcgggcagcactcacggccacactgtgtcctcaggttggcgccactccaccagctgctgcagcccatggccggctgtgcccgcgtggcccagtgtgcccaggccgtgcccacgctgctgcaggcattcttctcagcagtgacccaggtgagctcgctgcctggggccccccattcccacaggcctcacaactgaggggcaggccagagccagcactggggggccctcttgagctctgcagaaggctgctcccgccacacccaccatccacggtccctgtgagggtcagggaggcacatgccacagccccggcaggccccgtcccttgtcccatcccctttattccagcaggccccgttccccagtccccgtcccatccccttcatcccggcaggccacgtcccccaatccccgtcccatccccttcatcccggcaggtcctgtctcccatcccagcaggctccatccaactgccccagcaggccctgtcttccgtccccaggacagggcaagtgagtggcctgggctctggccacacagctggggccggagcagtttgtccccctgctgcccctgataattcagcatccccatctgaggccaaaataaaggctcccacaggctggtgccccccatctcccccattgctgcttcccacctcggggagctctacaagccagtgcaggagagcctgggaggtggggaggccggcagggggctgggcgttgcttgggcgcacccttggccaaacaagacgtgtgcctggccttgcagagcgggagttggcagaggagccgtggaacagaagcgacacctctgccgggggcacttgggccagcccagggcttccctccctgtgcccggatgctgccagctgagtctctgtgtccctgggtgttggggaaggcagtggacgaggagtctccagcccctcacctgccccccagccctcaccatggcttcacccccaaccttagggcctgcagtgggggtggggctgagcctgtttcccactcctgacccccaggtggctgacgggtccctgatcaaccagctggcgctgctgctcctgggcaggagcgactcgctctacccggccccagggtacgctgccggtgtgcacaggtaggtccctcctgcgctcctgccacagccctgggcgggtgcctcctggactcctccccctctcccctcccccctccccttcagtggcttcggcaccacccctagctgggccctcagcagcctcagaccctgccacccccacccacagccccacacccagccccaggcacttctctctgcttctcaagaacattcccgtccttctttctgccgagcctgtcctcttcagggttagctcaggtccctcttccccgtcttgtcccctggggtccttctctccaaaggcctgatgcatgcaggcccatcctggttccactctgagcctgggcctgaggccagcgctggtgccagccttctccccagtgagaacagtttctctgaggctggcagtcttctgtgttcctctatcggagggtgcagcatacacctaccactcagacgcttcccgggtttctccaggcccttggcctggatggggatggggtcataggtctgcacagagcaggcgtagacccggctttctgggcagtgtgctgagttctcagttcctggccctgtgtacgctgaaaccctccctggtggtggagctggcaagagacctgctggagttcctgggcagcgtgaatggtctctgcagcagggcgagcctcgtcaccagcgtggtaaggcgggcgctggcctcccacagccgctcctgacccaggaggcctgggtgggggctgaatctctgtccccgggcctaggtgtgggccatcggcgagtacctgtcggtgacctacgatcggaggtgcaccgtggagcagatcaacaagttcttcgaagccctggaggctctgctattcgaggtcacccagtgccgcccctctgctgccctgcccaggtgtcccccccaggtggtcaccgtgctgatgaccacgctgacgaagctggcctcccggagccaagatctgatccccaggtgcctggtcagggagggagcgaagccttctggctcctggggaagagaggtggcttctgaggtcttcccatccaggtgttgtgaaatggtcgcagcagcgcaggtcctgggtgggccctgctgagctaaagccactctgctgggcgcttcaggcctggcccctccacacagacccctgtcctgggaggggagcatctgcagctgacggagggaccttctttccccagggcctctttattgctgtcaaagatgaggaccctggctcacagtccagccaccagctccacgcacagcgaggagggcgcggaagccatccgtacccgggccacagagctgctgaccctgctgaagatgcctagcgtggcccagtttgtgctcacacccagcacggaggtgtgcagcccccgctatcaccgcgatgccaacacggccctgcccctggccctgcgcacggtcagccggctggtggagagggaggccggcctcatgccagggtgaagggacagtggccagggacttcggtgcagattaagagcctgggcagccagcttgctactgaggccaggctgataggagctcaggagggcgcgggagtcctgggagaggaggcaaggcccacggtgggcttggcaccctcacagacacgcggggctggcccccctgctcaccctctgggctttgtctccgagccttttgctcccaggcaacactgagctgagctgaggggtgccatggagcggctctgattggaggcttgaggccctgtggctgggtcgggtggaggctgctgggtctgtttcctagtcttttgtttttggacagttgatgggcaagaagagctgcagtaaaagtaaatc

SEQ ID NO: 10802 - DNA, 2611 bp, Homo sapiens
gcctgcatgccccgagcagctccaggtgctttgcgccgccatcctgcgagagatgtccccctctgacagcctcagcctggcctgggaccacacgcagaacagccggcagctgagcctggtggcctccgttctcttggcccaggtagcgcagcagtcaccaccccagttggcaccggatggctgcttcccaaggaacaggggagacaggaagcaggggcgccagagccggcaggtggctgcttgttgtagacgcatctcggtgctgagtgcctggcacacttgaggctggggcatgccctgttgactggaacggggtcccatgcccagcaggcccacgtgaccaggccaccctgctcagcaagcggctggtcgactggctgcgctacgccagcctccagcaagggctcccacactccggcggcttcttctccacgcccagggcccggcagccgggccccgtcaccgaggtggacggggcggtagccacagacttcttcacggtgctctccagcggccaccgcttcacagacgaccagtggctgaacgtgcaggccttctctatgctgcgggcgtggctgctgcacagcggccccgagggcccgggcaccctggacacagatgacaggtcagagcaggagggctccactctgtcggtgatctccgccacctcctctgccggccgcctgctgccgccccgggagcggcttcgggaggtggccttcgagtactgccagcgcctcattgagcaaagtaaccgacgagccctgaggaagggggactccgacctgcagaaagcttgcctggtggaggccgtgctggtgctggacgtgctgtgccggcaggacccgtccttcctgtaccgaagtctctcctgcctgaaggccctgcacgggcgggtgcgcggggacccggcctctgtgcgggtgctgctgcccctcgcccacttcttcctgagccacggggaagcggctgcagtggactcggaagccgtctaccagcacctgttcaccaggatcccggtggagcagttccacagccccatgctggcctttgaattcatccagttctgcagggacaacctccacctgttcagcgggcacctcagcaccctcagattgagcttccccaacctctttaagttcctggcctggaacagcccacccctcacctccgagtttgtggcgctcctcccggccctggtggacgctggcacagccctggagatgctgcacgcgctgctggacctgccctgcttgacggcggtgctggacctgcagctcaggtcagcaccggctgcatccgagaggccactctgggacacctctctcagggcccccagctgcctggaggccttccgggacccgcagttccagggtcttttccaatacctgctgcgccccaaggccagtggcgccactgagaggttggcgccactccaccagctgctgcagcccatggccggctgtgcccgcgtggcccagtgtgcccaggccgtgcccacgctgctgcaggcattcttctcagcagtgacccaggtggctgacgggtccctgatcaaccagctggcgctgctgctcctgggcaggagcgactcgctctacccggccccagggtacgctgccggtgtgcacagtgtgctgagttctcagttcctggccctgtgtacgctgaaaccctccctggtggtggagctggcaagagacctgctggagttcctgggcagcgtgaatggtctctgcagcagggcgagcctcgtcaccagcgtggtgtgggccatcggcgagtacctgtcggtgacctacgatcggaggtgcaccgtggagcagatcaacaagttcttcgaagccctggaggctctgctattcgaggtcacccagtgccgcccctctgctgccctgcccaggtgtcccccccaggtggtcaccgtgctgatgaccacgctgacgaagctggcctcccggagccaagatctgatccccagggcctctttattgctgtcaaagatgaggaccctggctcacagtccagccaccagctccacgcacagcgaggagggcgcggaagccatccgtacccgggccacagagctgctgaccctgctgaagatgcctagcgtggcccagtttgtgctcacacccagcacggaggtgtgcagcccccgctatcaccgcgatgccaacacggccctgcccctggccctgcgcacggtcagccggctggtggagagggaggccggcctcatgccagggtgaagggacagtggccagggacttcggtgcagattaagagcctgggcagccagcttgctactgaggccaggctgataggagctcaggagggcgcgggagtcctgggagaggaggcaaggcccacggtgggcttggcaccctcacagacacgcggggctggcccccctgctcaccctctgggctttgtctccgagccttttgctcccaggcaacactgagctgagctgaggggtgccatggagcggctctgattggaggcttgaggccctgtggctgggtcgggtggaggctgctgggtctgtttcctagtcttttgtttttggacagttgatgggcaagaagagctgcagtaaaagtaaatc

SEQ ID NO: 10803 - DNA, 3195 bp, Homo sapiens
gggtacgcggggcccctcccaagaggctgttgggggtctgccttcccaggtccttccctgagggcccatggtgggttgggagtgtggggggcaggtgggggacacggggaggcccgagggtttgggacgctgcaggattctgttttctgagaaaagtcggccagcatcccaacaacccaggcatctgtaggattcaacctcacctccccatgccaccccacccactgcagaccaggccaccctgctcagcaagcggctggtcgactggctgcgctacgccagcctccagcaagggctcccacactccggcggcttcttctccacgcccagggcccggcaggtgaggctgggactgttctggaaccatggggaacagagtcacagacaacccctccctgagagctcctgtgcccacagcggcgaggcctgctgtcgttccgcggggtccaggacgagcctgcctctgctgcggggcttgggtcaggcagggccacagccccctgacccgtgtggctctgggggtctgtgcgcgggttcagtcccagggcctgcggagcagggtgtgcgacgcgcgtctgcctgggggtcaggtggggatggtgtttttgcatcacacagggcgggccgctgcccgggctcatgttcaggcagcttctcctccacctcctgaggagcttgtgctaaaggctggcgtttttcccggcctcggccccctccgcccactcctgcctgtccttcccacagccgggccccgtcaccgaggtggacggggcggtagccacagacttcttcacggtgctctccagcggccaccgcttcacagacgaccagtggctgaacgtgcaggccttctctatgctgcgggcgtggctgctgcacagcggccccgagggcccgggcaccctggacacaggtgtgcggggtggggggatgacgtcagacaggggtgggaggtgggcgcactatgggttggtcgcagggggacacgggcggaggtggggggactcgggtgtgcccaggatgcagcagaggtcaggactgagcaacgcagcctgctgacctggagctaggcggagagcactccctggccagcatctttggggtccagggtcagcaccggggatcctctggacaccccgtgaccctcatgcaatgtgcagatgtgagagctcccacttaaggcaggcacccttaaggttgttggagtgacgccactgagctcctcccggctgctctgtggacttgttggggaagaagcctcagccaccctgaagggcggccgtgatggggaagctgccgggtgggtggacgtcctgagacggtgacgcctcacgcctcccgggaggggctgcggcctgtgctctcctcctgcccttccaagcagggcagcaggcatgtcccagcccgggagccacacgtcagcctgctgagagttcccacctcccgcagatgacaggtcagagcaggagggctccactctgtcggtgatctccgccacctcctctgccggccgcctgctgccgccccgggagcggcttcgggaggtggccttcgagtactgccagcgcctcattgagcaaagtaaccgacgtgagtcccccacccagggcactggcctccccagggctcgacgcacctgctctgcaaggccacctgaggccagcacagcttccctgagctactgctccacagagggggtccctgggtagccggtttggagcaggggcatttttgcttctggggtcagccccaagtgttcttcaggctccaccccagcccccagcccggccctgtcccacctgggcccctcgcctcagtcccactcaagtcctcctgggggcctgtcccacccccctgctcccggtcctgcctggagcttccagagcacaagctgccccctcattgggccactctaaggctgagacagagccggctgactttttcccctccttccaggagccctgaggaagggggactccgacctgcagaaagctgtaagtggctggggaccaggggatgggaggcagcgactcggcccatttgatgtggtccatgtcccgcagtgcctggtggaggccgtgctggtgctggacgtgctgtgccggcaggacccgtccttcctgtaccgaagtctctcctgcctgaaggccctgcacgggcgggtgcgcggggacccggcctctgtgcgggtgctgctgcccctcgcccacttcttcctgagccacggtgagcccagggtggggtggcgctgactcggggctctgcttctgcctttagttttaggatggaatttcttcttcccttttttttttttttttttttgattgaatagagacaggggtcttgctgtgttgcccaggctggtctggaactcgtggcctcaagcgatcctcctgccttggcctcccaaagtgctgggattacgggcatgagccaccgtgcccagctcatatttctttttgatggattgctgtgccagatgttggtaatttttaaacttttaaatagagaaataaacagactctttttgctgtgtccctagcccaggaaacctgaaagtctaggaaccagcaccttccaaagaatgtgccatagtgtgtgtgactcacgagctgtccgtgtccctgggcgagggagaccaagtgccgcttccccagcgtcccagcgtaggacgcctcggagcccttggtgtcctggagagcaggcctgagactcagggcccctaaccagtcacagaagcacggccagggcgaggtcaagacgtgtgccctggcgggccctggtcttgcaggggaagcggctgcagtggactcggaagccgtctaccagcacctgttcaccaggatcccggtggagcagttccacagccccatgctggcctttgaattcatccagttctgcagggacaacctccacctgttcagcgggcacctcagcaccctcagattgagcttccccaacctctttaaggtatatttgggcatccctgggtgccagggcaggggcatggtaagtccctggggctcctcccctctttccagcggggttcagggcgagtcctggctgagcatagagccctgtgagtcccgggcctggaatgcggtgtgcagggtgaggtggggatctggggtgtccctgcagcgtcacgtgattgacggtgctgtccaagaactcccttgtgggtgttttggagag

SEQ ID NO: 10804 - DNA, 1027 bp, Homo sapiens
ggaccaggccaccctgctcagcaagcggctggtcgactggctgcgctacgccagcctccagcaagggctcccacactccggcggcttcttctccacgcccagggcccggcagccgggccccgtcaccgaggtggacggggcggtagccacagacttcttcacggtgctctccagcggccaccgcttcacagacgaccagtggctgaacgtgcaggccttctctatgctgcgggcgtggctgctgcacagcggccccgagggcccgggcaccctggacacagatgacaggtcagagcaggagggctccactctgtcggtgatctccgccacctcctctgccggccgcctgctgccgccccgggagcggcttcgggaggtggccttcgagtactgccagcgcctcattgagcaaagtaaccgacgagccctgaggaagggggactccgacctgcagaaagcttgcctggtggaggccgtgctggtgctggacgtgctgtgccggcaggacccgtccttcctgtaccgaagtctctcctgcctgaaggccctgcacgggcgggtgcgcggggacccggcctctgtgcgggtgctgctgcccctcgcccacttcttcctgagccacggggaagcggctgcagtggactcggaagccgtctaccagcacctgttcaccaggatcccggtggagcagttccacagccccatgctggcctttgaattcatccagttctgcagggacaacctccacctgttcagcgggcacctcagcaccctcagattgagcttccccaacctctttaaggtatatttgggcatccctgggtgccagggcaggggcatggtaagtccctggggctcctcccctctttccagcggggttcagggcgagtcctggctgagcatagagccctgtgagtcccgggcctggaatgcggtgtgcagggtgaggtggggatctggggtgtccctgcagcgtcacgtgattgacggtgctgtccaagaactcccttgtgggtgttttggagag

SEQ ID NO: 10805 - DNA, 16100 bp, Homo sapiens
gctcacgtgacgcggtcccggaagttgaccggggtgcggagctcctgggctgcagctcctggagtttccgaggttcgtgcgcgtctggtggcggcggcgtgatgttctcggcaggagcggagagtttgctccaccaggccaggtacgggggagctgcggccccggccctccttcctgcatctctccctaggggcacacgggggtgggtctcacagggcaggggcttgggcgccagccttgcaggaacccgactggactcgccctcgagacttggggatcgggtaaggcaacacggcggccaggcttggggtgaggaggtcggggagggtcatggtgggtccccggaggaggtgacacttgagcagagtcttggtgagtgaaagcaagtggggtgggacccagtcgacagtttagtcaaaggcttggcggtgagaactccgcgtctggcaggaaatcgggcagccgggagatttcagtgcctcacagtcaagaacgcaaagtcacagtgtccggaggcctgctaaggaataaggctgtgtgccaggctggggagctggaggccatccgagggctttgcggaaccgtgggagggttttgtgacttaaaaagatctctcttgcgcggatgtattagctaggctgagaaatcaccctccaggctggtttcaggctgtgtctggactcccagtaacgagtgagtagctccttcctcaccaactaaccagtcatgggggaaaacagtgtaagccaggactgaacagactcacggtccaccaaacaggcaaagacttcatactacatgtttaaaagaagaaaatgctgaccgggcgtggtggctcacgcctgtaatcccaccactttgggaggccaaggcaggcggatcacctgaggtcaggagttcgagaccagcgtgcccaacatgaggaaaccacgtctctactgaaaatacaaaaaaaaaaaaaaaaaaaaaaattagccgggcgtggtggtgggtgactgtaatcccagctactcgggaggctgaggcaggaggattgcttgaacctgtgaggtggaggttacagtgagctgagatggcgccactgcactccaggctgggggacagagcgaaactccgtctcaaaagaaaaaagaaaaaaagtaaagaaaatacagccagcactacagccccttggtaaacgtaaacaaacttggtgaggtgagaggccgaagcaggagaagtgcatgaacccaggaggccgagggtgcagtgagccaagatcgcaccactggactccagtctgggtgacagaacgagactccatgtcaaaacaaacaagcaaacctggactcagagctagaccaattggtgggaaagattcgggtggttgaaattgctgtgattatagtgagtgaggtcttgaaggcaggttaagttctaaagcccgaacaggacaaaaatctctgatcaaaataacccttaagagtccactcattaggaagaggcttggtgaatatgcagcaccatctcccagcagctcaacataggcaaccttcccttcaatcctggacagatatgtcattcatgtgaatgtggggactatatgaaaatgaaaaatactggcatctcagcatgtaacatgttaatcccaaggtccttgccaagagacaaggaaaaacacccactgagaacttcattcccagtcacattctgctcaaggtcataaacttgtgacatgaaaaacaaaaggaagagccctctttatttatttatttatttatttatttatttatttttattagagtctcttttgagacagagtctccctctgtcgcccaggctggagtacaatggcgcaatctcagttcactgcaacctccgcctcctgggttcaagcaattctcctgcctcagcctcccaagtagctgggattacaggcgcccgccaccacacccggctgattttttgtatctttagtagagatgggatttcaccacattgtccaggctggtctcgaattcctgacctcaggtgatccgcctgactcggcccctcgaagtgccgggattacaggtgtgagccaccatacccggctgagccctcactatttaaatacctgtttctctgcctccctggctcgggtgggcagccgtttttgaggatagagtgtggttgaatttccctatgtaacatacatgagttctgcagttgccctctgttagggtttcaagaaggttaatctattagggcttaccagttttcacaatattcttaagcctgtgatttctgatgatattttaaaataaatgactgtagtttgagggttaaggtttggagccggccaggcgcagtgactggcccacgcctgtaatccgaacacttcgggaggccgagttaggaggatcgcttgaggctaggactttgagaccagcctggacaacatagcgagacccgtctctacaaaacagaatttttaaaaaacttagccaggtgtggtggcacgtacccatagtcacagctactcaggaggctgaggcaggaggatcacttgagccaaggaggttgaggctgcggtaagctatgatggtgccactgcactccagctcgggtgacagagggagaccctgtctccaaagaaagccaaaaagatttggagtgaactttagtttctctctaaatgtgtcagagatacggaaagcaagggtgcaaaaagtgatcaaagatagcgctgcaagctgaaggataaatggagagagcgggaagcgagtaaaggatgggggcatggaggggtgccccgcaaggtcggggatttccaggaggaagagcctcagcccactagctcgggagctagtggggcatgtatcaggcacagggtctgtgcgaagggacagaagcaaaagaaacaggacatggagtctggagaaggaaggcggggccgggctcttggaggcagcgttggggtctgtaggagtttggatttgaaagcagtggggagctgttgaagggtttgggtgggttggattttagagagaagcttgagacttggagaatatgctgaagggaatttaatcgggatgaggggttccacctttctgggaaagattttccattgtgtgtatatatgtatatgtgtgtatatataatttatatataacattttatatattatatattacatatatatttagtaatatataatataattatatgttatatattatatgttatattatatatcattatatataatatataatgatatataatattttatatataatcaaaaaaagaataaaaaaaattcactgggcttagtgtagtcccagctacttgaaaggctgaggtgggagaactgcttgagctagaagatcaggctgcagtgagctgagattatgccactgcactccagcctgggtgacagcataagactctatctcaaaaaatatatatatagatagatagatagatataaaaatatatttttatatgtaatatatataaaatatatattatatacatttttgagatagagcatattatatattatatataacatatataacaactatataacatatataacataacatatataacaacataatatatagcatatattatgtataacatatattagatataacatatataacattagaaataatgtatataacataacataacgtatataacgcatataacaacatatataacgtatataacataacacgttatatatgatatataacatataacatgttatatatcataacgtgttatatgtcatataacatgattattatatatcatatataacatgataacatatatatcatatataacatatataacattatatataacatatatattatattatatatatatatttttttttgaagtagagtcttactctgtcacccaggctggagtgcagtggcacaatctcagctcactgcagcctgatcttccagctcaagcagttctcccacctcagcctttcaagtggctgggactacaccatgcccagtgaattttttttatttttatttttttttgtttttgagacggagttttgctctcgttgcccaagctggggtgcaatggcatgatctcagctcactgcaacctcctcctcccgggttcaagtgattctcctgcctcagcctcctgagtagctgggattacaggcttgtgccaccacgcccagctatttttttttgtatttttagtagaaacggggtttctccatgttagccagctggtcttgaactcctgacctcaggtgatcagcccgcctcggcctcccaaaatgctaggattacaggtgtgagccaccgtgcgtggccgaattttttttattcttttgtagagatggggtctcactgttttgcccaggatggtctcagacatctgcactcaactcatcctcccacctcagcgtcccaaagtgctgggattacaggtggcctggggagggcacagccacgtagggggcccttctcagggagtccccagagtcccctggcacagcaacccctttgcgcattattggttctttcttttagactgggatagaaacctaaaaacaggcttccatttgggacttttcagtatcttacctgtggcttactagggagattttaaaattaagccaattagttattcgagtaaaaaaacataatgggcttaccttacaatatgtcatgacatttgttctttaatatataagattttattctcaggccaggcgtggtggctcacgcttgtcatcccagcactttgggaggccgaggtgggcagatcatgaggtcaggagttttgagaccagcctggccaacatggtgaaaccccgtctctactaaaaatgcaaaaattagccgggcgtaggccaggcgcggtggctcacgcctgtaatcccagcactttgggaggccgaggtgggcagatcacgatgtcaggagatcaagaccatcctggccaacatggtgaaaccctgtctttactaaaaaatacaaaaaaattagccgggcgtggtggtgggtgcctgtaatcccatctactcggaagactgaggcaggagaattgcttgaaccccggaggcgaaggttgcagtgagccgagatcatgacactatattccagcccgggtgacagagcaagactccatctcggggaaaaaaaaaatttattcttgtttccataagcaaaaggctcattgaagacatcttttgaaaggcaccttattctagagtaaatttcctactcttgaatgagacccctaaaaagaatcggttttagtccttctgccctgggaacaagaaaatctaagtgcatggggcctccgtgagtgagattcgtcatagtgcgctgcagcgatggatcgggaaatcccagggtgagaggaaccagctcagggaatcagcgaatttatctcgagagccatgagccgtggaaccgtgttcctccacacactcggcttctcttttctaaagagggattttccctgctccaagggttatcctttttttggttccgagcagcgagtgcttctgggtcctgaagtcctcttctttgtttagggagatccaggacgaggagctgaagaagttctgttcccggatctgtaaactgctgcaggcggaggacttggggccggacaccctcgactccctgcagaggctcttcctcatcatctcagccacgaagtacagccggaggtgagtgtggcgacggctcaggccggctcctcacacagcggccccaggagaacccagcccacgcccagcaggtcactgcagatgctccttgggggttgagtcatttgtccacttaaaccagtgctgaaggtccatcctcatgtaaaatgctctgtccactggcccaagggtgcccggccaggtgctctggggcaccgggtgctcctgccacggtcgtgacgtgttaccgcccaccacgggcatctcgccttccaggctggagaagacatgcgtagacctgctgcaggccaccctcggcctgcctgcatgccccgagcagctccaggtgctttgcgccgccatcctgcgagagatgtccccctctgacagcctcagcctggcctgggaccacacgcagaacagccggcagctgagcctggtggcctccgttctcttggcccaggtagcgcagcagtcaccaccccagttggcaccggatggctgcttcccaaggaacaggggagacaggaagcaggggcgccagagccggcaggtggctgcttgttgtagacgcatctcggtgctgagtgcctggcacacttgaggctggggcatgccctgttgactggaacggggtcccatgcccagcaggcccacgtggtatgttggtgctcaggagaggtggtggagtttggtttctcagacagagccttgagacagcgagtcagtggaggctgggcctccagaccttctttttggggtttttgttttgttttttagaaacagggtctcactctgctgtccagtgtagagtgccatggagtgatcaatgctcactgcagcctcgacctccctggctcaagcaatcctcccatctcagcctcctgagtagctgggattacaggcatgcatcaccacacccagttaatgtttgtatttttttgtagggacctggggtctcactatgttgcccaggctggtctcaaacttctgggctcaagcaatccaccctccttggccaggagtttttgccaagtccatgtcctccctccctctgtgtcgggagcaggcctgggcactcagcgtggggatccaggggttcacaggctgcctttgtgtgagagaagctgctatctctgctcatgggttgcccaggggtgcagagtctgcaggaaggttgcgatggagctgggcttttccctccgttcccagcctgcagcgtcatgagttgcctcctgtgctggggtgcagcctgcggttgctttagttctgtgtgggcgagagcttgtgggccccggcgtactcagggcgttgtacttcatcactggggtcatcctggttggtgcccagccccctcacctcacagacctcctgcaggccacctccaggcctccgagatgaccccggtaatgctgtggtagctcctggcctttggaacaagatgactccggctcttcttgtttgtttcacccgcccttctcctcaagcaactcatttttttcagtggaagatgatcttgcagaactgctgccaggcgccagcggtgcaccccccgcccggcacgtggcctcccagccacccagccgccctcctccctgccctgacggccctgcccctgtgctgggtgtctctggtgctgctcagatgtttcagcacctgggtgtgcagagtgaggtgggtggtttaaagactgggatccacactggaggccccgcaggacggggtgtcctgtgtctgcggccagggccatggtggccgccagtgtgtttttagcattgaatcagccgtgccctcacccaggccccctccagcctcagcgatgcagctcccagggagagaggctggaggcggagcaggcaccttgtggcccggggtgggcctgcgcgggacatcctccctgccacctgctaggccggggtctcagcgaccgacgcttctcaggagtgtcacacagacttccgaaatgggggagctggtctctggcacaggccagtaccccagcgtttgccctgtttgatttgaagggtgacagaaacgaggaggtcagagccgtgggccagggcgtgctacgagcgctggagagccggcagcctgagggacccagcctcagacacctcctccccgtcatggccaaggtcgtggtcctcagcccgggcaccctccaggagggtacgcggggcccctcccaagaggctgttgggggtctgccttcccaggtccttccctgagggcccatggtgggttgggagtgtggggggcaggtgggggacacggggaggcccgagggtttgggacgctgcaggattctgttttctgagaaaagtcggccagcatcccaacaacccaggcatctgtaggattcaacctcacctccccatgccaccccacccactgcagaccaggccaccctgctcagcaagcggctggtcgactggctgcgctacgccagcctccagcaagggctcccacactccggcggcttcttctccacgcccagggcccggcaggtgaggctgggactgttctggaaccatggggaacagagtcacagacaacccctccctgagagctcctgtgcccacagcggcgaggcctgctgtcgttccgcggggtccaggacgagcctgcctctgctgcggggcttgggtcaggcagggccacagccccctgacccgtgtggctctgggggtctgtgcgcgggttcagtcccagggcctgcggagcagggtgtgcgacgcgcgtctgcctgggggtcaggtggggatggtgtttttgcatcacacagggcgggccgctgcccgggctcatgttcaggcagcttctcctccacctcctgaggagcttgtgctaaaggctggcgtttttcccggcctcggccccctccgcccactcctgcctgtccttcccacagccgggccccgtcaccgaggtggacggggcggtagccacagacttcttcacggtgctctccagcggccaccgcttcacagacgaccagtggctgaacgtgcaggccttctctatgctgcgggcgtggctgctgcacagcggccccgagggcccgggcaccctggacacaggtgtgcggggtggggggatgacgtcagacaggggtgggaggtgggcgcactatgggttggtcgcagggggacacgggcggaggtggggggactcgggtgtgcccaggatgcagcagaggtcaggactgagcaacgcagcctgctgacctggagctaggcggagagcactccctggccagcatctttggggtccagggtcagcaccggggatcctctggacaccccgtgaccctcatgcaatgtgcagatgtgagagctcccacttaaggcaggcacccttaaggttgttggagtgacgccactgagctcctcccggctgctctgtggacttgttggggaagaagcctcagccaccctgaagggcggccgtgatggggaagctgccgggtgggtggacgtcctgagacggtgacgcctcacgcctcccgggaggggctgcggcctgtgctctcctcctgcccttccaagcagggcagcaggcatgtcccagcccgggagccacacgtcagcctgctgagagttcccacctcccgcagatgacaggtcagagcaggagggctccactctgtcggtgatctccgccacctcctctgccggccgcctgctgccgccccgggagcggcttcgggaggtggccttcgagtactgccagcgcctcattgagcaaagtaaccgacgtgagtcccccacccagggcactggcctccccagggctcgacgcacctgctctgcaaggccacctgaggccagcacagcttccctgagctactgctccacagagggggtccctgggtagccggtttggagcaggggcatttttgcttctggggtcagccccaagtgttcttcaggctccaccccagcccccagcccggccctgtcccacctgggcccctcgcctcagtcccactcaagtcctcctgggggcctgtcccacccccctgctcccggtcctgcctggagcttccagagcacaagctgccccctcattgggccactctaaggctgagacagagccggctgactttttcccctccttccaggagccctgaggaagggggactccgacctgcagaaagctgtaagtggctggggaccaggggatgggaggcagcgactcggcccatttgatgtggtccatgtcccgcagtgcctggtggaggccgtgctggtgctggacgtgctgtgccggcaggacccgtccttcctgtaccgaagtctctcctgcctgaaggccctgcacgggcgggtgcgcggggacccggcctctgtgcgggtgctgctgcccctcgcccacttcttcctgagccacggtgagcccagggtggggtggcgctgactcggggctctgcttctgcctttagttttaggatggaatttcttcttcccttttttttttttttttttttgattgaatagagacaggggtcttgctgtgttgcccaggctggtctggaactcgtggcctcaagcgatcctcctgccttggcctcccaaagtgctgggattacgggcatgagccaccgtgcccagctcatatttctttttgatggattgctgtgccagatgttggtaatttttaaacttttaaatagagaaataaacagactctttttgctgtgtccctagcccaggaaacctgaaagtctaggaaccagcaccttccaaagaatgtgccatagtgtgtgtgactcacgagctgtccgtgtccctgggcgagggagaccaagtgccgcttccccagcgtcccagcgtaggacgcctcggagcccttggtgtcctggagagcaggcctgagactcagggcccctaaccagtcacagaagcacggccagggcgaggtcaagacgtgtgccctggcgggccctggtcttgcaggggaagcggctgcagtggactcggaagccgtctaccagcacctgttcaccaggatcccggtggagcagttccacagccccatgctggcctttgaattcatccagttctgcagggacaacctccacctgttcagcgggcacctcagcaccctcagattgagcttccccaacctctttaaggtatatttgggcatccctgggtgccagggcaggggcatggtaagtccctggggctcctcccctctttccagcggggttcagggcgagtcctggctgagcatagagccctgtgagtcccgggcctggaatgcggtgtgcagggtgaggtggggatctggggtgtccctgcagcgtcacgtgattgacggtgctgtccaagaactcccttgtgggtgttttggagagggggctgtgacacaagacggtgagtttgttctcacagcactggggcagggctgctgcctggtaggatccctcccccgggagccctgcctggtgccttgggcacttgggtgccatttgccttttttttttcttttgagatggagtctcattcctgtcacctaggctggagtgcagtggcgcaatctcagctcactgcaacccccgcctcctgggttcaagcgattctcctgcgtcagccacctgagtagttgagattacaggcacccaccaccatgtccagctaatttttggtatttttagtagagatggggtttcgacatgttggccaggctggtctcgaactcctgacctcagatgatcctcctgccttgacctcccaaagtgctgggattacaggcatgagccaccgcacccggcctggtgccatttgcttttgaagtgtcttttgcagcctcgcctcgctgtaaggtcttttcaactgaggtggggaatcctctttctggagaaaaaccaggacagtggaaaattattgacctgttggtacgaaagtagatacaggctgggggcagtggctcacacctgtaatcccagcacctcgggaggccaaggcaggaggatcttgaggccaggagttcaagaccagcctgggcaacacagggagacctcttgtctacaaaaagtaaacagcctcacatggtggtgtgtgcctgtagtctcagctgctcaggaggctgaggtgggaggatcacttgagcctgggaggttgaggttgcagtgagctatgattgcaccactgcactccagcctgggcgacagagcaagaccctgtctcaaaaaaataaaaagcgggaggaggcaaaggtagaagccctcctggggactgcaggtctgggacagctgtggggccctagctggctcctccctctgccgcctgctccacagctccgagccgtgtccgaaccgctgtgctgtgcccacagttcctggcctggaacagcccacccctcacctccgagtttgtggcgctcctcccggccctggtggacgctggcacagccctggagatgctgcacgcgctgctggacctgccctgcttgacggcggtgctggacctgcagctcaggtgggcccctcaccctctgccagcgctgcgtctcccagccagctggttccacacactgggccccctcctcgctgctcctgacccctacaccggggaccctccttcttccccccccaacacctgaccagtcctcccctgcaaagccacctctaggacagggtgtgtctgtcacccttggccacttgccaagggcagcccctgcaccctggagtgcctcacccgtcttcacgcccaggcctggagcctcccatgccaagcccttcctggcacccgaggtgctgtgatattagggacacctgccgtgtgtctccctgacgggggtgcccttgagtgcaggggccgcatcccagcctggccttgggcgtctgtccacgcaggtcagcaccggctgcatccgagaggccactctgggacacctctctcagggcccccagctgcctggaggccttccgggacccgcagttccagggtcttttccaatacctgctgcgccccaaggccagtggcgccactgagaggtacggggccctagggccagggggccaccagtggctcagagagcccggccacagccactggggtggggctcactgctcagccctaggctgaggccagggtgctttgtgtcccacacaaggctgcgtccccgtcatcaccattatagaggccctgcttctgcaccacgggtctgccgggggcggggcctggtctcagctctctctgctgcccacatcaaccctcataagcttggaggttggccctgtgggtgctccattttgcagatggacaaaccgagcctgagcccaggaagcaggaggcctgggaccggccacaggcctcctgccctcagcccacgccagcctttgtcccgatggctttactgtcccgggtgtgctgacgccaggggtctccccaaacccaggggagcaggaggtcccgagaggcgatgagtgaggatgggagcgggctcagctgtgcgagagggagcagtggcgacgtggccccggcctgcagtcaccaggtcggggagcgggcagcactcacggccacactgtgtcctcaggttggcgccactccaccagctgctgcagcccatggccggctgtgcccgcgtggcccagtgtgcccaggccgtgcccacgctgctgcaggcattcttctcagcagtgacccaggtgagctcgctgcctggggccccccattcccacaggcctcacaactgaggggcaggccagagccagcactggggggccctcttgagctctgcagaaggctgctcccgccacacccaccatccacggtccctgtgagggtcagggaggcacatgccacagccccggcaggccccgtcccttgtcccatcccctttattccagcaggccccgttccccagtccccgtcccatccccttcatcccggcaggccacgtcccccaatccccgtcccatccccttcatcccggcaggtcctgtctcccatcccagcaggctccatccaactgccccagcaggccctgtcttccgtccccaggacagggcaagtgagtggcctgggctctggccacacagctggggccggagcagtttgtccccctgctgcccctgataattcagcatccccatctgaggccaaaataaaggctcccacaggctggtgccccccatctcccccattgctgcttcccacctcggggagctctacaagccagtgcaggagagcctgggaggtggggaggccggcagggggctgggcgttgcttgggcgcacccttggccaaacaagacgtgtgcctggccttgcagagcgggagttggcagaggagccgtggaacagaagcgacacctctgccgggggcacttgggccagcccagggcttccctccctgtgcccggatgctgccagctgagtctctgtgtccctgggtgttggggaaggcagtggacgaggagtctccagcccctcacctgccccccagccctcaccatggcttcacccccaaccttagggcctgcagtgggggtggggctgagcctgtttcccactcctgacccccaggtggctgacgggtccctgatcaaccagctggcgctgctgctcctgggcaggagcgactcgctctacccggccccagggtacgctgccggtgtgcacaggtaggtccctcctgcgctcctgccacagccctgggcgggtgcctcctggactcctccccctctcccctcccccctccccttcagtggcttcggcaccacccctagctgggccctcagcagcctcagaccctgccacccccacccacagccccacacccagccccaggcacttctctctgcttctcaagaacattcccgtccttctttctgccgagcctgtcctcttcagggttagctcaggtccctcttccccgtcttgtcccctggggtccttctctccaaaggcctgatgcatgcaggcccatcctggttccactctgagcctgggcctgaggccagcgctggtgccagccttctccccagtgagaacagtttctctgaggctggcagtcttctgtgttcctctatcggagggtgcagcatacacctaccactcagacgcttcccgggtttctccaggcccttggcctggatggggatggggtcataggtctgcacagagcaggcgtagacccggctttctgggcagtgtgctgagttctcagttcctggccctgtgtacgctgaaaccctccctggtggtggagctggcaagagacctgctggagttcctgggcagcgtgaatggtctctgcagcagggcgagcctcgtcaccagcgtggtaaggcgggcgctggcctcccacagccgctcctgacccaggaggcctgggtgggggctgaatctctgtccccgggcctaggtgtgggccatcggcgagtacctgtcggtgacctacgatcggaggtgcaccgtggagcagatcaacaagttcttcgaagccctggaggctctgctattcgaggtcacccagtgccgcccctctgctgccctgcccaggtgtcccccccaggtggtcaccgtgctgatgaccacgctgacgaagctggcctcccggagccaagatctgatccccaggtgcctggtcagggagggagcgaagccttctggctcctggggaagagaggtggcttctgaggtcttcccatccaggtgttgtgaaatggtcgcagcagcgcaggtcctgggtgggccctgctgagctaaagccactctgctgggcgcttcaggcctggcccctccacacagacccctgtcctgggaggggagcatctgcagctgacggagggaccttctttccccagggcctctttattgctgtcaaagatgaggaccctggctcacagtccagccaccagctccacgcacagcgaggagggcgcggaagccatccgtacccgggccacagagctgctgaccctgctgaagatgcctagcgtggcccagtttgtgctcacacccagcacggaggtgtgcagcccccgctatcaccgcgatgccaacacggccctgcccctggccctgcgcacggtcagccggctggtggagagggaggccggcctcatgccagggtgaagggacagtggccagggacttcggtgcagattaagagcctgggcagccagcttgctactgaggccaggctgataggagctcaggagggcgcgggagtcctgggagaggaggcaaggcccacggtgggcttggcaccctcacagacacgcggggctggcccccctgctcaccctctgggctttgtctccgagccttttgctcccaggcaacactgagctgagctgaggggtgccatggagcggctctgattggaggcttgaggccctgtggctgggtcgggtggaggctgctgggtctgtttcctagtcttttgtttttggacagttgat

SEQ ID NO: 10806 - DNA, 2667 bp, Homo sapiens
gctcacgtgacgcggtcccggaagttgaccggggtgcggagctcctgggctgcagctcctggagtttccgaggttcgtgcgcgtctggtggcggcggcgtgatgttctcggcaggagcggagagtttgctccaccaggccagggagatccaggacgaggagctgaagaagttctgttcccggatctgtaaactgctgcaggcggaggacttggggccggacaccctcgactccctgcagaggctcttcctcatcatctcagccacgaagtacagccggagggtgacagaaacgaggaggtcagagccgtgggccagggcgtgctacgagcgctggagagccggcagcctgagggacccagcctcagacacctcctccccgtcatggccaaggtcgtggtcctcagcccgggcaccctccaggaggaccaggccaccctgctcagcaagcggctggtcgactggctgcgctacgccagcctccagcaagggctcccacactccggcggcttcttctccacgcccagggcccggcagccgggccccgtcaccgaggtggacggggcggtagccacagacttcttcacggtgctctccagcggccaccgcttcacagacgaccagtggctgaacgtgcaggccttctctatgctgcgggcgtggctgctgcacagcggccccgagggcccgggcaccctggacacagatgacaggtcagagcaggagggctccactctgtcggtgatctccgccacctcctctgccggccgcctgctgccgccccgggagcggcttcgggaggtggccttcgagtactgccagcgcctcattgagcaaagtaaccgacgagccctgaggaagggggactccgacctgcagaaagcttgcctggtggaggccgtgctggtgctggacgtgctgtgccggcaggacccgtccttcctgtaccgaagtctctcctgcctgaaggccctgcacgggcgggtgcgcggggacccggcctctgtgcgggtgctgctgcccctcgcccacttcttcctgagccacggggaagcggctgcagtggactcggaagccgtctaccagcacctgttcaccaggatcccggtggagcagttccacagccccatgctggcctttgaattcatccagttctgcagggacaacctccacctgttcagcgggcacctcagcaccctcagattgagcttccccaacctctttaagttcctggcctggaacagcccacccctcacctccgagtttgtggcgctcctcccggccctggtggacgctggcacagccctggagatgctgcacgcgctgctggacctgccctgcttgacggcggtgctggacctgcagctcaggtcagcaccggctgcatccgagaggccactctgggacacctctctcagggcccccagctgcctggaggccttccgggacccgcagttccagggtcttttccaatacctgctgcgccccaaggccagtggcgccactgagaggttggcgccactccaccagctgctgcagcccatggccggctgtgcccgcgtggcccagtgtgcccaggccgtgcccacgctgctgcaggcattcttctcagcagtgacccaggtggctgacgggtccctgatcaaccagctggcgctgctgctcctgggcaggagcgactcgctctacccggccccagggtacgctgccggtgtgcacagtgtgctgagttctcagttcctggccctgtgtacgctgaaaccctccctggtggtggagctggcaagagacctgctggagttcctgggcagcgtgaatggtctctgcagcagggcgagcctcgtcaccagcgtggtgtgggccatcggcgagtacctgtcggtgacctacgatcggaggtgcaccgtggagcagatcaacaagttcttcgaagccctggaggctctgctattcgaggtcacccagtgccgcccctctgctgccctgcccaggtgtcccccccaggtggtcaccgtgctgatgaccacgctgacgaagctggcctcccggagccaagatctgatccccagggcctctttattgctgtcaaagatgaggaccctggctcacagtccagccaccagctccacgcacagcgaggagggcgcggaagccatccgtacccgggccacagagctgctgaccctgctgaagatgcctagcgtggcccagtttgtgctcacacccagcacggaggtgtgcagcccccgctatcaccgcgatgccaacacggccctgcccctggccctgcgcacggtcagccggctggtggagagggaggccggcctcatgccagggtgaagggacagtggccagggacttcggtgcagattaagagcctgggcagccagcttgctactgaggccaggctgataggagctcaggagggcgcgggagtcctgggagaggaggcaaggcccacggtgggcttggcaccctcacagacacgcggggctggcccccctgctcaccctctgggctttgtctccgagccttttgctcccaggcaacactgagctgagctgaggggtgccatggagcggctctgattggaggcttgaggccctgtggctgggtcgggtggaggctgctgggtctgtttcctagtcttttgtttttggacagttgat

SEQ ID NO: 10807 - DNA, 1891 bp, Homo sapiens; identical to SEQ ID NO: 10797

SEQ ID NO: 10808 - DNA, 917 bp, Homo sapiens; identical to SEQ ID NO: 10798

SEQ ID NO: 10809 - DNA, 4022 bp, Homo sapiens
tggagatgctgcacgcgctgctggacctgccctgcttgacggcggtgctggacctgcagctcaggtgggcccctcaccctctgccagcgctgcgtctcccagccagctggttccacacactgggccccctcctcgctgctcctgacccctacaccggggaccctccttcttccccccccaacacctgaccagtcctcccctgcaaagccacctctaggacagggtgtgtctgtcacccttggccacttgccaagggcagcccctgcaccctggagtgcctcacccgtcttcacgcccaggcctggagcctcccatgccaagcccttcctggcacccgaggtgctgtgatattagggacacctgccgtgtgtctccctgacgggggtgcccttgagtgcaggggccgcatcccagcctggccttgggcgtctgtccacgcaggtcagcaccggctgcatccgagaggccactctgggacacctctctcagggcccccagctgcctggaggccttccgggacccgcagttccagggtcttttccaatacctgctgcgccccaaggccagtggcgccactgagaggtacggggccctagggccagggggccaccagtggctcagagagcccggccacagccactggggtggggctcactgctcagccctaggctgaggccagggtgctttgtgtcccacacaaggctgcgtccccgtcatcaccattatagaggccctgcttctgcaccacgggtctgccgggggcggggcctggtctcagctctctctgctgcccacatcaaccctcataagcttggaggttggccctgtgggtgctccattttgcagatggacaaaccgagcctgagcccaggaagcaggaggcctgggaccggccacaggcctcctgccctcagcccacgccagcctttgtcccgatggctttactgtcccgggtgtgctgacgccaggggtctccccaaacccaggggagcaggaggtcccgagaggcgatgagtgaggatgggagcgggctcagctgtgcgagagggagcagtggcgacgtggccccggcctgcagtcaccaggtcggggagcgggcagcactcacggccacactgtgtcctcaggttggcgccactccaccagctgctgcagcccatggccggctgtgcccgcgtggcccagtgtgcccaggccgtgcccacgctgctgcaggcattcttctcagcagtgacccaggtgagctcgctgcctggggccccccattcccacaggcctcacaactgaggggcaggccagagccagcactggggggccctcttgagctctgcagaaggctgctcccgccacacccaccatccacggtccctgtgagggtcagggaggcacatgccacagccccggcaggccccgtcccttgtcccatcccctttattccagcaggccccgttccccagtccccgtcccatccccttcatcccggcaggccacgtcccccaatccccgtcccatccccttcatcccggcaggtcctgtctcccatcccagcaggctccatccaactgccccagcaggccctgtcttccgtccccaggacagggcaagtgagtggcctgggctctggccacacagctggggccggagcagtttgtccccctgctgcccctgataattcagcatccccatctgaggccaaaataaaggctcccacaggctggtgccccccatctcccccattgctgcttcccacctcggggagctctacaagccagtgcaggagagcctgggaggtggggaggccggcagggggctgggcgttgcttgggcgcacccttggccaaacaagacgtgtgcctggccttgcagagcgggagttggcagaggagccgtggaacagaagcgacacctctgccgggggcacttgggccagcccagggcttccctccctgtgcccggatgctgccagctgagtctctgtgtccctgggtgttggggaaggcagtggacgaggagtctccagcccctcacctgccccccagccctcaccatggcttcacccccaaccttagggcctgcagtgggggtggggctgagcctgtttcccactcctgacccccaggtggctgacgggtccctgatcaaccagctggcgctgctgctcctgggcaggagcgactcgctctacccggccccagggtacgctgccggtgtgcacaggtaggtccctcctgcgctcctgccacagccctgggcgggtgcctcctggactcctccccctctcccctcccccctccccttcagtggcttcggcaccacccctagctgggccctcagcagcctcagaccctgccacccccacccacagccccacacccagccccaggcacttctctctgcttctcaagaacattcccgtccttctttctgccgagcctgtcctcttcagggttagctcaggtccctcttccccgtcttgtcccctggggtccttctctccaaaggcctgatgcatgcaggcccatcctggttccactctgagcctgggcctgaggccagcgctggtgccagccttctccccagtgagaacagtttctctgaggctggcagtcttctgtgttcctctatcggagggtgcagcatacacctaccactcagacgcttcccgggtttctccaggcccttggcctggatggggatggggtcataggtctgcacagagcaggcgtagacccggctttctgggcagtgtgctgagttctcagttcctggccctgtgtacgctgaaaccctccctggtggtggagctggcaagagacctgctggagttcctgggcagcgtgaatggtctctgcagcagggcgagcctcgtcaccagcgtggtaaggcgggcgctggcctcccacagccgctcctgacccaggaggcctgggtgggggctgaatctctgtccccgggcctaggtgtgggccatcggcgagtacctgtcggtgacctacgatcggaggtgcaccgtggagcagatcaacaagttcttcgaagccctggaggctctgctattcgaggtcacccagtgccgcccctctgctgccctgcccaggtgtcccccccaggtggtcaccgtgctgatgaccacgctgacgaagctggcctcccggagccaagatctgatccccaggtgcctggtcagggagggagcgaagccttctggctcctggggaagagaggtggcttctgaggtcttcccatccaggtgttgtgaaatggtcgcagcagcgcaggtcctgggtgggccctgctgagctaaagccactctgctgggcgcttcaggcctggcccctccacacagacccctgtcctgggaggggagcatctgcagctgacggagggaccttctttccccagggcctctttattgctgtcaaagatgaggaccctggctcacagtccagccaccagctccacgcacagcgaggagggcgcggaagccatccgtacccgggccacagagctgctgaccctgctgaagatgcctagcgtggcccagtttgtgctcacacccagcacggaggtgtgcagcccccgctatcaccgcgatgccaacacggccctgcccctggccctgcgcacggtcagccggctggtggagagggaggccggcctcatgccagggtgaagggacagtggccagggacttcggtgcagattaagagcctgggcagccagcttgctactgaggccaggctgataggagctcaggagggcgcgggagtcctgggagaggaggcaaggcccacggtgggcttggcaccctcacagacacgcggggctggcccccctgctcaccctctgggctttgtctccgagccttttgctcccaggcaacactgagctgagctgaggggtgccatggagcggctctgattggaggcttgaggccctgtggctgggtcgggtggaggctgctgggtctgtttcctagtcttttgtttttggacagttgatgggcaagaagagctgcagta

SEQ ID NO: 10810 - DNA, 1453 bp, Homo sapiens
tggagatgctgcacgcgctgctggacctgccctgcttgacggcggtgctggacctgcagctcaggtcagcaccggctgcatccgagaggccactctgggacacctctctcagggcccccagctgcctggaggccttccgggacccgcagttccagggtcttttccaatacctgctgcgccccaaggccagtggcgccactgagaggttggcgccactccaccagctgctgcagcccatggccggctgtgcccgcgtggcccagtgtgcccaggccgtgcccacgctgctgcaggcattcttctcagcagtgacccaggtggctgacgggtccctgatcaaccagctggcgctgctgctcctgggcaggagcgactcgctctacccggccccagggtacgctgccggtgtgcacaggcccttggcctggatggggatggggtcataggtctgcacagagcaggcgtagacccggctttctgggcagtgtgctgagttctcagttcctggccctgtgtacgctgaaaccctccctggtggtggagctggcaagagacctgctggagttcctgggcagcgtgaatggtctctgcagcagggcgagcctcgtcaccagcgtggtgtgggccatcggcgagtacctgtcggtgacctacgatcggaggtgcaccgtggagcagatcaacaagttcttcgaagccctggaggctctgctattcgaggtcacccagtgccgcccctctgctgccctgcccaggtgtcccccccaggtggtcaccgtgctgatgaccacgctgacgaagctggcctcccggagccaagatctgatccccagggcctctttattgctgtcaaagatgaggaccctggctcacagtccagccaccagctccacgcacagcgaggagggcgcggaagccatccgtacccgggccacagagctgctgaccctgctgaagatgcctagcgtggcccagtttgtgctcacacccagcacggaggtgtgcagcccccgctatcaccgcgatgccaacacggccctgcccctggccctgcgcacggtcagccggctggtggagagggaggccggcctcatgccagggtgaagggacagtggccagggacttcggtgcagattaagagcctgggcagccagcttgctactgaggccaggctgataggagctcaggagggcgcgggagtcctgggagaggaggcaaggcccacggtgggcttggcaccctcacagacacgcggggctggcccccctgctcaccctctgggctttgtctccgagccttttgctcccaggcaacactgagctgagctgaggggtgccatggagcggctctgattggaggcttgaggccctgtggctgggtcgggtggaggctgctgggtctgtttcctagtcttttgtttttggacagttgatgggcaagaagagctgcagta

SEQ ID NO: 10811 - DNA, 2062 bp, Homo sapiens
aggggtcttgctgtgttgcccaggctggtctggaactcgtggcctcaagcgatcctcctgccttggcctcccaaagtgctgggattacgggcatgagccaccgtgcccagctcatatttctttttgatggattgctgtgccagatgttggtaatttttaaacttttaaatagagaaataaacagactctttttgctgtgtccctagcccaggaaacctgaaagtctaggaaccagcaccttccaaagaatgtgccatagtgtgtgtgactcacgagctgtccgtgtccctgggcgagggagaccaagtgccgcttccccagcgtcccagcgtaggacgcctcggagcccttggtgtcctggagagcaggcctgagactcagggcccctaaccagtcacagaagcacggccagggcgaggtcaagacgtgtgccctggcgggccctggtcttgcaggggaagcggctgcagtggactcggaagccgtctaccagcacctgttcaccaggatcccggtggagcagttccacagccccatgctggcctttgaattcatccagttctgcagggacaacctccacctgttcagcgggcacctcagcaccctcagattgagcttccccaacctctttaaggtatatttgggcatccctgggtgccagggcaggggcatggtaagtccctggggctcctcccctctttccagcggggttcagggcgagtcctggctgagcatagagccctgtgagtcccgggcctggaatgcggtgtgcagggtgaggtggggatctggggtgtccctgcagcgtcacgtgattgacggtgctgtccaagaactcccttgtgggtgttttggagagggggctgtgacacaagacggtgagtttgttctcacagcactggggcagggctgctgcctggtaggatccctcccccgggagccctgcctggtgccttgggcacttgggtgccatttgccttttttttttcttttgagatggagtctcattcctgtcacctaggctggagtgcagtggcgcaatctcagctcactgcaacccccgcctcctgggttcaagcgattctcctgcgtcagccacctgagtagttgagattacaggcacccaccaccatgtccagctaatttttggtatttttagtagagatggggtttcgacatgttggccaggctggtctcgaactcctgacctcagatgatcctcctgccttgacctcccaaagtgctgggattacaggcatgagccaccgcacccggcctggtgccatttgcttttgaagtgtcttttgcagcctcgcctcgctgtaaggtcttttcaactgaggtggggaatcctctttctggagaaaaaccaggacagtggaaaattattgacctgttggtacgaaagtagatacaggctgggggcagtggctcacacctgtaatcccagcacctcgggaggccaaggcaggaggatcttgaggccaggagttcaagaccagcctgggcaacacagggagacctcttgtctacaaaaagtaaacagcctcacatggtggtgtgtgcctgtagtctcagctgctcaggaggctgaggtgggaggatcacttgagcctgggaggttgaggttgcagtgagctatgattgcaccactgcactccagcctgggcgacagagcaagaccctgtctcaaaaaaataaaaagcgggaggaggcaaaggtagaagccctcctggggactgcaggtctgggacagctgtggggccctagctggctcctccctctgccgcctgctccacagctccgagccgtgtccgaaccgctgtgctgtgcccacagttcctggcctggaacagcccacccctcacctccgagtttgtggcgctcctcccggccctggtggacgctggcacagccctggagatgctgcacgcgctgctggacctgccctgcttgacggcggtgctggacctgcagctcaggtgggcccctcaccctctgccagcgctgcgtctcccagccagctggttccacacactgggccccctcctcgctgctcctg

SEQ ID NO: 10812 - DNA, 857 bp, Homo sapiens
aggggtcttgctgtgttgcccaggctggtctggaactcgtggcctcaagcgatcctcctgccttggcctcccaaagtgctgggattacgggcatgagccaccgtgcccagctcatatttctttttgatggattgctgtgccagatgttggtaatttttaaacttttaaatagagaaataaacagactctttttgctgtgtccctagcccaggaaacctgaaagtctaggaaccagcaccttccaaagaatgtgccatagtgtgtgtgactcacgagctgtccgtgtccctgggcgagggagaccaagtgccgcttccccagcgtcccagcgtaggacgcctcggagcccttggtgtcctggagagcaggcctgagactcagggcccctaaccagtcacagaagcacggccagggcgaggtcaagacgtgtgccctggcgggccctggtcttgcaggggaagcggctgcagtggactcggaagccgtctaccagcacctgttcaccaggatcccggtggagcagttccacagccccatgctggcctttgaattcatccagttctgcagggacaacctccacctgttcagcgggcacctcagcaccctcagattgagcttccccaacctctttaagttcctggcctggaacagcccacccctcacctccgagtttgtggcgctcctcccggccctggtggacgctggcacagccctggagatgctgcacgcgctgctggacctgccctgcttgacggcggtgctggacctgcagctcaggtgggcccctcaccctctgccagcgctgcgtctcccagccagctggttccacacactgggccccctcctcgctgctcctg

SEQ ID NO: 10813 - DNA, 18744 bp, Homo sapiens
ggagctcctgggctgcagctcctggagtttccgaggttcgtgcgcgtctggtggcggcggcgtgatgttctcggcaggagcggagagtttgctccaccaggccaggtacgggggagctgcggccccggccctccttcctgcatctctccctaggggcacacgggggtgggtctcacagggcaggggcttgggcgccagccttgcaggaacccgactggactcgccctcgagacttggggatcgggtaaggcaacacggcggccaggcttggggtgaggaggtcggggagggtcatggtgggtccccggaggaggtgacacttgagcagagtcttggtgagtgaaagcaagtggggtgggacccagtcgacagtttagtcaaaggcttggcggtgagaactccgcgtctggcaggaaatcgggcagccgggagatttcagtgcctcacagtcaagaacgcaaagtcacagtgtccggaggcctgctaaggaataaggctgtgtgccaggctggggagctggaggccatccgagggctttgcggaaccgtgggagggttttgtgacttaaaaagatctctcttgcgcggatgtattagctaggctgagaaatcaccctccaggctggtttcaggctgtgtctggactcccagtaacgagtgagtagctccttcctcaccaactaaccagtcatgggggaaaacagtgtaagccaggactgaacagactcacggtccaccaaacaggcaaagacttcatactacatgtttaaaagaagaaaatgctgaccgggcgtggtggctcacgcctgtaatcccaccactttgggaggccaaggcaggcggatcacctgaggtcaggagttcgagaccagcgtgcccaacatgaggaaaccacgtctctactgaaaatacaaaaaaaaaaaaaaaaaaaaaaattagccgggcgtggtggtgggtgactgtaatcccagctactcgggaggctgaggcaggaggattgcttgaacctgtgaggtggaggttacagtgagctgagatggcgccactgcactccaggctgggggacagagcgaaactccgtctcaaaagaaaaaagaaaaaaagtaaagaaaatacagccagcactacagccccttggtaaacgtaaacaaacttggtgaggtgagaggccgaagcaggagaagtgcatgaacccaggaggccgagggtgcagtgagccaagatcgcaccactggactccagtctgggtgacagaacgagactccatgtcaaaacaaacaagcaaacctggactcagagctagaccaattggtgggaaagattcgggtggttgaaattgctgtgattatagtgagtgaggtcttgaaggcaggttaagttctaaagcccgaacaggacaaaaatctctgatcaaaataacccttaagagtccactcattaggaagaggcttggtgaatatgcagcaccatctcccagcagctcaacataggcaaccttcccttcaatcctggacagatatgtcattcatgtgaatgtggggactatatgaaaatgaaaaatactggcatctcagcatgtaacatgttaatcccaaggtccttgccaagagacaaggaaaaacacccactgagaacttcattcccagtcacattctgctcaaggtcataaacttgtgacatgaaaaacaaaaggaagagccctctttatttatttatttatttatttatttatttatttttattagagtctcttttgagacagagtctccctctgtcgcccaggctggagtacaatggcgcaatctcagttcactgcaacctccgcctcctgggttcaagcaattctcctgcctcagcctcccaagtagctgggattacaggcgcccgccaccacacccggctgattttttgtatctttagtagagatgggatttcaccacattgtccaggctggtctcgaattcctgacctcaggtgatccgcctgactcggcccctcgaagtgccgggattacaggtgtgagccaccatacccggctgagccctcactatttaaatacctgtttctctgcctccctggctcgggtgggcagccgtttttgaggatagagtgtggttgaatttccctatgtaacatacatgagttctgcagttgccctctgttagggtttcaagaaggttaatctattagggcttaccagttttcacaatattcttaagcctgtgatttctgatgatattttaaaataaatgactgtagtttgagggttaaggtttggagccggccaggcgcagtgactggcccacgcctgtaatccgaacacttcgggaggccgagttaggaggatcgcttgaggctaggactttgagaccagcctggacaacatagcgagacccgtctctacaaaacagaatttttaaaaaacttagccaggtgtggtggcacgtacccatagtcacagctactcaggaggctgaggcaggaggatcacttgagccaaggaggttgaggctgcggtaagctatgatggtgccactgcactccagctcgggtgacagagggagaccctgtctccaaagaaagccaaaaagatttggagtgaactttagtttctctctaaatgtgtcagagatacggaaagcaagggtgcaaaaagtgatcaaagatagcgctgcaagctgaaggataaatggagagagcgggaagcgagtaaaggatgggggcatggaggggtgccccgcaaggtcggggatttccaggaggaagagcctcagcccactagctcgggagctagtggggcatgtatcaggcacagggtctgtgcgaagggacagaagcaaaagaaacaggacatggagtctggagaaggaaggcggggccgggctcttggaggcagcgttggggtctgtaggagtttggatttgaaagcagtggggagctgttgaagggtttgggtgggttggattttagagagaagcttgagacttggagaatatgctgaagggaatttaatcgggatgaggggttccacctttctgggaaagattttccattgtgtgtatatatgtatatgtgtgtatatataatttatatataacattttatatattatatattacatatatatttagtaatatataatataattatatgttatatattatatgttatattatatatcattatatataatatataatgatatataatattttatatataatcaaaaaaagaataaaaaaaattcactgggcttagtgtagtcccagctacttgaaaggctgaggtgggagaactgcttgagctagaagatcaggctgcagtgagctgagattatgccactgcactccagcctgggtgacagcataagactctatctcaaaaaatatatatatagatagatagatagatataaaaatatatttttatatgtaatatatataaaatatatattatatacatttttgagatagagcatattatatattatatataacatatataacaactatataacatatataacataacatatataacaacataatatatagcatatattatgtataacatatattagatataacatatataacattagaaataatgtatataacataacataacgtatataacgcatataacaacatatataacgtatataacataacacgttatatatgatatataacatataacatgttatatatcataacgtgttatatgtcatataacatgattattatatatcatatataacatgataacatatatatcatatataacatatataacattatatataacatatatattatattatatatatatatttttttttgaagtagagtcttactctgtcacccaggctggagtgcagtggcacaatctcagctcactgcagcctgatcttccagctcaagcagttctcccacctcagcctttcaagtggctgggactacaccatgcccagtgaattttttttatttttatttttttttgtttttgagacggagttttgctctcgttgcccaagctggggtgcaatggcatgatctcagctcactgcaacctcctcctcccgggttcaagtgattctcctgcctcagcctcctgagtagctgggattacaggcttgtgccaccacgcccagctatttttttttgtatttttagtagaaacggggtttctccatgttagccagctggtcttgaactcctgacctcaggtgatcagcccgcctcggcctcccaaaatgctaggattacaggtgtgagccaccgtgcgtggccgaattttttttattcttttgtagagatggggtctcactgttttgcccaggatggtctcagacatctgcactcaactcatcctcccacctcagcgtcccaaagtgctgggattacaggtggcctggggagggcacagccacgtagggggcccttctcagggagtccccagagtcccctggcacagcaacccctttgcgcattattggttctttcttttagactgggatagaaacctaaaaacaggcttccatttgggacttttcagtatcttacctgtggcttactagggagattttaaaattaagccaattagttattcgagtaaaaaaacataatgggcttaccttacaatatgtcatgacatttgttctttaatatataagattttattctcaggccaggcgtggtggctcacgcttgtcatcccagcactttgggaggccgaggtgggcagatcatgaggtcaggagttttgagaccagcctggccaacatggtgaaaccccgtctctactaaaaatgcaaaaattagccgggcgtaggccaggcgcggtggctcacgcctgtaatcccagcactttgggaggccgaggtgggcagatcacgatgtcaggagatcaagaccatcctggccaacatggtgaaaccctgtctttactaaaaaatacaaaaaaattagccgggcgtggtggtgggtgcctgtaatcccatctactcggaagactgaggcaggagaattgcttgaaccccggaggcgaaggttgcagtgagccgagatcatgacactatattccagcccgggtgacagagcaagactccatctcggggaaaaaaaaaatttattcttgtttccataagcaaaaggctcattgaagacatcttttgaaaggcaccttattctagagtaaatttcctactcttgaatgagacccctaaaaagaatcggttttagtccttctgccctgggaacaagaaaatctaagtgcatggggcctccgtgagtgagattcgtcatagtgcgctgcagcgatggatcgggaaatcccagggtgagaggaaccagctcagggaatcagcgaatttatctcgagagccatgagccgtggaaccgtgttcctccacacactcggcttctcttttctaaagagggattttccctgctccaagggttatcctttttttggttccgagcagcgagtgcttctgggtcctgaagtcctcttctttgtttagggagatccaggacgaggagctgaagaagttctgttcccggatctgtaaactgctgcaggcggaggacttggggccggacaccctcgactccctgcagaggctcttcctcatcatctcagccacgaagtacagccggaggtgagtgtggcgacggctcaggccggctcctcacacagcggccccaggagaacccagcccacgcccagcaggtcactgcagatgctccttgggggttgagtcatttgtccacttaaaccagtgctgaaggtccatcctcatgtaaaatgctctgtccactggcccaagggtgcccggccaggtgctctggggcaccgggtgctcctgccacggtcgtgacgtgttaccgcccaccacgggcatctcgccttccaggctggagaagacatgcgtagacctgctgcaggccaccctcggcctgcctgcatgccccgagcagctccaggtgctttgcgccgccatcctgcgagagatgtccccctctgacagcctcagcctggcctgggaccacacgcagaacagccggcagctgagcctggtggcctccgttctcttggcccaggtagcgcagcagtcaccaccccagttggcaccggatggctgcttcccaaggaacaggggagacaggaagcaggggcgccagagccggcaggtggctgcttgttgtagacgcatctcggtgctgagtgcctggcacacttgaggctggggcatgccctgttgactggaacggggtcccatgcccagcaggcccacgtggtatgttggtgctcaggagaggtggtggagtttggtttctcagacagagccttgagacagcgagtcagtggaggctgggcctccagaccttctttttggggtttttgttttgttttttagaaacagggtctcactctgctgtccagtgtagagtgccatggagtgatcaatgctcactgcagcctcgacctccctggctcaagcaatcctcccatctcagcctcctgagtagctgggattacaggcatgcatcaccacacccagttaatgtttgtatttttttgtagggacctggggtctcactatgttgcccaggctggtctcaaacttctgggctcaagcaatccaccctccttggccaggagtttttgccaagtccatgtcctccctccctctgtgtcgggagcaggcctgggcactcagcgtggggatccaggggttcacaggctgcctttgtgtgagagaagctgctatctctgctcatgggttgcccaggggtgcagagtctgcaggaaggttgcgatggagctgggcttttccctccgttcccagcctgcagcgtcatgagttgcctcctgtgctggggtgcagcctgcggttgctttagttctgtgtgggcgagagcttgtgggccccggcgtactcagggcgttgtacttcatcactggggtcatcctggttggtgcccagccccctcacctcacagacctcctgcaggccacctccaggcctccgagatgaccccggtaatgctgtggtagctcctggcctttggaacaagatgactccggctcttcttgtttgtttcacccgcccttctcctcaagcaactcatttttttcagtggaagatgatcttgcagaactgctgccaggcgccagcggtgcaccccccgcccggcacgtggcctcccagccacccagccgccctcctccctgccctgacggccctgcccctgtgctgggtgtctctggtgctgctcagatgtttcagcacctgggtgtgcagagtgaggtgggtggtttaaagactgggatccacactggaggccccgcaggacggggtgtcctgtgtctgcggccagggccatggtggccgccagtgtgtttttagcattgaatcagccgtgccctcacccaggccccctccagcctcagcgatgcagctcccagggagagaggctggaggcggagcaggcaccttgtggcccggggtgggcctgcgcgggacatcctccctgccacctgctaggccggggtctcagcgaccgacgcttctcaggagtgtcacacagacttccgaaatgggggagctggtctctggcacaggccagtaccccagcgtttgccctgtttgatttgaagggtgacagaaacgaggaggtcagagccgtgggccagggcgtgctacgagcgctggagagccggcagcctgagggacccagcctcagacacctcctccccgtcatggccaaggtcgtggtcctcagcccgggcaccctccaggagggtacgcggggcccctcccaagaggctgttgggggtctgccttcccaggtccttccctgagggcccatggtgggttgggagtgtggggggcaggtgggggacacggggaggcccgagggtttgggacgctgcaggattctgttttctgagaaaagtcggccagcatcccaacaacccaggcatctgtaggattcaacctcacctccccatgccaccccacccactgcagaccaggccaccctgctcagcaagcggctggtcgactggctgcgctacgccagcctccagcaagggctcccacactccggcggcttcttctccacgcccagggcccggcaggtgaggctgggactgttctggaaccatggggaacagagtcacagacaacccctccctgagagctcctgtgcccacagcggcgaggcctgctgtcgttccgcggggtccaggacgagcctgcctctgctgcggggcttgggtcaggcagggccacagccccctgacccgtgtggctctgggggtctgtgcgcgggttcagtcccagggcctgcggagcagggtgtgcgacgcgcgtctgcctgggggtcaggtggggatggtgtttttgcatcacacagggcgggccgctgcccgggctcatgttcaggcagcttctcctccacctcctgaggagcttgtgctaaaggctggcgtttttcccggcctcggccccctccgcccactcctgcctgtccttcccacagccgggccccgtcaccgaggtggacggggcggtagccacagacttcttcacggtgctctccagcggccaccgcttcacagacgaccagtggctgaacgtgcaggccttctctatgctgcgggcgtggctgctgcacagcggccccgagggcccgggcaccctggacacaggtgtgcggggtggggggatgacgtcagacaggggtgggaggtgggcgcactatgggttggtcgcagggggacacgggcggaggtggggggactcgggtgtgcccaggatgcagcagaggtcaggactgagcaacgcagcctgctgacctggagctaggcggagagcactccctggccagcatctttggggtccagggtcagcaccggggatcctctggacaccccgtgaccctcatgcaatgtgcagatgtgagagctcccacttaaggcaggcacccttaaggttgttggagtgacgccactgagctcctcccggctgctctgtggacttgttggggaagaagcctcagccaccctgaagggcggccgtgatggggaagctgccgggtgggtggacgtcctgagacggtgacgcctcacgcctcccgggaggggctgcggcctgtgctctcctcctgcccttccaagcagggcagcaggcatgtcccagcccgggagccacacgtcagcctgctgagagttcccacctcccgcagatgacaggtcagagcaggagggctccactctgtcggtgatctccgccacctcctctgccggccgcctgctgccgccccgggagcggcttcgggaggtggccttcgagtactgccagcgcctcattgagcaaagtaaccgacgtgagtcccccacccagggcactggcctccccagggctcgacgcacctgctctgcaaggccacctgaggccagcacagcttccctgagctactgctccacagagggggtccctgggtagccggtttggagcaggggcatttttgcttctggggtcagccccaagtgttcttcaggctccaccccagcccccagcccggccctgtcccacctgggcccctcgcctcagtcccactcaagtcctcctgggggcctgtcccacccccctgctcccggtcctgcctggagcttccagagcacaagctgccccctcattgggccactctaaggctgagacagagccggctgactttttcccctccttccaggagccctgaggaagggggactccgacctgcagaaagctgtaagtggctggggaccaggggatgggaggcagcgactcggcccatttgatgtggtccatgtcccgcagtgcctggtggaggccgtgctggtgctggacgtgctgtgccggcaggacccgtccttcctgtaccgaagtctctcctgcctgaaggccctgcacgggcgggtgcgcggggacccggcctctgtgcgggtgctgctgcccctcgcccacttcttcctgagccacggtgagcccagggtggggtggcgctgactcggggctctgcttctgcctttagttttaggatggaatttcttcttcccttttttttttttttttttttgattgaatagagacaggggtcttgctgtgttgcccaggctggtctggaactcgtggcctcaagcgatcctcctgccttggcctcccaaagtgctgggattacgggcatgagccaccgtgcccagctcatatttctttttgatggattgctgtgccagatgttggtaatttttaaacttttaaatagagaaataaacagactctttttgctgtgtccctagcccaggaaacctgaaagtctaggaaccagcaccttccaaagaatgtgccatagtgtgtgtgactcacgagctgtccgtgtccctgggcgagggagaccaagtgccgcttccccagcgtcccagcgtaggacgcctcggagcccttggtgtcctggagagcaggcctgagactcagggcccctaaccagtcacagaagcacggccagggcgaggtcaagacgtgtgccctggcgggccctggtcttgcaggggaagcggctgcagtggactcggaagccgtctaccagcacctgttcaccaggatcccggtggagcagttccacagccccatgctggcctttgaattcatccagttctgcagggacaacctccacctgttcagcgggcacctcagcaccctcagattgagcttccccaacctctttaaggtatatttgggcatccctgggtgccagggcaggggcatggtaagtccctggggctcctcccctctttccagcggggttcagggcgagtcctggctgagcatagagccctgtgagtcccgggcctggaatgcggtgtgcagggtgaggtggggatctggggtgtccctgcagcgtcacgtgattgacggtgctgtccaagaactcccttgtgggtgttttggagagggggctgtgacacaagacggtgagtttgttctcacagcactggggcagggctgctgcctggtaggatccctcccccgggagccctgcctggtgccttgggcacttgggtgccatttgccttttttttttcttttgagatggagtctcattcctgtcacctaggctggagtgcagtggcgcaatctcagctcactgcaacccccgcctcctgggttcaagcgattctcctgcgtcagccacctgagtagttgagattacaggcacccaccaccatgtccagctaatttttggtatttttagtagagatggggtttcgacatgttggccaggctggtctcgaactcctgacctcagatgatcctcctgccttgacctcccaaagtgctgggattacaggcatgagccaccgcacccggcctggtgccatttgcttttgaagtgtcttttgcagcctcgcctcgctgtaaggtcttttcaactgaggtggggaatcctctttctggagaaaaaccaggacagtggaaaattattgacctgttggtacgaaagtagatacaggctgggggcagtggctcacacctgtaatcccagcacctcgggaggccaaggcaggaggatcttgaggccaggagttcaagaccagcctgggcaacacagggagacctcttgtctacaaaaagtaaacagcctcacatggtggtgtgtgcctgtagtctcagctgctcaggaggctgaggtgggaggatcacttgagcctgggaggttgaggttgcagtgagctatgattgcaccactgcactccagcctgggcgacagagcaagaccctgtctcaaaaaaataaaaagcgggaggaggcaaaggtagaagccctcctggggactgcaggtctgggacagctgtggggccctagctggctcctccctctgccgcctgctccacagctccgagccgtgtccgaaccgctgtgctgtgcccacagttcctggcctggaacagcccacccctcacctccgagtttgtggcgctcctcccggccctggtggacgctggcacagccctggagatgctgcacgcgctgctggacctgccctgcttgacggcggtgctggacctgcagctcaggtgggcccctcaccctctgccagcgctgcgtctcccagccagctggttccacacactgggccccctcctcgctgctcctgacccctacaccggggaccctccttcttccccccccaacacctgaccagtcctcccctgcaaagccacctctaggacagggtgtgtctgtcacccttggccacttgccaagggcagcccctgcaccctggagtgcctcacccgtcttcacgcccaggcctggagcctcccatgccaagcccttcctggcacccgaggtgctgtgatattagggacacctgccgtgtgtctccctgacgggggtgcccttgagtgcaggggccgcatcccagcctggccttgggcgtctgtccacgcaggtcagcaccggctgcatccgagaggccactctgggacacctctctcagggcccccagctgcctggaggccttccgggacccgcagttccagggtcttttccaatacctgctgcgccccaaggccagtggcgccactgagaggtacggggccctagggccagggggccaccagtggctcagagagcccggccacagccactggggtggggctcactgctcagccctaggctgaggccagggtgctttgtgtcccacacaaggctgcgtccccgtcatcaccattatagaggccctgcttctgcaccacgggtctgccgggggcggggcctggtctcagctctctctgctgcccacatcaaccctcataagcttggaggttggccctgtgggtgctccattttgcagatggacaaaccgagcctgagcccaggaagcaggaggcctgggaccggccacaggcctcctgccctcagcccacgccagcctttgtcccgatggctttactgtcccgggtgtgctgacgccaggggtctccccaaacccaggggagcaggaggtcccgagaggcgatgagtgaggatgggagcgggctcagctgtgcgagagggagcagtggcgacgtggccccggcctgcagtcaccaggtcggggagcgggcagcactcacggccacactgtgtcctcaggttggcgccactccaccagctgctgcagcccatggccggctgtgcccgcgtggcccagtgtgcccaggccgtgcccacgctgctgcaggcattcttctcagcagtgacccaggtgagctcgctgcctggggccccccattcccacaggcctcacaactgaggggcaggccagagccagcactggggggccctcttgagctctgcagaaggctgctcccgccacacccaccatccacggtccctgtgagggtcagggaggcacatgccacagccccggcaggccccgtcccttgtcccatcccctttattccagcaggccccgttccccagtccccgtcccatccccttcatcccggcaggccacgtcccccaatccccgtcccatccccttcatcccggcaggtcctgtctcccatcccagcaggctccatccaactgccccagcaggccctgtcttccgtccccaggacagggcaagtgagtggcctgggctctggccacacagctggggccggagcagtttgtccccctgctgcccctgataattcagcatccccatctgaggccaaaataaaggctcccacaggctggtgccccccatctcccccattgctgcttcccacctcggggagctctacaagccagtgcaggagagcctgggaggtggggaggccggcagggggctgggcgttgcttgggcgcacccttggccaaacaagacgtgtgcctggccttgcagagcgggagttggcagaggagccgtggaacagaagcgacacctctgccgggggcacttgggccagcccagggcttccctccctgtgcccggatgctgccagctgagtctctgtgtccctgggtgttggggaaggcagtggacgaggagtctccagcccctcacctgccccccagccctcaccatggcttcacccccaaccttagggcctgcagtgggggtggggctgagcctgtttcccactcctgacccccaggtggctgacgggtccctgatcaaccagctggcgctgctgctcctgggcaggagcgactcgctctacccggccccagggtacgctgccggtgtgcacaggtaggtccctcctgcgctcctgccacagccctgggcgggtgcctcctggactcctccccctctcccctcccccctccccttcagtggcttcggcaccacccctagctgggccctcagcagcctcagaccctgccacccccacccacagccccacacccagccccaggcacttctctctgcttctcaagaacattcccgtccttctttctgccgagcctgtcctcttcagggttagctcaggtccctcttccccgtcttgtcccctggggtccttctctccaaaggcctgatgcatgcaggcccatcctggttccactctgagcctgggcctgaggccagcgctggtgccagccttctccccagtgagaacagtttctctgaggctggcagtcttctgtgttcctctatcggagggtgcagcatacacctaccactcagacgcttcccgggtttctccaggcccttggcctggatggggatggggtcataggtctgcacagagcaggcgtagacccggctttctgggcagtgtgctgagttctcagttcctggccctgtgtacgctgaaaccctccctggtggtggagctggcaagagacctgctggagttcctgggcagcgtgaatggtctctgcagcagggcgagcctcgtcaccagcgtggtaaggcgggcgctggcctcccacagccgctcctgacccaggaggcctgggtgggggctgaatctctgtccccgggcctaggtgtgggccatcggcgagtacctgtcggtgacctacgatcggaggtgcaccgtggagcagatcaacaagttcttcgaagccctggaggctctgctattcgaggtcacccagtgccgcccctctgctgccctgcccaggtgtcccccccaggtggtcaccgtgctgatgaccacgctgacgaagctggcctcccggagccaagatctgatccccaggtgcctggtcagggagggagcgaagccttctggctcctggggaagagaggtggcttctgaggtcttcccatccaggtgttgtgaaatggtcgcagcagcgcaggtcctgggtgggccctgctgagctaaagccactctgctgggcgcttcaggcctggcccctccacacagacccctgtcctgggaggggagcatctgcagctgacggagggaccttctttccccagggcctctttattgctgtcaaagatgaggaccctggctcacagtccagccaccagctccacgcacagcgaggagggcgcggaagccatccgtacccgggccacagagctgctgaccctgctgaagatgcctagcgtggcccagtttgtgctcacacccagcacggaggtgtgcagcccccgctatcaccgcgatgccaacacggccctgcccctggccctgcgcacggtcagccggctggtggagagggaggccggcctcatgccagggtgaagggacagtggccagggacttcggtgcagattaagagcctgggcagccagcttgctactgaggccaggctgataggagctcaggagggcgcgggagtcctgggagaggaggcaaggcccacggtgggcttggcaccctcacagacacgcggggctggcccccctgctcaccctctgggctttgtctccgagccttttgctcccaggcaacactgagctgagctgaggggtgccatggagcggctctgattggaggcttgaggccctgtggctgggtcgggtggaggctgctgggtctgtttcctagtcttttgtttttggacagttgatgggcaagaagagctgcagtaaaagtaaatctcctttaataagcgtctgtatgaagagtgcgcgatcagttccgttacctgccctgcaccctggggagaggaccagggatgggaacccctggcagctgctgccagtcctggaggctcagcccggcgtgccactgctgctacagaaaccaggtcatttgtgcacagcccggaaggcagcggcgcgagttcccgggtgtggtcaccgctctgggtggtgcgcttgtcaatgccccttttgatgcccttgaatagcctgaagatgaaggggaccgggggagggttgcaagcgccatggcctatgcaggctgcggcctctggccattcggagggaaggccccagggagccacctgagtggagctcagaacactggattcgcgcgaaggggaggtgtctgggcgtgcggccccagccccgccaccttcctgggccctgtggtcccaccctccggactaccaaggcacagctgtgtcgcacgttccgcccggtgcctgggacgggctcagccgccagggggcgccgccgccccgagagcctcacgccccgcccccaggctcaaactcttccccctccccactctggctccgcccccggtctcctcttttgctctggccccgcccacctcccctccggcctcggccccgcccccaatcccccatagctctgcgactaagaaaccacaggctgaaggcgactgcagggtcctgccccttgcccagcctcaggactatggagggggcgagtgacgcgcaaggaacggagcaggggacaccgtgcgggctcaggagctccccagatgcccgagccgaaccgcggggtcctcaccgccaggttccagcccaggaagcgctcgcctgccccacagcctgggccttgggtcgcgttccgagctccaggacggctggtgtcccccgcggcctgcgatgacagcccagggccgctgagccggggccgcaggaaaggctggcgctggcaggcgcttccgtcggcagcactgtgtttgtgtttccacgtggaaacagcagcgcacgtgtacaactgtgcataccaaggcgtgcgtgccagtgcgcgggtctcgggatcacttcccagtgcggtgcacgaccccgcctgcagcagtgggtgtgggggcgctgctgggctcatcccgaagctcagagagcgtggggctgcccctaggctcggaatgagtctcccactgagtccgcagctcccctcctgccctggggcggggcttccctgacctgaaggcgtcgggggtgtcctggctcccagctcccaggcactcgtggggccaccgcccaggccagctggtgctaagtccgcagcctgtgcagcagcgcccggcttaggactgggagtgtgacttgaagggccgtcccgctcatccaagggacaaggaggagctcatggccacagggcctcggagggcatgaccccagcccagggaggagcaaccttcaggtggcctccaggaggcagctgggaaaagggcaaagctcaccagctctcaactttttttttaaataaactgaaattttagaatagtttttcagatttacagaaaagatgataaaccttagaaacattatatgctaagtgaaagtgagaagtgacagcctgctggcagtcctcacagccctcgctcgctcttggcgcctcctctgcctgggctcccactttggcagcacttgaggagcccttcagcccgccactgcactgtgggagcccctttcagggctggccaaggccggagccggctccctcagcttgcggggaggtgtggagggagaggcgcggtgggaaccagggctgcacgcggtgcttgcgggccagcgcgagttccgggtgggcgtgggctctgtgggccccgcactcggagccgccggctagccccgccagcctgggcagtgaggggcttagcacctggaccagcagctgctgtgctcgatttctcactgggccttagctgccttcctgcggggcagggctggggacctgcagcccgccatgcctgagcctcccccctcccctccgtgggttcctgcgcagtccgagcctccccaacgagtgttgccacctgctcagggcacccagtcccatcgaccacccaagggctgaggagtgcctttggagcagggcacgggactggcaggcagctctacctgcagcccctgtgcaggatccactgggtgaaagccagctgggctcctgagtctggtggggacttggagaacctttatgtctagctaagggattgtaaataaaccaattggcactctgtatctagctcaaggtttgtaaacacaccaatcagcaccttgtgtctagctcagggtttgtgaatgcaccaatagacactctgtatctagctactctggtggggacttggaaaacctttttgtcaacactctgtatctagttaatctggtggggacatggagaacctttgtgtctagctcagggattgtaaacgcaccaatcagcaccctgtcaaaacagaccactcggctctaccagtcagcaggatgtgggtggggccagatgagaataaaagcaggctgcccgagccagcagtgacaacccactcgggtccccttccacaccgggatgctttgtttgttcgctctttgcaataaatcttgctgctgctc

SEQ ID NO: 10814 - DNA, 5743 bp, Homo sapiens
ggagctcctgggctgcagctcctggagtttccgaggttcgtgcgcgtctggtggcggcggcgtgatgttctcggcaggagcggagagtttgctccaccaggccagggagatccaggacgaggagctgaagaagttctgttcccggatctgtaaactgctgcaggcggaggacttggggccggacaccctcgactccctgcagaggctcttcctcatcatctcagccacgaagtacagccggaggctggagaagacatgcgtagacctgctgcaggccaccctcggcctgcctgcatgccccgagcagctccaggtgctttgcgccgccatcctgcgagagatgtccccctctgacagcctcagcctggcctgggaccacacgcagaacagccggcagctgagcctggtggcctccgttctcttggcccagggtgacagaaacgaggaggtcagagccgtgggccagggcgtgctacgagcgctggagagccggcagcctgagggacccagcctcagacacctcctccccgtcatggccaaggtcgtggtcctcagcccgggcaccctccaggaggaccaggccaccctgctcagcaagcggctggtcgactggctgcgctacgccagcctccagcaagggctcccacactccggcggcttcttctccacgcccagggcccggcagccgggccccgtcaccgaggtggacggggcggtagccacagacttcttcacggtgctctccagcggccaccgcttcacagacgaccagtggctgaacgtgcaggccttctctatgctgcgggcgtggctgctgcacagcggccccgagggcccgggcaccctggacacagatgacaggtcagagcaggagggctccactctgtcggtgatctccgccacctcctctgccggccgcctgctgccgccccgggagcggcttcgggaggtggccttcgagtactgccagcgcctcattgagcaaagtaaccgacgagccctgaggaagggggactccgacctgcagaaagcttgcctggtggaggccgtgctggtgctggacgtgctgtgccggcaggacccgtccttcctgtaccgaagtctctcctgcctgaaggccctgcacgggcgggtgcgcggggacccggcctctgtgcgggtgctgctgcccctcgcccacttcttcctgagccacggggaagcggctgcagtggactcggaagccgtctaccagcacctgttcaccaggatcccggtggagcagttccacagccccatgctggcctttgaattcatccagttctgcagggacaacctccacctgttcagcgggcacctcagcaccctcagattgagcttccccaacctctttaagttcctggcctggaacagcccacccctcacctccgagtttgtggcgctcctcccggccctggtggacgctggcacagccctggagatgctgcacgcgctgctggacctgccctgcttgacggcggtgctggacctgcagctcaggtcagcaccggctgcatccgagaggccactctgggacacctctctcagggcccccagctgcctggaggccttccgggacccgcagttccagggtcttttccaatacctgctgcgccccaaggccagtggcgccactgagaggttggcgccactccaccagctgctgcagcccatggccggctgtgcccgcgtggcccagtgtgcccaggccgtgcccacgctgctgcaggcattcttctcagcagtgacccaggtggctgacgggtccctgatcaaccagctggcgctgctgctcctgggcaggagcgactcgctctacccggccccagggtacgctgccggtgtgcacaggcctgatgcatgcaggcccatcctggttccactctgagcctgggcctgaggccagcgctggtgccagccttctccccagtgagaacagtttctctgaggctggcagtcttctgtgttcctctatcggagggtgcagcatacacctaccactcagacgcttcccgggtttctccaggcccttggcctggatggggatggggtcataggtctgcacagagcaggcgtagacccggctttctgggcagtgtgctgagttctcagttcctggccctgtgtacgctgaaaccctccctggtggtggagctggcaagagacctgctggagttcctgggcagcgtgaatggtctctgcagcagggcgagcctcgtcaccagcgtggtgtgggccatcggcgagtacctgtcggtgacctacgatcggaggtgcaccgtggagcagatcaacaagttcttcgaagccctggaggctctgctattcgaggtcacccagtgccgcccctctgctgccctgcccaggtgtcccccccaggtggtcaccgtgctgatgaccacgctgacgaagctggcctcccggagccaagatctgatccccagggcctctttattgctgtcaaagatgaggaccctggctcacagtccagccaccagctccacgcacagcgaggagggcgcggaagccatccgtacccgggccacagagctgctgaccctgctgaagatgcctagcgtggcccagtttgtgctcacacccagcacggaggtgtgcagcccccgctatcaccgcgatgccaacacggccctgcccctggccctgcgcacggtcagccggctggtggagagggaggccggcctcatgccagggtgaagggacagtggccagggacttcggtgcagattaagagcctgggcagccagcttgctactgaggccaggctgataggagctcaggagggcgcgggagtcctgggagaggaggcaaggcccacggtgggcttggcaccctcacagacacgcggggctggcccccctgctcaccctctgggctttgtctccgagccttttgctcccaggcaacactgagctgagctgaggggtgccatggagcggctctgattggaggcttgaggccctgtggctgggtcgggtggaggctgctgggtctgtttcctagtcttttgtttttggacagttgatgggcaagaagagctgcagtaaaagtaaatctcctttaataagcgtctgtatgaagagtgcgcgatcagttccgttacctgccctgcaccctggggagaggaccagggatgggaacccctggcagctgctgccagtcctggaggctcagcccggcgtgccactgctgctacagaaaccaggtcatttgtgcacagcccggaaggcagcggcgcgagttcccgggtgtggtcaccgctctgggtggtgcgcttgtcaatgccccttttgatgcccttgaatagcctgaagatgaaggggaccgggggagggttgcaagcgccatggcctatgcaggctgcggcctctggccattcggagggaaggccccagggagccacctgagtggagctcagaacactggattcgcgcgaaggggaggtgtctgggcgtgcggccccagccccgccaccttcctgggccctgtggtcccaccctccggactaccaaggcacagctgtgtcgcacgttccgcccggtgcctgggacgggctcagccgccagggggcgccgccgccccgagagcctcacgccccgcccccaggctcaaactcttccccctccccactctggctccgcccccggtctcctcttttgctctggccccgcccacctcccctccggcctcggccccgcccccaatcccccatagctctgcgactaagaaaccacaggctgaaggcgactgcagggtcctgccccttgcccagcctcaggactatggagggggcgagtgacgcgcaaggaacggagcaggggacaccgtgcgggctcaggagctccccagatgcccgagccgaaccgcggggtcctcaccgccaggttccagcccaggaagcgctcgcctgccccacagcctgggccttgggtcgcgttccgagctccaggacggctggtgtcccccgcggcctgcgatgacagcccagggccgctgagccggggccgcaggaaaggctggcgctggcaggcgcttccgtcggcagcactgtgtttgtgtttccacgtggaaacagcagcgcacgtgtacaactgtgcataccaaggcgtgcgtgccagtgcgcgggtctcgggatcacttcccagtgcggtgcacgaccccgcctgcagcagtgggtgtgggggcgctgctgggctcatcccgaagctcagagagcgtggggctgcccctaggctcggaatgagtctcccactgagtccgcagctcccctcctgccctggggcggggcttccctgacctgaaggcgtcgggggtgtcctggctcccagctcccaggcactcgtggggccaccgcccaggccagctggtgctaagtccgcagcctgtgcagcagcgcccggcttaggactgggagtgtgacttgaagggccgtcccgctcatccaagggacaaggaggagctcatggccacagggcctcggagggcatgaccccagcccagggaggagcaaccttcaggtggcctccaggaggcagctgggaaaagggcaaagctcaccagctctcaactttttttttaaataaactgaaattttagaatagtttttcagatttacagaaaagatgataaaccttagaaacattatatgctaagtgaaagtgagaagtgacagcctgctggcagtcctcacagccctcgctcgctcttggcgcctcctctgcctgggctcccactttggcagcacttgaggagcccttcagcccgccactgcactgtgggagcccctttcagggctggccaaggccggagccggctccctcagcttgcggggaggtgtggagggagaggcgcggtgggaaccagggctgcacgcggtgcttgcgggccagcgcgagttccgggtgggcgtgggctctgtgggccccgcactcggagccgccggctagccccgccagcctgggcagtgaggggcttagcacctggaccagcagctgctgtgctcgatttctcactgggccttagctgccttcctgcggggcagggctggggacctgcagcccgccatgcctgagcctcccccctcccctccgtgggttcctgcgcagtccgagcctccccaacgagtgttgccacctgctcagggcacccagtcccatcgaccacccaagggctgaggagtgcctttggagcagggcacgggactggcaggcagctctacctgcagcccctgtgcaggatccactgggtgaaagccagctgggctcctgagtctggtggggacttggagaacctttatgtctagctaagggattgtaaataaaccaattggcactctgtatctagctcaaggtttgtaaacacaccaatcagcaccttgtgtctagctcagggtttgtgaatgcaccaatagacactctgtatctagctactctggtggggacttggaaaacctttttgtcaacactctgtatctagttaatctggtggggacatggagaacctttgtgtctagctcagggattgtaaacgcaccaatcagcaccctgtcaaaacagaccactcggctctaccagtcagcaggatgtgggtggggccagatgagaataaaagcaggctgcccgagccagcagtgacaacccactcgggtccccttccacaccgggatgctttgtttgttcgctctttgcaataaatcttgctgctgctc

SEQ ID NO: 10815 - DNA, 18775 bp, Homo sapiens
gacgcggtcccggaagttgaccggggtgcggagctcctgggctgcagctcctggagtttccgaggttcgtgcgcgtctggtggcggcggcgtgatgttctcggcaggagcggagagtttgctccaccaggccaggtacgggggagctgcggccccggccctccttcctgcatctctccctaggggcacacgggggtgggtctcacagggcaggggcttgggcgccagccttgcaggaacccgactggactcgccctcgagacttggggatcgggtaaggcaacacggcggccaggcttggggtgaggaggtcggggagggtcatggtgggtccccggaggaggtgacacttgagcagagtcttggtgagtgaaagcaagtggggtgggacccagtcgacagtttagtcaaaggcttggcggtgagaactccgcgtctggcaggaaatcgggcagccgggagatttcagtgcctcacagtcaagaacgcaaagtcacagtgtccggaggcctgctaaggaataaggctgtgtgccaggctggggagctggaggccatccgagggctttgcggaaccgtgggagggttttgtgacttaaaaagatctctcttgcgcggatgtattagctaggctgagaaatcaccctccaggctggtttcaggctgtgtctggactcccagtaacgagtgagtagctccttcctcaccaactaaccagtcatgggggaaaacagtgtaagccaggactgaacagactcacggtccaccaaacaggcaaagacttcatactacatgtttaaaagaagaaaatgctgaccgggcgtggtggctcacgcctgtaatcccaccactttgggaggccaaggcaggcggatcacctgaggtcaggagttcgagaccagcgtgcccaacatgaggaaaccacgtctctactgaaaatacaaaaaaaaaaaaaaaaaaaaaaattagccgggcgtggtggtgggtgactgtaatcccagctactcgggaggctgaggcaggaggattgcttgaacctgtgaggtggaggttacagtgagctgagatggcgccactgcactccaggctgggggacagagcgaaactccgtctcaaaagaaaaaagaaaaaaagtaaagaaaatacagccagcactacagccccttggtaaacgtaaacaaacttggtgaggtgagaggccgaagcaggagaagtgcatgaacccaggaggccgagggtgcagtgagccaagatcgcaccactggactccagtctgggtgacagaacgagactccatgtcaaaacaaacaagcaaacctggactcagagctagaccaattggtgggaaagattcgggtggttgaaattgctgtgattatagtgagtgaggtcttgaaggcaggttaagttctaaagcccgaacaggacaaaaatctctgatcaaaataacccttaagagtccactcattaggaagaggcttggtgaatatgcagcaccatctcccagcagctcaacataggcaaccttcccttcaatcctggacagatatgtcattcatgtgaatgtggggactatatgaaaatgaaaaatactggcatctcagcatgtaacatgttaatcccaaggtccttgccaagagacaaggaaaaacacccactgagaacttcattcccagtcacattctgctcaaggtcataaacttgtgacatgaaaaacaaaaggaagagccctctttatttatttatttatttatttatttatttatttttattagagtctcttttgagacagagtctccctctgtcgcccaggctggagtacaatggcgcaatctcagttcactgcaacctccgcctcctgggttcaagcaattctcctgcctcagcctcccaagtagctgggattacaggcgcccgccaccacacccggctgattttttgtatctttagtagagatgggatttcaccacattgtccaggctggtctcgaattcctgacctcaggtgatccgcctgactcggcccctcgaagtgccgggattacaggtgtgagccaccatacccggctgagccctcactatttaaatacctgtttctctgcctccctggctcgggtgggcagccgtttttgaggatagagtgtggttgaatttccctatgtaacatacatgagttctgcagttgccctctgttagggtttcaagaaggttaatctattagggcttaccagttttcacaatattcttaagcctgtgatttctgatgatattttaaaataaatgactgtagtttgagggttaaggtttggagccggccaggcgcagtgactggcccacgcctgtaatccgaacacttcgggaggccgagttaggaggatcgcttgaggctaggactttgagaccagcctggacaacatagcgagacccgtctctacaaaacagaatttttaaaaaacttagccaggtgtggtggcacgtacccatagtcacagctactcaggaggctgaggcaggaggatcacttgagccaaggaggttgaggctgcggtaagctatgatggtgccactgcactccagctcgggtgacagagggagaccctgtctccaaagaaagccaaaaagatttggagtgaactttagtttctctctaaatgtgtcagagatacggaaagcaagggtgcaaaaagtgatcaaagatagcgctgcaagctgaaggataaatggagagagcgggaagcgagtaaaggatgggggcatggaggggtgccccgcaaggtcggggatttccaggaggaagagcctcagcccactagctcgggagctagtggggcatgtatcaggcacagggtctgtgcgaagggacagaagcaaaagaaacaggacatggagtctggagaaggaaggcggggccgggctcttggaggcagcgttggggtctgtaggagtttggatttgaaagcagtggggagctgttgaagggtttgggtgggttggattttagagagaagcttgagacttggagaatatgctgaagggaatttaatcgggatgaggggttccacctttctgggaaagattttccattgtgtgtatatatgtatatgtgtgtatatataatttatatataacattttatatattatatattacatatatatttagtaatatataatataattatatgttatatattatatgttatattatatatcattatatataatatataatgatatataatattttatatataatcaaaaaaagaataaaaaaaattcactgggcttagtgtagtcccagctacttgaaaggctgaggtgggagaactgcttgagctagaagatcaggctgcagtgagctgagattatgccactgcactccagcctgggtgacagcataagactctatctcaaaaaatatatatatagatagatagatagatataaaaatatatttttatatgtaatatatataaaatatatattatatacatttttgagatagagcatattatatattatatataacatatataacaactatataacatatataacataacatatataacaacataatatatagcatatattatgtataacatatattagatataacatatataacattagaaataatgtatataacataacataacgtatataacgcatataacaacatatataacgtatataacataacacgttatatatgatatataacatataacatgttatatatcataacgtgttatatgtcatataacatgattattatatatcatatataacatgataacatatatatcatatataacatatataacattatatataacatatatattatattatatatatatatttttttttgaagtagagtcttactctgtcacccaggctggagtgcagtggcacaatctcagctcactgcagcctgatcttccagctcaagcagttctcccacctcagcctttcaagtggctgggactacaccatgcccagtgaattttttttatttttatttttttttgtttttgagacggagttttgctctcgttgcccaagctggggtgcaatggcatgatctcagctcactgcaacctcctcctcccgggttcaagtgattctcctgcctcagcctcctgagtagctgggattacaggcttgtgccaccacgcccagctatttttttttgtatttttagtagaaacggggtttctccatgttagccagctggtcttgaactcctgacctcaggtgatcagcccgcctcggcctcccaaaatgctaggattacaggtgtgagccaccgtgcgtggccgaattttttttattcttttgtagagatggggtctcactgttttgcccaggatggtctcagacatctgcactcaactcatcctcccacctcagcgtcccaaagtgctgggattacaggtggcctggggagggcacagccacgtagggggcccttctcagggagtccccagagtcccctggcacagcaacccctttgcgcattattggttctttcttttagactgggatagaaacctaaaaacaggcttccatttgggacttttcagtatcttacctgtggcttactagggagattttaaaattaagccaattagttattcgagtaaaaaaacataatgggcttaccttacaatatgtcatgacatttgttctttaatatataagattttattctcaggccaggcgtggtggctcacgcttgtcatcccagcactttgggaggccgaggtgggcagatcatgaggtcaggagttttgagaccagcctggccaacatggtgaaaccccgtctctactaaaaatgcaaaaattagccgggcgtaggccaggcgcggtggctcacgcctgtaatcccagcactttgggaggccgaggtgggcagatcacgatgtcaggagatcaagaccatcctggccaacatggtgaaaccctgtctttactaaaaaatacaaaaaaattagccgggcgtggtggtgggtgcctgtaatcccatctactcggaagactgaggcaggagaattgcttgaaccccggaggcgaaggttgcagtgagccgagatcatgacactatattccagcccgggtgacagagcaagactccatctcggggaaaaaaaaaatttattcttgtttccataagcaaaaggctcattgaagacatcttttgaaaggcaccttattctagagtaaatttcctactcttgaatgagacccctaaaaagaatcggttttagtccttctgccctgggaacaagaaaatctaagtgcatggggcctccgtgagtgagattcgtcatagtgcgctgcagcgatggatcgggaaatcccagggtgagaggaaccagctcagggaatcagcgaatttatctcgagagccatgagccgtggaaccgtgttcctccacacactcggcttctcttttctaaagagggattttccctgctccaagggttatcctttttttggttccgagcagcgagtgcttctgggtcctgaagtcctcttctttgtttagggagatccaggacgaggagctgaagaagttctgttcccggatctgtaaactgctgcaggcggaggacttggggccggacaccctcgactccctgcagaggctcttcctcatcatctcagccacgaagtacagccggaggtgagtgtggcgacggctcaggccggctcctcacacagcggccccaggagaacccagcccacgcccagcaggtcactgcagatgctccttgggggttgagtcatttgtccacttaaaccagtgctgaaggtccatcctcatgtaaaatgctctgtccactggcccaagggtgcccggccaggtgctctggggcaccgggtgctcctgccacggtcgtgacgtgttaccgcccaccacgggcatctcgccttccaggctggagaagacatgcgtagacctgctgcaggccaccctcggcctgcctgcatgccccgagcagctccaggtgctttgcgccgccatcctgcgagagatgtccccctctgacagcctcagcctggcctgggaccacacgcagaacagccggcagctgagcctggtggcctccgttctcttggcccaggtagcgcagcagtcaccaccccagttggcaccggatggctgcttcccaaggaacaggggagacaggaagcaggggcgccagagccggcaggtggctgcttgttgtagacgcatctcggtgctgagtgcctggcacacttgaggctggggcatgccctgttgactggaacggggtcccatgcccagcaggcccacgtggtatgttggtgctcaggagaggtggtggagtttggtttctcagacagagccttgagacagcgagtcagtggaggctgggcctccagaccttctttttggggtttttgttttgttttttagaaacagggtctcactctgctgtccagtgtagagtgccatggagtgatcaatgctcactgcagcctcgacctccctggctcaagcaatcctcccatctcagcctcctgagtagctgggattacaggcatgcatcaccacacccagttaatgtttgtatttttttgtagggacctggggtctcactatgttgcccaggctggtctcaaacttctgggctcaagcaatccaccctccttggccaggagtttttgccaagtccatgtcctccctccctctgtgtcgggagcaggcctgggcactcagcgtggggatccaggggttcacaggctgcctttgtgtgagagaagctgctatctctgctcatgggttgcccaggggtgcagagtctgcaggaaggttgcgatggagctgggcttttccctccgttcccagcctgcagcgtcatgagttgcctcctgtgctggggtgcagcctgcggttgctttagttctgtgtgggcgagagcttgtgggccccggcgtactcagggcgttgtacttcatcactggggtcatcctggttggtgcccagccccctcacctcacagacctcctgcaggccacctccaggcctccgagatgaccccggtaatgctgtggtagctcctggcctttggaacaagatgactccggctcttcttgtttgtttcacccgcccttctcctcaagcaactcatttttttcagtggaagatgatcttgcagaactgctgccaggcgccagcggtgcaccccccgcccggcacgtggcctcccagccacccagccgccctcctccctgccctgacggccctgcccctgtgctgggtgtctctggtgctgctcagatgtttcagcacctgggtgtgcagagtgaggtgggtggtttaaagactgggatccacactggaggccccgcaggacggggtgtcctgtgtctgcggccagggccatggtggccgccagtgtgtttttagcattgaatcagccgtgccctcacccaggccccctccagcctcagcgatgcagctcccagggagagaggctggaggcggagcaggcaccttgtggcccggggtgggcctgcgcgggacatcctccctgccacctgctaggccggggtctcagcgaccgacgcttctcaggagtgtcacacagacttccgaaatgggggagctggtctctggcacaggccagtaccccagcgtttgccctgtttgatttgaagggtgacagaaacgaggaggtcagagccgtgggccagggcgtgctacgagcgctggagagccggcagcctgagggacccagcctcagacacctcctccccgtcatggccaaggtcgtggtcctcagcccgggcaccctccaggagggtacgcggggcccctcccaagaggctgttgggggtctgccttcccaggtccttccctgagggcccatggtgggttgggagtgtggggggcaggtgggggacacggggaggcccgagggtttgggacgctgcaggattctgttttctgagaaaagtcggccagcatcccaacaacccaggcatctgtaggattcaacctcacctccccatgccaccccacccactgcagaccaggccaccctgctcagcaagcggctggtcgactggctgcgctacgccagcctccagcaagggctcccacactccggcggcttcttctccacgcccagggcccggcaggtgaggctgggactgttctggaaccatggggaacagagtcacagacaacccctccctgagagctcctgtgcccacagcggcgaggcctgctgtcgttccgcggggtccaggacgagcctgcctctgctgcggggcttgggtcaggcagggccacagccccctgacccgtgtggctctgggggtctgtgcgcgggttcagtcccagggcctgcggagcagggtgtgcgacgcgcgtctgcctgggggtcaggtggggatggtgtttttgcatcacacagggcgggccgctgcccgggctcatgttcaggcagcttctcctccacctcctgaggagcttgtgctaaaggctggcgtttttcccggcctcggccccctccgcccactcctgcctgtccttcccacagccgggccccgtcaccgaggtggacggggcggtagccacagacttcttcacggtgctctccagcggccaccgcttcacagacgaccagtggctgaacgtgcaggccttctctatgctgcgggcgtggctgctgcacagcggccccgagggcccgggcaccctggacacaggtgtgcggggtggggggatgacgtcagacaggggtgggaggtgggcgcactatgggttggtcgcagggggacacgggcggaggtggggggactcgggtgtgcccaggatgcagcagaggtcaggactgagcaacgcagcctgctgacctggagctaggcggagagcactccctggccagcatctttggggtccagggtcagcaccggggatcctctggacaccccgtgaccctcatgcaatgtgcagatgtgagagctcccacttaaggcaggcacccttaaggttgttggagtgacgccactgagctcctcccggctgctctgtggacttgttggggaagaagcctcagccaccctgaagggcggccgtgatggggaagctgccgggtgggtggacgtcctgagacggtgacgcctcacgcctcccgggaggggctgcggcctgtgctctcctcctgcccttccaagcagggcagcaggcatgtcccagcccgggagccacacgtcagcctgctgagagttcccacctcccgcagatgacaggtcagagcaggagggctccactctgtcggtgatctccgccacctcctctgccggccgcctgctgccgccccgggagcggcttcgggaggtggccttcgagtactgccagcgcctcattgagcaaagtaaccgacgtgagtcccccacccagggcactggcctccccagggctcgacgcacctgctctgcaaggccacctgaggccagcacagcttccctgagctactgctccacagagggggtccctgggtagccggtttggagcaggggcatttttgcttctggggtcagccccaagtgttcttcaggctccaccccagcccccagcccggccctgtcccacctgggcccctcgcctcagtcccactcaagtcctcctgggggcctgtcccacccccctgctcccggtcctgcctggagcttccagagcacaagctgccccctcattgggccactctaaggctgagacagagccggctgactttttcccctccttccaggagccctgaggaagggggactccgacctgcagaaagctgtaagtggctggggaccaggggatgggaggcagcgactcggcccatttgatgtggtccatgtcccgcagtgcctggtggaggccgtgctggtgctggacgtgctgtgccggcaggacccgtccttcctgtaccgaagtctctcctgcctgaaggccctgcacgggcgggtgcgcggggacccggcctctgtgcgggtgctgctgcccctcgcccacttcttcctgagccacggtgagcccagggtggggtggcgctgactcggggctctgcttctgcctttagttttaggatggaatttcttcttcccttttttttttttttttttttgattgaatagagacaggggtcttgctgtgttgcccaggctggtctggaactcgtggcctcaagcgatcctcctgccttggcctcccaaagtgctgggattacgggcatgagccaccgtgcccagctcatatttctttttgatggattgctgtgccagatgttggtaatttttaaacttttaaatagagaaataaacagactctttttgctgtgtccctagcccaggaaacctgaaagtctaggaaccagcaccttccaaagaatgtgccatagtgtgtgtgactcacgagctgtccgtgtccctgggcgagggagaccaagtgccgcttccccagcgtcccagcgtaggacgcctcggagcccttggtgtcctggagagcaggcctgagactcagggcccctaaccagtcacagaagcacggccagggcgaggtcaagacgtgtgccctggcgggccctggtcttgcaggggaagcggctgcagtggactcggaagccgtctaccagcacctgttcaccaggatcccggtggagcagttccacagccccatgctggcctttgaattcatccagttctgcagggacaacctccacctgttcagcgggcacctcagcaccctcagattgagcttccccaacctctttaaggtatatttgggcatccctgggtgccagggcaggggcatggtaagtccctggggctcctcccctctttccagcggggttcagggcgagtcctggctgagcatagagccctgtgagtcccgggcctggaatgcggtgtgcagggtgaggtggggatctggggtgtccctgcagcgtcacgtgattgacggtgctgtccaagaactcccttgtgggtgttttggagagggggctgtgacacaagacggtgagtttgttctcacagcactggggcagggctgctgcctggtaggatccctcccccgggagccctgcctggtgccttgggcacttgggtgccatttgccttttttttttcttttgagatggagtctcattcctgtcacctaggctggagtgcagtggcgcaatctcagctcactgcaacccccgcctcctgggttcaagcgattctcctgcgtcagccacctgagtagttgagattacaggcacccaccaccatgtccagctaatttttggtatttttagtagagatggggtttcgacatgttggccaggctggtctcgaactcctgacctcagatgatcctcctgccttgacctcccaaagtgctgggattacaggcatgagccaccgcacccggcctggtgccatttgcttttgaagtgtcttttgcagcctcgcctcgctgtaaggtcttttcaactgaggtggggaatcctctttctggagaaaaaccaggacagtggaaaattattgacctgttggtacgaaagtagatacaggctgggggcagtggctcacacctgtaatcccagcacctcgggaggccaaggcaggaggatcttgaggccaggagttcaagaccagcctgggcaacacagggagacctcttgtctacaaaaagtaaacagcctcacatggtggtgtgtgcctgtagtctcagctgctcaggaggctgaggtgggaggatcacttgagcctgggaggttgaggttgcagtgagctatgattgcaccactgcactccagcctgggcgacagagcaagaccctgtctcaaaaaaataaaaagcgggaggaggcaaaggtagaagccctcctggggactgcaggtctgggacagctgtggggccctagctggctcctccctctgccgcctgctccacagctccgagccgtgtccgaaccgctgtgctgtgcccacagttcctggcctggaacagcccacccctcacctccgagtttgtggcgctcctcccggccctggtggacgctggcacagccctggagatgctgcacgcgctgctggacctgccctgcttgacggcggtgctggacctgcagctcaggtgggcccctcaccctctgccagcgctgcgtctcccagccagctggttccacacactgggccccctcctcgctgctcctgacccctacaccggggaccctccttcttccccccccaacacctgaccagtcctcccctgcaaagccacctctaggacagggtgtgtctgtcacccttggccacttgccaagggcagcccctgcaccctggagtgcctcacccgtcttcacgcccaggcctggagcctcccatgccaagcccttcctggcacccgaggtgctgtgatattagggacacctgccgtgtgtctccctgacgggggtgcccttgagtgcaggggccgcatcccagcctggccttgggcgtctgtccacgcaggtcagcaccggctgcatccgagaggccactctgggacacctctctcagggcccccagctgcctggaggccttccgggacccgcagttccagggtcttttccaatacctgctgcgccccaaggccagtggcgccactgagaggtacggggccctagggccagggggccaccagtggctcagagagcccggccacagccactggggtggggctcactgctcagccctaggctgaggccagggtgctttgtgtcccacacaaggctgcgtccccgtcatcaccattatagaggccctgcttctgcaccacgggtctgccgggggcggggcctggtctcagctctctctgctgcccacatcaaccctcataagcttggaggttggccctgtgggtgctccattttgcagatggacaaaccgagcctgagcccaggaagcaggaggcctgggaccggccacaggcctcctgccctcagcccacgccagcctttgtcccgatggctttactgtcccgggtgtgctgacgccaggggtctccccaaacccaggggagcaggaggtcccgagaggcgatgagtgaggatgggagcgggctcagctgtgcgagagggagcagtggcgacgtggccccggcctgcagtcaccaggtcggggagcgggcagcactcacggccacactgtgtcctcaggttggcgccactccaccagctgctgcagcccatggccggctgtgcccgcgtggcccagtgtgcccaggccgtgcccacgctgctgcaggcattcttctcagcagtgacccaggtgagctcgctgcctggggccccccattcccacaggcctcacaactgaggggcaggccagagccagcactggggggccctcttgagctctgcagaaggctgctcccgccacacccaccatccacggtccctgtgagggtcagggaggcacatgccacagccccggcaggccccgtcccttgtcccatcccctttattccagcaggccccgttccccagtccccgtcccatccccttcatcccggcaggccacgtcccccaatccccgtcccatccccttcatcccggcaggtcctgtctcccatcccagcaggctccatccaactgccccagcaggccctgtcttccgtccccaggacagggcaagtgagtggcctgggctctggccacacagctggggccggagcagtttgtccccctgctgcccctgataattcagcatccccatctgaggccaaaataaaggctcccacaggctggtgccccccatctcccccattgctgcttcccacctcggggagctctacaagccagtgcaggagagcctgggaggtggggaggccggcagggggctgggcgttgcttgggcgcacccttggccaaacaagacgtgtgcctggccttgcagagcgggagttggcagaggagccgtggaacagaagcgacacctctgccgggggcacttgggccagcccagggcttccctccctgtgcccggatgctgccagctgagtctctgtgtccctgggtgttggggaaggcagtggacgaggagtctccagcccctcacctgccccccagccctcaccatggcttcacccccaaccttagggcctgcagtgggggtggggctgagcctgtttcccactcctgacccccaggtggctgacgggtccctgatcaaccagctggcgctgctgctcctgggcaggagcgactcgctctacccggccccagggtacgctgccggtgtgcacaggtaggtccctcctgcgctcctgccacagccctgggcgggtgcctcctggactcctccccctctcccctcccccctccccttcagtggcttcggcaccacccctagctgggccctcagcagcctcagaccctgccacccccacccacagccccacacccagccccaggcacttctctctgcttctcaagaacattcccgtccttctttctgccgagcctgtcctcttcagggttagctcaggtccctcttccccgtcttgtcccctggggtccttctctccaaaggcctgatgcatgcaggcccatcctggttccactctgagcctgggcctgaggccagcgctggtgccagccttctccccagtgagaacagtttctctgaggctggcagtcttctgtgttcctctatcggagggtgcagcatacacctaccactcagacgcttcccgggtttctccaggcccttggcctggatggggatggggtcataggtctgcacagagcaggcgtagacccggctttctgggcagtgtgctgagttctcagttcctggccctgtgtacgctgaaaccctccctggtggtggagctggcaagagacctgctggagttcctgggcagcgtgaatggtctctgcagcagggcgagcctcgtcaccagcgtggtaaggcgggcgctggcctcccacagccgctcctgacccaggaggcctgggtgggggctgaatctctgtccccgggcctaggtgtgggccatcggcgagtacctgtcggtgacctacgatcggaggtgcaccgtggagcagatcaacaagttcttcgaagccctggaggctctgctattcgaggtcacccagtgccgcccctctgctgccctgcccaggtgtcccccccaggtggtcaccgtgctgatgaccacgctgacgaagctggcctcccggagccaagatctgatccccaggtgcctggtcagggagggagcgaagccttctggctcctggggaagagaggtggcttctgaggtcttcccatccaggtgttgtgaaatggtcgcagcagcgcaggtcctgggtgggccctgctgagctaaagccactctgctgggcgcttcaggcctggcccctccacacagacccctgtcctgggaggggagcatctgcagctgacggagggaccttctttccccagggcctctttattgctgtcaaagatgaggaccctggctcacagtccagccaccagctccacgcacagcgaggagggcgcggaagccatccgtacccgggccacagagctgctgaccctgctgaagatgcctagcgtggcccagtttgtgctcacacccagcacggaggtgtgcagcccccgctatcaccgcgatgccaacacggccctgcccctggccctgcgcacggtcagccggctggtggagagggaggccggcctcatgccagggtgaagggacagtggccagggacttcggtgcagattaagagcctgggcagccagcttgctactgaggccaggctgataggagctcaggagggcgcgggagtcctgggagaggaggcaaggcccacggtgggcttggcaccctcacagacacgcggggctggcccccctgctcaccctctgggctttgtctccgagccttttgctcccaggcaacactgagctgagctgaggggtgccatggagcggctctgattggaggcttgaggccctgtggctgggtcgggtggaggctgctgggtctgtttcctagtcttttgtttttggacagttgatgggcaagaagagctgcagtaaaagtaaatctcctttaataagcgtctgtatgaagagtgcgcgatcagttccgttacctgccctgcaccctggggagaggaccagggatgggaacccctggcagctgctgccagtcctggaggctcagcccggcgtgccactgctgctacagaaaccaggtcatttgtgcacagcccggaaggcagcggcgcgagttcccgggtgtggtcaccgctctgggtggtgcgcttgtcaatgccccttttgatgcccttgaatagcctgaagatgaaggggaccgggggagggttgcaagcgccatggcctatgcaggctgcggcctctggccattcggagggaaggccccagggagccacctgagtggagctcagaacactggattcgcgcgaaggggaggtgtctgggcgtgcggccccagccccgccaccttcctgggccctgtggtcccaccctccggactaccaaggcacagctgtgtcgcacgttccgcccggtgcctgggacgggctcagccgccagggggcgccgccgccccgagagcctcacgccccgcccccaggctcaaactcttccccctccccactctggctccgcccccggtctcctcttttgctctggccccgcccacctcccctccggcctcggccccgcccccaatcccccatagctctgcgactaagaaaccacaggctgaaggcgactgcagggtcctgccccttgcccagcctcaggactatggagggggcgagtgacgcgcaaggaacggagcaggggacaccgtgcgggctcaggagctccccagatgcccgagccgaaccgcggggtcctcaccgccaggttccagcccaggaagcgctcgcctgccccacagcctgggccttgggtcgcgttccgagctccaggacggctggtgtcccccgcggcctgcgatgacagcccagggccgctgagccggggccgcaggaaaggctggcgctggcaggcgcttccgtcggcagcactgtgtttgtgtttccacgtggaaacagcagcgcacgtgtacaactgtgcataccaaggcgtgcgtgccagtgcgcgggtctcgggatcacttcccagtgcggtgcacgaccccgcctgcagcagtgggtgtgggggcgctgctgggctcatcccgaagctcagagagcgtggggctgcccctaggctcggaatgagtctcccactgagtccgcagctcccctcctgccctggggcggggcttccctgacctgaaggcgtcgggggtgtcctggctcccagctcccaggcactcgtggggccaccgcccaggccagctggtgctaagtccgcagcctgtgcagcagcgcccggcttaggactgggagtgtgacttgaagggccgtcccgctcatccaagggacaaggaggagctcatggccacagggcctcggagggcatgaccccagcccagggaggagcaaccttcaggtggcctccaggaggcagctgggaaaagggcaaagctcaccagctctcaactttttttttaaataaactgaaattttagaatagtttttcagatttacagaaaagatgataaaccttagaaacattatatgctaagtgaaagtgagaagtgacagcctgctggcagtcctcacagccctcgctcgctcttggcgcctcctctgcctgggctcccactttggcagcacttgaggagcccttcagcccgccactgcactgtgggagcccctttcagggctggccaaggccggagccggctccctcagcttgcggggaggtgtggagggagaggcgcggtgggaaccagggctgcacgcggtgcttgcgggccagcgcgagttccgggtgggcgtgggctctgtgggccccgcactcggagccgccggctagccccgccagcctgggcagtgaggggcttagcacctggaccagcagctgctgtgctcgatttctcactgggccttagctgccttcctgcggggcagggctggggacctgcagcccgccatgcctgagcctcccccctcccctccgtgggttcctgcgcagtccgagcctccccaacgagtgttgccacctgctcagggcacccagtcccatcgaccacccaagggctgaggagtgcctttggagcagggcacgggactggcaggcagctctacctgcagcccctgtgcaggatccactgggtgaaagccagctgggctcctgagtctggtggggacttggagaacctttatgtctagctaagggattgtaaataaaccaattggcactctgtatctagctcaaggtttgtaaacacaccaatcagcaccttgtgtctagctcagggtttgtgaatgcaccaatagacactctgtatctagctactctggtggggacttggaaaacctttttgtcaacactctgtatctagttaatctggtggggacatggagaacctttgtgtctagctcagggattgtaaacgcaccaatcagcaccctgtcaaaacagaccactcggctctaccagtcagcaggatgtgggtggggccagatgagaataaaagcaggctgcccgagccagcagtgacaacccactcgggtccccttccacaccgggatgctttgtttgttcgctctttgcaataaatcttgctgctgctcac

SEQ ID NO: 10816 - DNA, 5529 bp, Homo sapiens
gacgcggtcccggaagttgaccggggtgcggagctcctgggctgcagctcctggagtttccgaggttcgtgcgcgtctggtggcggcggcgtgatgttctcggcaggagcggagagtttgctccaccaggccagggagatccaggacgaggagctgaagaagttctgttcccggatctgtaaactgctgcaggcggaggacttggggccggacaccctcgactccctgcagaggctcttcctcatcatctcagccacgaagtacagccggaggctggagaagacatgcgtagacctgctgcaggccaccctcggcctgcctgcatgccccgagcagctccaggtgctttgcgccgccatcctgcgagagatgtccccctctgacagcctcagcctggcctgggaccacacgcagaacagccggcagctgagcctggtggcctccgttctcttggcccagggtgacagaaacgaggaggtcagagccgtgggccagggcgtgctacgagcgctggagagccggcagcctgagggacccagcctcagacacctcctccccgtcatggccaaggtcgtggtcctcagcccgggcaccctccaggaggaccaggccaccctgctcagcaagcggctggtcgactggctgcgctacgccagcctccagcaagggctcccacactccggcggcttcttctccacgcccagggcccggcagccgggccccgtcaccgaggtggacggggcggtagccacagacttcttcacggtgctctccagcggccaccgcttcacagacgaccagtggctgaacgtgcaggccttctctatgctgcgggcgtggctgctgcacagcggccccgagggcccgggcaccctggacacagatgacaggtcagagcaggagggctccactctgtcggtgatctccgccacctcctctgccggccgcctgctgccgccccgggagcggcttcgggaggtggccttcgagtactgccagcgcctcattgagcaaagtaaccgacgagccctgaggaagggggactccgacctgcagaaagcttgcctggtggaggccgtgctggtgctggacgtgctgtgccggcaggacccgtccttcctgtaccgaagtctctcctgcctgaaggccctgcacgggcgggtgcgcggggacccggcctctgtgcgggtgctgctgcccctcgcccacttcttcctgagccacggggaagcggctgcagtggactcggaagccgtctaccagcacctgttcaccaggatcccggtggagcagttccacagccccatgctggcctttgaattcatccagttctgcagggacaacctccacctgttcagcgggcacctcagcaccctcagattgagcttccccaacctctttaagttcctggcctggaacagcccacccctcacctccgagtttgtggcgctcctcccggccctggtggacgctggcacagccctggagatgctgcacgcgctgctggacctgccctgcttgacggcggtgctggacctgcagctcaggtcagcaccggctgcatccgagaggccactctgggacacctctctcagggcccccagctgcctggaggccttccgggacccgcagttccagggtcttttccaatacctgctgcgccccaaggccagtggcgccactgagaggttggcgccactccaccagctgctgcagcccatggccggctgtgcccgcgtggcccagtgtgcccaggccgtgcccacgctgctgcaggcattcttctcagcagtgacccaggtggctgacgggtccctgatcaaccagctggcgctgctgctcctgggcaggagcgactcgctctacccggccccagggtacgctgccggtgtgcacagtgtgctgagttctcagttcctggccctgtgtacgctgaaaccctccctggtggtggagctggcaagagacctgctggagttcctgggcagcgtgaatggtctctgcagcagggcgagcctcgtcaccagcgtggtgtgggccatcggcgagtacctgtcggtgacctacgatcggaggtgcaccgtggagcagatcaacaagttcttcgaagccctggaggctctgctattcgaggtcacccagtgccgcccctctgctgccctgcccaggtgtcccccccaggtggtcaccgtgctgatgaccacgctgacgaagctggcctcccggagccaagatctgatccccagggcctctttattgctgtcaaagatgaggaccctggctcacagtccagccaccagctccacgcacagcgaggagggcgcggaagccatccgtacccgggccacagagctgctgaccctgctgaagatgcctagcgtggcccagtttgtgctcacacccagcacggaggtgtgcagcccccgctatcaccgcgatgccaacacggccctgcccctggccctgcgcacggtcagccggctggtggagagggaggccggcctcatgccagggtgaagggacagtggccagggacttcggtgcagattaagagcctgggcagccagcttgctactgaggccaggctgataggagctcaggagggcgcgggagtcctgggagaggaggcaaggcccacggtgggcttggcaccctcacagacacgcggggctggcccccctgctcaccctctgggctttgtctccgagccttttgctcccaggcaacactgagctgagctgaggggtgccatggagcggctctgattggaggcttgaggccctgtggctgggtcgggtggaggctgctgggtctgtttcctagtcttttgtttttggacagttgatgggcaagaagagctgcagtaaaagtaaatctcctttaataagcgtctgtatgaagagtgcgcgatcagttccgttacctgccctgcaccctggggagaggaccagggatgggaacccctggcagctgctgccagtcctggaggctcagcccggcgtgccactgctgctacagaaaccaggtcatttgtgcacagcccggaaggcagcggcgcgagttcccgggtgtggtcaccgctctgggtggtgcgcttgtcaatgccccttttgatgcccttgaatagcctgaagatgaaggggaccgggggagggttgcaagcgccatggcctatgcaggctgcggcctctggccattcggagggaaggccccagggagccacctgagtggagctcagaacactggattcgcgcgaaggggaggtgtctgggcgtgcggccccagccccgccaccttcctgggccctgtggtcccaccctccggactaccaaggcacagctgtgtcgcacgttccgcccggtgcctgggacgggctcagccgccagggggcgccgccgccccgagagcctcacgccccgcccccaggctcaaactcttccccctccccactctggctccgcccccggtctcctcttttgctctggccccgcccacctcccctccggcctcggccccgcccccaatcccccatagctctgcgactaagaaaccacaggctgaaggcgactgcagggtcctgccccttgcccagcctcaggactatggagggggcgagtgacgcgcaaggaacggagcaggggacaccgtgcgggctcaggagctccccagatgcccgagccgaaccgcggggtcctcaccgccaggttccagcccaggaagcgctcgcctgccccacagcctgggccttgggtcgcgttccgagctccaggacggctggtgtcccccgcggcctgcgatgacagcccagggccgctgagccggggccgcaggaaaggctggcgctggcaggcgcttccgtcggcagcactgtgtttgtgtttccacgtggaaacagcagcgcacgtgtacaactgtgcataccaaggcgtgcgtgccagtgcgcgggtctcgggatcacttcccagtgcggtgcacgaccccgcctgcagcagtgggtgtgggggcgctgctgggctcatcccgaagctcagagagcgtggggctgcccctaggctcggaatgagtctcccactgagtccgcagctcccctcctgccctggggcggggcttccctgacctgaaggcgtcgggggtgtcctggctcccagctcccaggcactcgtggggccaccgcccaggccagctggtgctaagtccgcagcctgtgcagcagcgcccggcttaggactgggagtgtgacttgaagggccgtcccgctcatccaagggacaaggaggagctcatggccacagggcctcggagggcatgaccccagcccagggaggagcaaccttcaggtggcctccaggaggcagctgggaaaagggcaaagctcaccagctctcaactttttttttaaataaactgaaattttagaatagtttttcagatttacagaaaagatgataaaccttagaaacattatatgctaagtgaaagtgagaagtgacagcctgctggcagtcctcacagccctcgctcgctcttggcgcctcctctgcctgggctcccactttggcagcacttgaggagcccttcagcccgccactgcactgtgggagcccctttcagggctggccaaggccggagccggctccctcagcttgcggggaggtgtggagggagaggcgcggtgggaaccagggctgcacgcggtgcttgcgggccagcgcgagttccgggtgggcgtgggctctgtgggccccgcactcggagccgccggctagccccgccagcctgggcagtgaggggcttagcacctggaccagcagctgctgtgctcgatttctcactgggccttagctgccttcctgcggggcagggctggggacctgcagcccgccatgcctgagcctcccccctcccctccgtgggttcctgcgcagtccgagcctccccaacgagtgttgccacctgctcagggcacccagtcccatcgaccacccaagggctgaggagtgcctttggagcagggcacgggactggcaggcagctctacctgcagcccctgtgcaggatccactgggtgaaagccagctgggctcctgagtctggtggggacttggagaacctttatgtctagctaagggattgtaaataaaccaattggcactctgtatctagctcaaggtttgtaaacacaccaatcagcaccttgtgtctagctcagggtttgtgaatgcaccaatagacactctgtatctagctactctggtggggacttggaaaacctttttgtcaacactctgtatctagttaatctggtggggacatggagaacctttgtgtctagctcagggattgtaaacgcaccaatcagcaccctgtcaaaacagaccactcggctctaccagtcagcaggatgtgggtggggccagatgagaataaaagcaggctgcccgagccagcagtgacaacccactcgggtccccttccacaccgggatgctttgtttgttcgctctttgcaataaatcttgctgctgctcac

SEQ ID NO: 10817 - DNA, 5979 bp, Homo sapiens
atgacaggtcagagcaggagggctccactctgtcggtgatctccgccacctcctctgccggccgcctgctgccgccccgggagcggcttcgggaggtggccttcgagtactgccagcgcctcattgagcaaagtaaccgacgtgagtcccccacccagggcactggcctccccagggctcgacgcacctgctctgcaaggccacctgaggccagcacagcttccctgagctactgctccacagagggggtccctgggtagccggtttggagcaggggcatttttgcttctggggtcagccccaagtgttcttcaggctccaccccagcccccagcccggccctgtcccacctgggcccctcgcctcagtcccactcaagtcctcctgggggcctgtcccacccccctgctcccggtcctgcctggagcttccagagcacaagctgccccctcattgggccactctaaggctgagacagagccggctgactttttcccctccttccaggagccctgaggaagggggactccgacctgcagaaagctgtaagtggctggggaccaggggatgggaggcagcgactcggcccatttgatgtggtccatgtcccgcagtgcctggtggaggccgtgctggtgctggacgtgctgtgccggcaggacccgtccttcctgtaccgaagtctctcctgcctgaaggccctgcacgggcgggtgcgcggggacccggcctctgtgcgggtgctgctgcccctcgcccacttcttcctgagccacggtgagcccagggtggggtggcgctgactcggggctctgcttctgcctttagttttaggatggaatttcttcttcccttttttttttttttttttttgattgaatagagacaggggtcttgctgtgttgcccaggctggtctggaactcgtggcctcaagcgatcctcctgccttggcctcccaaagtgctgggattacgggcatgagccaccgtgcccagctcatatttctttttgatggattgctgtgccagatgttggtaatttttaaacttttaaatagagaaataaacagactctttttgctgtgtccctagcccaggaaacctgaaagtctaggaaccagcaccttccaaagaatgtgccatagtgtgtgtgactcacgagctgtccgtgtccctgggcgagggagaccaagtgccgcttccccagcgtcccagcgtaggacgcctcggagcccttggtgtcctggagagcaggcctgagactcagggcccctaaccagtcacagaagcacggccagggcgaggtcaagacgtgtgccctggcgggccctggtcttgcaggggaagcggctgcagtggactcggaagccgtctaccagcacctgttcaccaggatcccggtggagcagttccacagccccatgctggcctttgaattcatccagttctgcagggacaacctccacctgttcagcgggcacctcagcaccctcagattgagcttccccaacctctttaaggtatatttgggcatccctgggtgccagggcaggggcatggtaagtccctggggctcctcccctctttccagcggggttcagggcgagtcctggctgagcatagagccctgtgagtcccgggcctggaatgcggtgtgcagggtgaggtggggatctggggtgtccctgcagcgtcacgtgattgacggtgctgtccaagaactcccttgtgggtgttttggagagggggctgtgacacaagacggtgagtttgttctcacagcactggggcagggctgctgcctggtaggatccctcccccgggagccctgcctggtgccttgggcacttgggtgccatttgccttttttttttcttttgagatggagtctcattcctgtcacctaggctggagtgcagtggcgcaatctcagctcactgcaacccccgcctcctgggttcaagcgattctcctgcgtcagccacctgagtagttgagattacaggcacccaccaccatgtccagctaatttttggtatttttagtagagatggggtttcgacatgttggccaggctggtctcgaactcctgacctcagatgatcctcctgccttgacctcccaaagtgctgggattacaggcatgagccaccgcacccggcctggtgccatttgcttttgaagtgtcttttgcagcctcgcctcgctgtaaggtcttttcaactgaggtggggaatcctctttctggagaaaaaccaggacagtggaaaattattgacctgttggtacgaaagtagatacaggctgggggcagtggctcacacctgtaatcccagcacctcgggaggccaaggcaggaggatcttgaggccaggagttcaagaccagcctgggcaacacagggagacctcttgtctacaaaaagtaaacagcctcacatggtggtgtgtgcctgtagtctcagctgctcaggaggctgaggtgggaggatcacttgagcctgggaggttgaggttgcagtgagctatgattgcaccactgcactccagcctgggcgacagagcaagaccctgtctcaaaaaaataaaaagcgggaggaggcaaaggtagaagccctcctggggactgcaggtctgggacagctgtggggccctagctggctcctccctctgccgcctgctccacagctccgagccgtgtccgaaccgctgtgctgtgcccacagttcctggcctggaacagcccacccctcacctccgagtttgtggcgctcctcccggccctggtggacgctggcacagccctggagatgctgcacgcgctgctggacctgccctgcttgacggcggtgctggacctgcagctcaggtgggcccctcaccctctgccagcgctgcgtctcccagccagctggttccacacactgggccccctcctcgctgctcctgacccctacaccggggaccctccttcttccccccccaacacctgaccagtcctcccctgcaaagccacctctaggacagggtgtgtctgtcacccttggccacttgccaagggcagcccctgcaccctggagtgcctcacccgtcttcacgcccaggcctggagcctcccatgccaagcccttcctggcacccgaggtgctgtgatattagggacacctgccgtgtgtctccctgacgggggtgcccttgagtgcaggggccgcatcccagcctggccttgggcgtctgtccacgcaggtcagcaccggctgcatccgagaggccactctgggacacctctctcagggcccccagctgcctggaggccttccgggacccgcagttccagggtcttttccaatacctgctgcgccccaaggccagtggcgccactgagaggtacggggccctagggccagggggccaccagtggctcagagagcccggccacagccactggggtggggctcactgctcagccctaggctgaggccagggtgctttgtgtcccacacaaggctgcgtccccgtcatcaccattatagaggccctgcttctgcaccacgggtctgccgggggcggggcctggtctcagctctctctgctgcccacatcaaccctcataagcttggaggttggccctgtgggtgctccattttgcagatggacaaaccgagcctgagcccaggaagcaggaggcctgggaccggccacaggcctcctgccctcagcccacgccagcctttgtcccgatggctttactgtcccgggtgtgctgacgccaggggtctccccaaacccaggggagcaggaggtcccgagaggcgatgagtgaggatgggagcgggctcagctgtgcgagagggagcagtggcgacgtggccccggcctgcagtcaccaggtcggggagcgggcagcactcacggccacactgtgtcctcaggttggcgccactccaccagctgctgcagcccatggccggctgtgcccgcgtggcccagtgtgcccaggccgtgcccacgctgctgcaggcattcttctcagcagtgacccaggtgagctcgctgcctggggccccccattcccacaggcctcacaactgaggggcaggccagagccagcactggggggccctcttgagctctgcagaaggctgctcccgccacacccaccatccacggtccctgtgagggtcagggaggcacatgccacagccccggcaggccccgtcccttgtcccatcccctttattccagcaggccccgttccccagtccccgtcccatccccttcatcccggcaggccacgtcccccaatccccgtcccatccccttcatcccggcaggtcctgtctcccatcccagcaggctccatccaactgccccagcaggccctgtcttccgtccccaggacagggcaagtgagtggcctgggctctggccacacagctggggccggagcagtttgtccccctgctgcccctgataattcagcatccccatctgaggccaaaataaaggctcccacaggctggtgccccccatctcccccattgctgcttcccacctcggggagctctacaagccagtgcaggagagcctgggaggtggggaggccggcagggggctgggcgttgcttgggcgcacccttggccaaacaagacgtgtgcctggccttgcagagcgggagttggcagaggagccgtggaacagaagcgacacctctgccgggggcacttgggccagcccagggcttccctccctgtgcccggatgctgccagctgagtctctgtgtccctgggtgttggggaaggcagtggacgaggagtctccagcccctcacctgccccccagccctcaccatggcttcacccccaaccttagggcctgcagtgggggtggggctgagcctgtttcccactcctgacccccaggtggctgacgggtccctgatcaaccagctggcgctgctgctcctgggcaggagcgactcgctctacccggccccagggtacgctgccggtgtgcacaggtaggtccctcctgcgctcctgccacagccctgggcgggtgcctcctggactcctccccctctcccctcccccctccccttcagtggcttcggcaccacccctagctgggccctcagcagcctcagaccctgccacccccacccacagccccacacccagccccaggcacttctctctgcttctcaagaacattcccgtccttctttctgccgagcctgtcctcttcagggttagctcaggtccctcttccccgtcttgtcccctggggtccttctctccaaaggcctgatgcatgcaggcccatcctggttccactctgagcctgggcctgaggccagcgctggtgccagccttctccccagtgagaacagtttctctgaggctggcagtcttctgtgttcctctatcggagggtgcagcatacacctaccactcagacgcttcccgggtttctccaggcccttggcctggatggggatggggtcataggtctgcacagagcaggcgtagacccggctttctgggcagtgtgctgagttctcagttcctggccctgtgtacgctgaaaccctccctggtggtggagctggcaagagacctgctggagttcctgggcagcgtgaatggtctctgcagcagggcgagcctcgtcaccagcgtggtaaggcgggcgctggcctcccacagccgctcctgacccaggaggcctgggtgggggctgaatctctgtccccgggcctaggtgtgggccatcggcgagtacctgtcggtgacctacgatcggaggtgcaccgtggagcagatcaacaagttcttcgaagccctggaggctctgctattcgaggtcacccagtgccgcccctctgctgccctgcccaggtgtcccccccaggtggtcaccgtgctgatgaccacgctgacgaagctggcctcccggagccaagatctgatcccca

SEQ ID NO: 10818 - DNA, 1649 bp, Homo sapiens
atgacaggtcagagcaggagggctccactctgtcggtgatctccgccacctcctctgccggccgcctgctgccgccccgggagcggcttcgggaggtggccttcgagtactgccagcgcctcattgagcaaagtaaccgacgagccctgaggaagggggactccgacctgcagaaagcttgcctggtggaggccgtgctggtgctggacgtgctgtgccggcaggacccgtccttcctgtaccgaagtctctcctgcctgaaggccctgcacgggcgggtgcgcggggacccggcctctgtgcgggtgctgctgcccctcgcccacttcttcctgagccacgcccaggaaacctgaaagtctaggaaccagcaccttccaaagaatgtgccatagtgtgtgtgactcacgagctgtccgtgtccctgggcgagggagaccaagtgccgcttccccagcgtcccagcgtaggacgcctcggagcccttggtgtcctggagagcaggcctgagactcagggcccctaaccagtcacagaagcacggccagggcgaggtcaagacgtgtgccctggcgggccctggtcttgcaggggaagcggctgcagtggactcggaagccgtctaccagcacctgttcaccaggatcccggtggagcagttccacagccccatgctggcctttgaattcatccagttctgcagggacaacctccacctgttcagcgggcacctcagcaccctcagattgagcttccccaacctctttaagctccgagccgtgtccgaaccgctgtgctgtgcccacagttcctggcctggaacagcccacccctcacctccgagtttgtggcgctcctcccggccctggtggacgctggcacagccctggagatgctgcacgcgctgctggacctgccctgcttgacggcggtgctggacctgcagctcaggtcagcaccggctgcatccgagaggccactctgggacacctctctcagggcccccagctgcctggaggccttccgggacccgcagttccagggtcttttccaatacctgctgcgccccaaggccagtggcgccactgagaggttggcgccactccaccagctgctgcagcccatggccggctgtgcccgcgtggcccagtgtgcccaggccgtgcccacgctgctgcaggcattcttctcagcagtgacccaggtggctgacgggtccctgatcaaccagctggcgctgctgctcctgggcaggagcgactcgctctacccggccccagggtacgctgccggtgtgcacagtgtgctgagttctcagttcctggccctgtgtacgctgaaaccctccctggtggtggagctggcaagagacctgctggagttcctgggcagcgtgaatggtctctgcagcagggcgagcctcgtcaccagcgtggtgtgggccatcggcgagtacctgtcggtgacctacgatcggaggtgcaccgtggagcagatcaacaagttcttcgaagccctggaggctctgctattcgaggtcacccagtgccgcccctctgctgccctgcccaggtgtcccccccaggtggtcaccgtgctgatgaccacgctgacgaagctggcctcccggagccaagatctgatcccca

SEQ ID NO: 10819 - DNA, 6608 bp, Homo sapiens
acaggtcagagcaggagggctccactctgtcggtgatctccgccacctcctctgccggccgcctgctgccgccccgggagcggcttcgggaggtggccttcgagtactgccagcgcctcattgagcaaagtaaccgacgtgagtcccccacccagggcactggcctccccagggctcgacgcacctgctctgcaaggccacctgaggccagcacagcttccctgagctactgctccacagagggggtccctgggtagccggtttggagcaggggcatttttgcttctggggtcagccccaagtgttcttcaggctccaccccagcccccagcccggccctgtcccacctgggcccctcgcctcagtcccactcaagtcctcctgggggcctgtcccacccccctgctcccggtcctgcctggagcttccagagcacaagctgccccctcattgggccactctaaggctgagacagagccggctgactttttcccctccttccaggagccctgaggaagggggactccgacctgcagaaagctgtaagtggctggggaccaggggatgggaggcagcgactcggcccatttgatgtggtccatgtcccgcagtgcctggtggaggccgtgctggtgctggacgtgctgtgccggcaggacccgtccttcctgtaccgaagtctctcctgcctgaaggccctgcacgggcgggtgcgcggggacccggcctctgtgcgggtgctgctgcccctcgcccacttcttcctgagccacggtgagcccagggtggggtggcgctgactcggggctctgcttctgcctttagttttaggatggaatttcttcttcccttttttttttttttttttttgattgaatagagacaggggtcttgctgtgttgcccaggctggtctggaactcgtggcctcaagcgatcctcctgccttggcctcccaaagtgctgggattacgggcatgagccaccgtgcccagctcatatttctttttgatggattgctgtgccagatgttggtaatttttaaacttttaaatagagaaataaacagactctttttgctgtgtccctagcccaggaaacctgaaagtctaggaaccagcaccttccaaagaatgtgccatagtgtgtgtgactcacgagctgtccgtgtccctgggcgagggagaccaagtgccgcttccccagcgtcccagcgtaggacgcctcggagcccttggtgtcctggagagcaggcctgagactcagggcccctaaccagtcacagaagcacggccagggcgaggtcaagacgtgtgccctggcgggccctggtcttgcaggggaagcggctgcagtggactcggaagccgtctaccagcacctgttcaccaggatcccggtggagcagttccacagccccatgctggcctttgaattcatccagttctgcagggacaacctccacctgttcagcgggcacctcagcaccctcagattgagcttccccaacctctttaaggtatatttgggcatccctgggtgccagggcaggggcatggtaagtccctggggctcctcccctctttccagcggggttcagggcgagtcctggctgagcatagagccctgtgagtcccgggcctggaatgcggtgtgcagggtgaggtggggatctggggtgtccctgcagcgtcacgtgattgacggtgctgtccaagaactcccttgtgggtgttttggagagggggctgtgacacaagacggtgagtttgttctcacagcactggggcagggctgctgcctggtaggatccctcccccgggagccctgcctggtgccttgggcacttgggtgccatttgccttttttttttcttttgagatggagtctcattcctgtcacctaggctggagtgcagtggcgcaatctcagctcactgcaacccccgcctcctgggttcaagcgattctcctgcgtcagccacctgagtagttgagattacaggcacccaccaccatgtccagctaatttttggtatttttagtagagatggggtttcgacatgttggccaggctggtctcgaactcctgacctcagatgatcctcctgccttgacctcccaaagtgctgggattacaggcatgagccaccgcacccggcctggtgccatttgcttttgaagtgtcttttgcagcctcgcctcgctgtaaggtcttttcaactgaggtggggaatcctctttctggagaaaaaccaggacagtggaaaattattgacctgttggtacgaaagtagatacaggctgggggcagtggctcacacctgtaatcccagcacctcgggaggccaaggcaggaggatcttgaggccaggagttcaagaccagcctgggcaacacagggagacctcttgtctacaaaaagtaaacagcctcacatggtggtgtgtgcctgtagtctcagctgctcaggaggctgaggtgggaggatcacttgagcctgggaggttgaggttgcagtgagctatgattgcaccactgcactccagcctgggcgacagagcaagaccctgtctcaaaaaaataaaaagcgggaggaggcaaaggtagaagccctcctggggactgcaggtctgggacagctgtggggccctagctggctcctccctctgccgcctgctccacagctccgagccgtgtccgaaccgctgtgctgtgcccacagttcctggcctggaacagcccacccctcacctccgagtttgtggcgctcctcccggccctggtggacgctggcacagccctggagatgctgcacgcgctgctggacctgccctgcttgacggcggtgctggacctgcagctcaggtgggcccctcaccctctgccagcgctgcgtctcccagccagctggttccacacactgggccccctcctcgctgctcctgacccctacaccggggaccctccttcttccccccccaacacctgaccagtcctcccctgcaaagccacctctaggacagggtgtgtctgtcacccttggccacttgccaagggcagcccctgcaccctggagtgcctcacccgtcttcacgcccaggcctggagcctcccatgccaagcccttcctggcacccgaggtgctgtgatattagggacacctgccgtgtgtctccctgacgggggtgcccttgagtgcaggggccgcatcccagcctggccttgggcgtctgtccacgcaggtcagcaccggctgcatccgagaggccactctgggacacctctctcagggcccccagctgcctggaggccttccgggacccgcagttccagggtcttttccaatacctgctgcgccccaaggccagtggcgccactgagaggtacggggccctagggccagggggccaccagtggctcagagagcccggccacagccactggggtggggctcactgctcagccctaggctgaggccagggtgctttgtgtcccacacaaggctgcgtccccgtcatcaccattatagaggccctgcttctgcaccacgggtctgccgggggcggggcctggtctcagctctctctgctgcccacatcaaccctcataagcttggaggttggccctgtgggtgctccattttgcagatggacaaaccgagcctgagcccaggaagcaggaggcctgggaccggccacaggcctcctgccctcagcccacgccagcctttgtcccgatggctttactgtcccgggtgtgctgacgccaggggtctccccaaacccaggggagcaggaggtcccgagaggcgatgagtgaggatgggagcgggctcagctgtgcgagagggagcagtggcgacgtggccccggcctgcagtcaccaggtcggggagcgggcagcactcacggccacactgtgtcctcaggttggcgccactccaccagctgctgcagcccatggccggctgtgcccgcgtggcccagtgtgcccaggccgtgcccacgctgctgcaggcattcttctcagcagtgacccaggtgagctcgctgcctggggccccccattcccacaggcctcacaactgaggggcaggccagagccagcactggggggccctcttgagctctgcagaaggctgctcccgccacacccaccatccacggtccctgtgagggtcagggaggcacatgccacagccccggcaggccccgtcccttgtcccatcccctttattccagcaggccccgttccccagtccccgtcccatccccttcatcccggcaggccacgtcccccaatccccgtcccatccccttcatcccggcaggtcctgtctcccatcccagcaggctccatccaactgccccagcaggccctgtcttccgtccccaggacagggcaagtgagtggcctgggctctggccacacagctggggccggagcagtttgtccccctgctgcccctgataattcagcatccccatctgaggccaaaataaaggctcccacaggctggtgccccccatctcccccattgctgcttcccacctcggggagctctacaagccagtgcaggagagcctgggaggtggggaggccggcagggggctgggcgttgcttgggcgcacccttggccaaacaagacgtgtgcctggccttgcagagcgggagttggcagaggagccgtggaacagaagcgacacctctgccgggggcacttgggccagcccagggcttccctccctgtgcccggatgctgccagctgagtctctgtgtccctgggtgttggggaaggcagtggacgaggagtctccagcccctcacctgccccccagccctcaccatggcttcacccccaaccttagggcctgcagtgggggtggggctgagcctgtttcccactcctgacccccaggtggctgacgggtccctgatcaaccagctggcgctgctgctcctgggcaggagcgactcgctctacccggccccagggtacgctgccggtgtgcacaggtaggtccctcctgcgctcctgccacagccctgggcgggtgcctcctggactcctccccctctcccctcccccctccccttcagtggcttcggcaccacccctagctgggccctcagcagcctcagaccctgccacccccacccacagccccacacccagccccaggcacttctctctgcttctcaagaacattcccgtccttctttctgccgagcctgtcctcttcagggttagctcaggtccctcttccccgtcttgtcccctggggtccttctctccaaaggcctgatgcatgcaggcccatcctggttccactctgagcctgggcctgaggccagcgctggtgccagccttctccccagtgagaacagtttctctgaggctggcagtcttctgtgttcctctatcggagggtgcagcatacacctaccactcagacgcttcccgggtttctccaggcccttggcctggatggggatggggtcataggtctgcacagagcaggcgtagacccggctttctgggcagtgtgctgagttctcagttcctggccctgtgtacgctgaaaccctccctggtggtggagctggcaagagacctgctggagttcctgggcagcgtgaatggtctctgcagcagggcgagcctcgtcaccagcgtggtaaggcgggcgctggcctcccacagccgctcctgacccaggaggcctgggtgggggctgaatctctgtccccgggcctaggtgtgggccatcggcgagtacctgtcggtgacctacgatcggaggtgcaccgtggagcagatcaacaagttcttcgaagccctggaggctctgctattcgaggtcacccagtgccgcccctctgctgccctgcccaggtgtcccccccaggtggtcaccgtgctgatgaccacgctgacgaagctggcctcccggagccaagatctgatccccaggtgcctggtcagggagggagcgaagccttctggctcctggggaagagaggtggcttctgaggtcttcccatccaggtgttgtgaaatggtcgcagcagcgcaggtcctgggtgggccctgctgagctaaagccactctgctgggcgcttcaggcctggcccctccacacagacccctgtcctgggaggggagcatctgcagctgacggagggaccttctttccccagggcctctttattgctgtcaaagatgaggaccctggctcacagtccagccaccagctccacgcacagcgaggagggcgcggaagccatccgtacccgggccacagagctgctgaccctgctgaagatgcctagcgtggcccagtttgtgctcacacccagcacggaggtgtgcagcccccgctatcaccgcgatgccaacacggccctgcccctggccctgcgcacggtcagccggctggtggagagggaggccggcctcatgccagggtgaagggacagtggccagggacttcggtgcagattaagagcctgggcagccagcttgctactgaggccaggctgataggagctcaggagggcgcgggagtcctgggagaggaggcaaggcccacggtgggcttggc

SEQ ID NO: 10820 - DNA, 2436 bp, Homo sapiens
acaggtcagagcaggagggctccactctgtcggtgatctccgccacctcctctgccggccgcctgctgccgccccgggagcggcttcgggaggtggccttcgagtactgccagcgcctcattgagcaaagtaaccgacgagccctgaggaagggggactccgacctgcagaaagctgtaagtggctggggaccaggggatgggaggcagcgactcggcccatttgatgtggtccatgtcccgcagtgcctggtggaggccgtgctggtgctggacgtgctgtgccggcaggacccgtccttcctgtaccgaagtctctcctgcctgaaggccctgcacgggcgggtgcgcggggacccggcctctgtgcgggtgctgctgcccctcgcccacttcttcctgagccacggtgagcccagggtggggtggcgctgactcggggctctgcttctgcctttagttttaggatggaatttcttcttcccttttttttttttttttttttgattgaatagagacaggggtcttgctgtgttgcccaggctggtctggaactcgtggcctcaagcgatcctcctgccttggcctcccaaagtgctgggattacgggcatgagccaccgtgcccagctcatatttctttttgatggattgctgtgccagatgttggtaatttttaaacttttaaatagagaaataaacagactctttttgctgtgtccctagcccaggaaacctgaaagtctaggaaccagcaccttccaaagaatgtgccatagtgtgtgtgactcacgagctgtccgtgtccctgggcgagggagaccaagtgccgcttccccagcgtcccagcgtaggacgcctcggagcccttggtgtcctggagagcaggcctgagactcagggcccctaaccagtcacagaagcacggccagggcgaggtcaagacgtgtgccctggcgggccctggtcttgcaggggaagcggctgcagtggactcggaagccgtctaccagcacctgttcaccaggatcccggtggagcagttccacagccccatgctggcctttgaattcatccagttctgcagggacaacctccacctgttcagcgggcacctcagcaccctcagattgagcttccccaacctctttaagctccgagccgtgtccgaaccgctgtgctgtgcccacagttcctggcctggaacagcccacccctcacctccgagtttgtggcgctcctcccggccctggtggacgctggcacagccctggagatgctgcacgcgctgctggacctgccctgcttgacggcggtgctggacctgcagctcaggtcagcaccggctgcatccgagaggccactctgggacacctctctcagggcccccagctgcctggaggccttccgggacccgcagttccagggtcttttccaatacctgctgcgccccaaggccagtggcgccactgagaggttggcgccactccaccagctgctgcagcccatggccggctgtgcccgcgtggcccagtgtgcccaggccgtgcccacgctgctgcaggcattcttctcagcagtgacccaggtggctgacgggtccctgatcaaccagctggcgctgctgctcctgggcaggagcgactcgctctacccggccccagggtacgctgccggtgtgcacagtgtgctgagttctcagttcctggccctgtgtacgctgaaaccctccctggtggtggagctggcaagagacctgctggagttcctgggcagcgtgaatggtctctgcagcagggcgagcctcgtcaccagcgtggtgtgggccatcggcgagtacctgtcggtgacctacgatcggaggtgcaccgtggagcagatcaacaagttcttcgaagccctggaggctctgctattcgaggtcacccagtgccgcccctctgctgccctgcccaggtgtcccccccaggtggtcaccgtgctgatgaccacgctgacgaagctggcctcccggagccaagatctgatccccagggcctctttattgctgtcaaagatgaggaccctggctcacagtccagccaccagctccacgcacagcgaggagggcgcggaagccatccgtacccgggccacagagctgctgaccctgctgaagatgcctagcgtggcccagtttgtgctcacacccagcacggaggtgtgcagcccccgctatcaccgcgatgccaacacggccctgcccctggccctgcgcacggtcagccggctggtggagagggaggccggcctcatgccagggtgaagggacagtggccagggacttcggtgcagattaagagcctgggcagccagcttgctactgaggccaggctgataggagctcaggagggcgcgggagtcctgggagaggaggcaaggcccacggtgggcttggc

SEQ ID NO: 10821 - DNA, 3761 bp, Homo sapiens
ccccctcctcgctgctcctgacccctacaccggggaccctccttcttccccccccaacacctgaccagtcctcccctgcaaagccacctctaggacagggtgtgtctgtcacccttggccacttgccaagggcagcccctgcaccctggagtgcctcacccgtcttcacgcccaggcctggagcctcccatgccaagcccttcctggcacccgaggtgctgtgatattagggacacctgccgtgtgtctccctgacgggggtgcccttgagtgcaggggccgcatcccagcctggccttgggcgtctgtccacgcaggtcagcaccggctgcatccgagaggccactctgggacacctctctcagggcccccagctgcctggaggccttccgggacccgcagttccagggtcttttccaatacctgctgcgccccaaggccagtggcgccactgagaggtacggggccctagggccagggggccaccagtggctcagagagcccggccacagccactggggtggggctcactgctcagccctaggctgaggccagggtgctttgtgtcccacacaaggctgcgtccccgtcatcaccattatagaggccctgcttctgcaccacgggtctgccgggggcggggcctggtctcagctctctctgctgcccacatcaaccctcataagcttggaggttggccctgtgggtgctccattttgcagatggacaaaccgagcctgagcccaggaagcaggaggcctgggaccggccacaggcctcctgccctcagcccacgccagcctttgtcccgatggctttactgtcccgggtgtgctgacgccaggggtctccccaaacccaggggagcaggaggtcccgagaggcgatgagtgaggatgggagcgggctcagctgtgcgagagggagcagtggcgacgtggccccggcctgcagtcaccaggtcggggagcgggcagcactcacggccacactgtgtcctcaggttggcgccactccaccagctgctgcagcccatggccggctgtgcccgcgtggcccagtgtgcccaggccgtgcccacgctgctgcaggcattcttctcagcagtgacccaggtgagctcgctgcctggggccccccattcccacaggcctcacaactgaggggcaggccagagccagcactggggggccctcttgagctctgcagaaggctgctcccgccacacccaccatccacggtccctgtgagggtcagggaggcacatgccacagccccggcaggccccgtcccttgtcccatcccctttattccagcaggccccgttccccagtccccgtcccatccccttcatcccggcaggccacgtcccccaatccccgtcccatccccttcatcccggcaggtcctgtctcccatcccagcaggctccatccaactgccccagcaggccctgtcttccgtccccaggacagggcaagtgagtggcctgggctctggccacacagctggggccggagcagtttgtccccctgctgcccctgataattcagcatccccatctgaggccaaaataaaggctcccacaggctggtgccccccatctcccccattgctgcttcccacctcggggagctctacaagccagtgcaggagagcctgggaggtggggaggccggcagggggctgggcgttgcttgggcgcacccttggccaaacaagacgtgtgcctggccttgcagagcgggagttggcagaggagccgtggaacagaagcgacacctctgccgggggcacttgggccagcccagggcttccctccctgtgcccggatgctgccagctgagtctctgtgtccctgggtgttggggaaggcagtggacgaggagtctccagcccctcacctgccccccagccctcaccatggcttcacccccaaccttagggcctgcagtgggggtggggctgagcctgtttcccactcctgacccccaggtggctgacgggtccctgatcaaccagctggcgctgctgctcctgggcaggagcgactcgctctacccggccccagggtacgctgccggtgtgcacaggtaggtccctcctgcgctcctgccacagccctgggcgggtgcctcctggactcctccccctctcccctcccccctccccttcagtggcttcggcaccacccctagctgggccctcagcagcctcagaccctgccacccccacccacagccccacacccagccccaggcacttctctctgcttctcaagaacattcccgtccttctttctgccgagcctgtcctcttcagggttagctcaggtccctcttccccgtcttgtcccctggggtccttctctccaaaggcctgatgcatgcaggcccatcctggttccactctgagcctgggcctgaggccagcgctggtgccagccttctccccagtgagaacagtttctctgaggctggcagtcttctgtgttcctctatcggagggtgcagcatacacctaccactcagacgcttcccgggtttctccaggcccttggcctggatggggatggggtcataggtctgcacagagcaggcgtagacccggctttctgggcagtgtgctgagttctcagttcctggccctgtgtacgctgaaaccctccctggtggtggagctggcaagagacctgctggagttcctgggcagcgtgaatggtctctgcagcagggcgagcctcgtcaccagcgtggtaaggcgggcgctggcctcccacagccgctcctgacccaggaggcctgggtgggggctgaatctctgtccccgggcctaggtgtgggccatcggcgagtacctgtcggtgacctacgatcggaggtgcaccgtggagcagatcaacaagttcttcgaagccctggaggctctgctattcgaggtcacccagtgccgcccctctgctgccctgcccaggtgtcccccccaggtggtcaccgtgctgatgaccacgctgacgaagctggcctcccggagccaagatctgatccccaggtgcctggtcagggagggagcgaagccttctggctcctggggaagagaggtggcttctgaggtcttcccatccaggtgttgtgaaatggtcgcagcagcgcaggtcctgggtgggccctgctgagctaaagccactctgctgggcgcttcaggcctggcccctccacacagacccctgtcctgggaggggagcatctgcagctgacggagggaccttctttccccagggcctctttattgctgtcaaagatgaggaccctggctcacagtccagccaccagctccacgcacagcgaggagggcgcggaagccatccgtacccgggccacagagctgctgaccctgctgaagatgcctagcgtggcccagtttgtgctcacacccagcacggaggtgtgcagcccccgctatcaccgcgatgccaacacggccctgcccctggccctgcgcacggtcagccggctggtggagagggaggccggcctcatgccagggtgaagggacagtggccagggacttcggtgcagattaagagcctgggcagccagcttgctactgaggccaggctgataggagctcaggagggcgcgggagtcctgggagaggaggcaaggcccacggtgggcttggcaccctcacagacacgcggggctggcccccctgctcaccctctgggctttgtctccgagccttttgctcccaggcaacac

SEQ ID NO: 10822 - DNA, 1499 bp, Homo sapiens
ccccctcctcgctgctcctgacccctacaccggggaccctccttcttccccccccaacacctgaccagtcctcccctgcaaagccacctctaggacagggtgtgtctgtcacccttggccacttgccaagggcagcccctgcaccctggagtgcctcacccgtcttcacgcccaggcctggagcctcccatgccaagcccttcctggcacccgaggtgctgtgatattagggacacctgccgtgtgtctccctgacgggggtgcccttgagtgcaggggccgcatcccagcctggccttgggcgtctgtccacgcaggtcagcaccggctgcatccgagaggccactctgggacacctctctcagggcccccagctgcctggaggccttccgggacccgcagttccagggtcttttccaatacctgctgcgccccaaggccagtggcgccactgagaggttggcgccactccaccagctgctgcagcccatggccggctgtgcccgcgtggcccagtgtgcccaggccgtgcccacgctgctgcaggcattcttctcagcagtgacccaggtggctgacgggtccctgatcaaccagctggcgctgctgctcctgggcaggagcgactcgctctacccggccccagggtacgctgccggtgtgcacagtgtgctgagttctcagttcctggccctgtgtacgctgaaaccctccctggtggtggagctggcaagagacctgctggagttcctgggcagcgtgaatggtctctgcagcagggcgagcctcgtcaccagcgtggtgtgggccatcggcgagtacctgtcggtgacctacgatcggaggtgcaccgtggagcagatcaacaagttcttcgaagccctggaggctctgctattcgaggtcacccagtgccgcccctctgctgccctgcccaggtgtcccccccaggtggtcaccgtgctgatgaccacgctgacgaagctggcctcccggagccaagatctgatccccagggcctctttattgctgtcaaagatgaggaccctggctcacagtccagccaccagctccacgcacagcgaggagggcgcggaagccatccgtacccgggccacagagctgctgaccctgctgaagatgcctagcgtggcccagtttgtgctcacacccagcacggaggtgtgcagcccccgctatcaccgcgatgccaacacggccctgcccctggccctgcgcacggtcagccggctggtggagagggaggccggcctcatgccagggtgaagggacagtggccagggacttcggtgcagattaagagcctgggcagccagcttgctactgaggccaggctgataggagctcaggagggcgcgggagtcctgggagaggaggcaaggcccacggtgggcttggcaccctcacagacacgcggggctggcccccctgctcaccctctgggctttgtctccgagccttttgctcccaggcaacac

SEQ ID NO: 10823 - DNA, 16077 bp, Homo sapiens
gttgaccggggtgcggagctcctgggctgcagctcctggagtttccgaggttcgtgcgcgtctggtggcggcggcgtgatgttctcggcaggagcggagagtttgctccaccaggccaggtacgggggagctgcggccccggccctccttcctgcatctctccctaggggcacacgggggtgggtctcacagggcaggggcttgggcgccagccttgcaggaacccgactggactcgccctcgagacttggggatcgggtaaggcaacacggcggccaggcttggggtgaggaggtcggggagggtcatggtgggtccccggaggaggtgacacttgagcagagtcttggtgagtgaaagcaagtggggtgggacccagtcgacagtttagtcaaaggcttggcggtgagaactccgcgtctggcaggaaatcgggcagccgggagatttcagtgcctcacagtcaagaacgcaaagtcacagtgtccggaggcctgctaaggaataaggctgtgtgccaggctggggagctggaggccatccgagggctttgcggaaccgtgggagggttttgtgacttaaaaagatctctcttgcgcggatgtattagctaggctgagaaatcaccctccaggctggtttcaggctgtgtctggactcccagtaacgagtgagtagctccttcctcaccaactaaccagtcatgggggaaaacagtgtaagccaggactgaacagactcacggtccaccaaacaggcaaagacttcatactacatgtttaaaagaagaaaatgctgaccgggcgtggtggctcacgcctgtaatcccaccactttgggaggccaaggcaggcggatcacctgaggtcaggagttcgagaccagcgtgcccaacatgaggaaaccacgtctctactgaaaatacaaaaaaaaaaaaaaaaaaaaaaattagccgggcgtggtggtgggtgactgtaatcccagctactcgggaggctgaggcaggaggattgcttgaacctgtgaggtggaggttacagtgagctgagatggcgccactgcactccaggctgggggacagagcgaaactccgtctcaaaagaaaaaagaaaaaaagtaaagaaaatacagccagcactacagccccttggtaaacgtaaacaaacttggtgaggtgagaggccgaagcaggagaagtgcatgaacccaggaggccgagggtgcagtgagccaagatcgcaccactggactccagtctgggtgacagaacgagactccatgtcaaaacaaacaagcaaacctggactcagagctagaccaattggtgggaaagattcgggtggttgaaattgctgtgattatagtgagtgaggtcttgaaggcaggttaagttctaaagcccgaacaggacaaaaatctctgatcaaaataacccttaagagtccactcattaggaagaggcttggtgaatatgcagcaccatctcccagcagctcaacataggcaaccttcccttcaatcctggacagatatgtcattcatgtgaatgtggggactatatgaaaatgaaaaatactggcatctcagcatgtaacatgttaatcccaaggtccttgccaagagacaaggaaaaacacccactgagaacttcattcccagtcacattctgctcaaggtcataaacttgtgacatgaaaaacaaaaggaagagccctctttatttatttatttatttatttatttatttatttttattagagtctcttttgagacagagtctccctctgtcgcccaggctggagtacaatggcgcaatctcagttcactgcaacctccgcctcctgggttcaagcaattctcctgcctcagcctcccaagtagctgggattacaggcgcccgccaccacacccggctgattttttgtatctttagtagagatgggatttcaccacattgtccaggctggtctcgaattcctgacctcaggtgatccgcctgactcggcccctcgaagtgccgggattacaggtgtgagccaccatacccggctgagccctcactatttaaatacctgtttctctgcctccctggctcgggtgggcagccgtttttgaggatagagtgtggttgaatttccctatgtaacatacatgagttctgcagttgccctctgttagggtttcaagaaggttaatctattagggcttaccagttttcacaatattcttaagcctgtgatttctgatgatattttaaaataaatgactgtagtttgagggttaaggtttggagccggccaggcgcagtgactggcccacgcctgtaatccgaacacttcgggaggccgagttaggaggatcgcttgaggctaggactttgagaccagcctggacaacatagcgagacccgtctctacaaaacagaatttttaaaaaacttagccaggtgtggtggcacgtacccatagtcacagctactcaggaggctgaggcaggaggatcacttgagccaaggaggttgaggctgcggtaagctatgatggtgccactgcactccagctcgggtgacagagggagaccctgtctccaaagaaagccaaaaagatttggagtgaactttagtttctctctaaatgtgtcagagatacggaaagcaagggtgcaaaaagtgatcaaagatagcgctgcaagctgaaggataaatggagagagcgggaagcgagtaaaggatgggggcatggaggggtgccccgcaaggtcggggatttccaggaggaagagcctcagcccactagctcgggagctagtggggcatgtatcaggcacagggtctgtgcgaagggacagaagcaaaagaaacaggacatggagtctggagaaggaaggcggggccgggctcttggaggcagcgttggggtctgtaggagtttggatttgaaagcagtggggagctgttgaagggtttgggtgggttggattttagagagaagcttgagacttggagaatatgctgaagggaatttaatcgggatgaggggttccacctttctgggaaagattttccattgtgtgtatatatgtatatgtgtgtatatataatttatatataacattttatatattatatattacatatatatttagtaatatataatataattatatgttatatattatatgttatattatatatcattatatataatatataatgatatataatattttatatataatcaaaaaaagaataaaaaaaattcactgggcttagtgtagtcccagctacttgaaaggctgaggtgggagaactgcttgagctagaagatcaggctgcagtgagctgagattatgccactgcactccagcctgggtgacagcataagactctatctcaaaaaatatatatatagatagatagatagatataaaaatatatttttatatgtaatatatataaaatatatattatatacatttttgagatagagcatattatatattatatataacatatataacaactatataacatatataacataacatatataacaacataatatatagcatatattatgtataacatatattagatataacatatataacattagaaataatgtatataacataacataacgtatataacgcatataacaacatatataacgtatataacataacacgttatatatgatatataacatataacatgttatatatcataacgtgttatatgtcatataacatgattattatatatcatatataacatgataacatatatatcatatataacatatataacattatatataacatatatattatattatatatatatatttttttttgaagtagagtcttactctgtcacccaggctggagtgcagtggcacaatctcagctcactgcagcctgatcttccagctcaagcagttctcccacctcagcctttcaagtggctgggactacaccatgcccagtgaattttttttatttttatttttttttgtttttgagacggagttttgctctcgttgcccaagctggggtgcaatggcatgatctcagctcactgcaacctcctcctcccgggttcaagtgattctcctgcctcagcctcctgagtagctgggattacaggcttgtgccaccacgcccagctatttttttttgtatttttagtagaaacggggtttctccatgttagccagctggtcttgaactcctgacctcaggtgatcagcccgcctcggcctcccaaaatgctaggattacaggtgtgagccaccgtgcgtggccgaattttttttattcttttgtagagatggggtctcactgttttgcccaggatggtctcagacatctgcactcaactcatcctcccacctcagcgtcccaaagtgctgggattacaggtggcctggggagggcacagccacgtagggggcccttctcagggagtccccagagtcccctggcacagcaacccctttgcgcattattggttctttcttttagactgggatagaaacctaaaaacaggcttccatttgggacttttcagtatcttacctgtggcttactagggagattttaaaattaagccaattagttattcgagtaaaaaaacataatgggcttaccttacaatatgtcatgacatttgttctttaatatataagattttattctcaggccaggcgtggtggctcacgcttgtcatcccagcactttgggaggccgaggtgggcagatcatgaggtcaggagttttgagaccagcctggccaacatggtgaaaccccgtctctactaaaaatgcaaaaattagccgggcgtaggccaggcgcggtggctcacgcctgtaatcccagcactttgggaggccgaggtgggcagatcacgatgtcaggagatcaagaccatcctggccaacatggtgaaaccctgtctttactaaaaaatacaaaaaaattagccgggcgtggtggtgggtgcctgtaatcccatctactcggaagactgaggcaggagaattgcttgaaccccggaggcgaaggttgcagtgagccgagatcatgacactatattccagcccgggtgacagagcaagactccatctcggggaaaaaaaaaatttattcttgtttccataagcaaaaggctcattgaagacatcttttgaaaggcaccttattctagagtaaatttcctactcttgaatgagacccctaaaaagaatcggttttagtccttctgccctgggaacaagaaaatctaagtgcatggggcctccgtgagtgagattcgtcatagtgcgctgcagcgatggatcgggaaatcccagggtgagaggaaccagctcagggaatcagcgaatttatctcgagagccatgagccgtggaaccgtgttcctccacacactcggcttctcttttctaaagagggattttccctgctccaagggttatcctttttttggttccgagcagcgagtgcttctgggtcctgaagtcctcttctttgtttagggagatccaggacgaggagctgaagaagttctgttcccggatctgtaaactgctgcaggcggaggacttggggccggacaccctcgactccctgcagaggctcttcctcatcatctcagccacgaagtacagccggaggtgagtgtggcgacggctcaggccggctcctcacacagcggccccaggagaacccagcccacgcccagcaggtcactgcagatgctccttgggggttgagtcatttgtccacttaaaccagtgctgaaggtccatcctcatgtaaaatgctctgtccactggcccaagggtgcccggccaggtgctctggggcaccgggtgctcctgccacggtcgtgacgtgttaccgcccaccacgggcatctcgccttccaggctggagaagacatgcgtagacctgctgcaggccaccctcggcctgcctgcatgccccgagcagctccaggtgctttgcgccgccatcctgcgagagatgtccccctctgacagcctcagcctggcctgggaccacacgcagaacagccggcagctgagcctggtggcctccgttctcttggcccaggtagcgcagcagtcaccaccccagttggcaccggatggctgcttcccaaggaacaggggagacaggaagcaggggcgccagagccggcaggtggctgcttgttgtagacgcatctcggtgctgagtgcctggcacacttgaggctggggcatgccctgttgactggaacggggtcccatgcccagcaggcccacgtggtatgttggtgctcaggagaggtggtggagtttggtttctcagacagagccttgagacagcgagtcagtggaggctgggcctccagaccttctttttggggtttttgttttgttttttagaaacagggtctcactctgctgtccagtgtagagtgccatggagtgatcaatgctcactgcagcctcgacctccctggctcaagcaatcctcccatctcagcctcctgagtagctgggattacaggcatgcatcaccacacccagttaatgtttgtatttttttgtagggacctggggtctcactatgttgcccaggctggtctcaaacttctgggctcaagcaatccaccctccttggccaggagtttttgccaagtccatgtcctccctccctctgtgtcgggagcaggcctgggcactcagcgtggggatccaggggttcacaggctgcctttgtgtgagagaagctgctatctctgctcatgggttgcccaggggtgcagagtctgcaggaaggttgcgatggagctgggcttttccctccgttcccagcctgcagcgtcatgagttgcctcctgtgctggggtgcagcctgcggttgctttagttctgtgtgggcgagagcttgtgggccccggcgtactcagggcgttgtacttcatcactggggtcatcctggttggtgcccagccccctcacctcacagacctcctgcaggccacctccaggcctccgagatgaccccggtaatgctgtggtagctcctggcctttggaacaagatgactccggctcttcttgtttgtttcacccgcccttctcctcaagcaactcatttttttcagtggaagatgatcttgcagaactgctgccaggcgccagcggtgcaccccccgcccggcacgtggcctcccagccacccagccgccctcctccctgccctgacggccctgcccctgtgctgggtgtctctggtgctgctcagatgtttcagcacctgggtgtgcagagtgaggtgggtggtttaaagactgggatccacactggaggccccgcaggacggggtgtcctgtgtctgcggccagggccatggtggccgccagtgtgtttttagcattgaatcagccgtgccctcacccaggccccctccagcctcagcgatgcagctcccagggagagaggctggaggcggagcaggcaccttgtggcccggggtgggcctgcgcgggacatcctccctgccacctgctaggccggggtctcagcgaccgacgcttctcaggagtgtcacacagacttccgaaatgggggagctggtctctggcacaggccagtaccccagcgtttgccctgtttgatttgaagggtgacagaaacgaggaggtcagagccgtgggccagggcgtgctacgagcgctggagagccggcagcctgagggacccagcctcagacacctcctccccgtcatggccaaggtcgtggtcctcagcccgggcaccctccaggagggtacgcggggcccctcccaagaggctgttgggggtctgccttcccaggtccttccctgagggcccatggtgggttgggagtgtggggggcaggtgggggacacggggaggcccgagggtttgggacgctgcaggattctgttttctgagaaaagtcggccagcatcccaacaacccaggcatctgtaggattcaacctcacctccccatgccaccccacccactgcagaccaggccaccctgctcagcaagcggctggtcgactggctgcgctacgccagcctccagcaagggctcccacactccggcggcttcttctccacgcccagggcccggcaggtgaggctgggactgttctggaaccatggggaacagagtcacagacaacccctccctgagagctcctgtgcccacagcggcgaggcctgctgtcgttccgcggggtccaggacgagcctgcctctgctgcggggcttgggtcaggcagggccacagccccctgacccgtgtggctctgggggtctgtgcgcgggttcagtcccagggcctgcggagcagggtgtgcgacgcgcgtctgcctgggggtcaggtggggatggtgtttttgcatcacacagggcgggccgctgcccgggctcatgttcaggcagcttctcctccacctcctgaggagcttgtgctaaaggctggcgtttttcccggcctcggccccctccgcccactcctgcctgtccttcccacagccgggccccgtcaccgaggtggacggggcggtagccacagacttcttcacggtgctctccagcggccaccgcttcacagacgaccagtggctgaacgtgcaggccttctctatgctgcgggcgtggctgctgcacagcggccccgagggcccgggcaccctggacacaggtgtgcggggtggggggatgacgtcagacaggggtgggaggtgggcgcactatgggttggtcgcagggggacacgggcggaggtggggggactcgggtgtgcccaggatgcagcagaggtcaggactgagcaacgcagcctgctgacctggagctaggcggagagcactccctggccagcatctttggggtccagggtcagcaccggggatcctctggacaccccgtgaccctcatgcaatgtgcagatgtgagagctcccacttaaggcaggcacccttaaggttgttggagtgacgccactgagctcctcccggctgctctgtggacttgttggggaagaagcctcagccaccctgaagggcggccgtgatggggaagctgccgggtgggtggacgtcctgagacggtgacgcctcacgcctcccgggaggggctgcggcctgtgctctcctcctgcccttccaagcagggcagcaggcatgtcccagcccgggagccacacgtcagcctgctgagagttcccacctcccgcagatgacaggtcagagcaggagggctccactctgtcggtgatctccgccacctcctctgccggccgcctgctgccgccccgggagcggcttcgggaggtggccttcgagtactgccagcgcctcattgagcaaagtaaccgacgtgagtcccccacccagggcactggcctccccagggctcgacgcacctgctctgcaaggccacctgaggccagcacagcttccctgagctactgctccacagagggggtccctgggtagccggtttggagcaggggcatttttgcttctggggtcagccccaagtgttcttcaggctccaccccagcccccagcccggccctgtcccacctgggcccctcgcctcagtcccactcaagtcctcctgggggcctgtcccacccccctgctcccggtcctgcctggagcttccagagcacaagctgccccctcattgggccactctaaggctgagacagagccggctgactttttcccctccttccaggagccctgaggaagggggactccgacctgcagaaagctgtaagtggctggggaccaggggatgggaggcagcgactcggcccatttgatgtggtccatgtcccgcagtgcctggtggaggccgtgctggtgctggacgtgctgtgccggcaggacccgtccttcctgtaccgaagtctctcctgcctgaaggccctgcacgggcgggtgcgcggggacccggcctctgtgcgggtgctgctgcccctcgcccacttcttcctgagccacggtgagcccagggtggggtggcgctgactcggggctctgcttctgcctttagttttaggatggaatttcttcttcccttttttttttttttttttttgattgaatagagacaggggtcttgctgtgttgcccaggctggtctggaactcgtggcctcaagcgatcctcctgccttggcctcccaaagtgctgggattacgggcatgagccaccgtgcccagctcatatttctttttgatggattgctgtgccagatgttggtaatttttaaacttttaaatagagaaataaacagactctttttgctgtgtccctagcccaggaaacctgaaagtctaggaaccagcaccttccaaagaatgtgccatagtgtgtgtgactcacgagctgtccgtgtccctgggcgagggagaccaagtgccgcttccccagcgtcccagcgtaggacgcctcggagcccttggtgtcctggagagcaggcctgagactcagggcccctaaccagtcacagaagcacggccagggcgaggtcaagacgtgtgccctggcgggccctggtcttgcaggggaagcggctgcagtggactcggaagccgtctaccagcacctgttcaccaggatcccggtggagcagttccacagccccatgctggcctttgaattcatccagttctgcagggacaacctccacctgttcagcgggcacctcagcaccctcagattgagcttccccaacctctttaaggtatatttgggcatccctgggtgccagggcaggggcatggtaagtccctggggctcctcccctctttccagcggggttcagggcgagtcctggctgagcatagagccctgtgagtcccgggcctggaatgcggtgtgcagggtgaggtggggatctggggtgtccctgcagcgtcacgtgattgacggtgctgtccaagaactcccttgtgggtgttttggagagggggctgtgacacaagacggtgagtttgttctcacagcactggggcagggctgctgcctggtaggatccctcccccgggagccctgcctggtgccttgggcacttgggtgccatttgccttttttttttcttttgagatggagtctcattcctgtcacctaggctggagtgcagtggcgcaatctcagctcactgcaacccccgcctcctgggttcaagcgattctcctgcgtcagccacctgagtagttgagattacaggcacccaccaccatgtccagctaatttttggtatttttagtagagatggggtttcgacatgttggccaggctggtctcgaactcctgacctcagatgatcctcctgccttgacctcccaaagtgctgggattacaggcatgagccaccgcacccggcctggtgccatttgcttttgaagtgtcttttgcagcctcgcctcgctgtaaggtcttttcaactgaggtggggaatcctctttctggagaaaaaccaggacagtggaaaattattgacctgttggtacgaaagtagatacaggctgggggcagtggctcacacctgtaatcccagcacctcgggaggccaaggcaggaggatcttgaggccaggagttcaagaccagcctgggcaacacagggagacctcttgtctacaaaaagtaaacagcctcacatggtggtgtgtgcctgtagtctcagctgctcaggaggctgaggtgggaggatcacttgagcctgggaggttgaggttgcagtgagctatgattgcaccactgcactccagcctgggcgacagagcaagaccctgtctcaaaaaaataaaaagcgggaggaggcaaaggtagaagccctcctggggactgcaggtctgggacagctgtggggccctagctggctcctccctctgccgcctgctccacagctccgagccgtgtccgaaccgctgtgctgtgcccacagttcctggcctggaacagcccacccctcacctccgagtttgtggcgctcctcccggccctggtggacgctggcacagccctggagatgctgcacgcgctgctggacctgccctgcttgacggcggtgctggacctgcagctcaggtgggcccctcaccctctgccagcgctgcgtctcccagccagctggttccacacactgggccccctcctcgctgctcctgacccctacaccggggaccctccttcttccccccccaacacctgaccagtcctcccctgcaaagccacctctaggacagggtgtgtctgtcacccttggccacttgccaagggcagcccctgcaccctggagtgcctcacccgtcttcacgcccaggcctggagcctcccatgccaagcccttcctggcacccgaggtgctgtgatattagggacacctgccgtgtgtctccctgacgggggtgcccttgagtgcaggggccgcatcccagcctggccttgggcgtctgtccacgcaggtcagcaccggctgcatccgagaggccactctgggacacctctctcagggcccccagctgcctggaggccttccgggacccgcagttccagggtcttttccaatacctgctgcgccccaaggccagtggcgccactgagaggtacggggccctagggccagggggccaccagtggctcagagagcccggccacagccactggggtggggctcactgctcagccctaggctgaggccagggtgctttgtgtcccacacaaggctgcgtccccgtcatcaccattatagaggccctgcttctgcaccacgggtctgccgggggcggggcctggtctcagctctctctgctgcccacatcaaccctcataagcttggaggttggccctgtgggtgctccattttgcagatggacaaaccgagcctgagcccaggaagcaggaggcctgggaccggccacaggcctcctgccctcagcccacgccagcctttgtcccgatggctttactgtcccgggtgtgctgacgccaggggtctccccaaacccaggggagcaggaggtcccgagaggcgatgagtgaggatgggagcgggctcagctgtgcgagagggagcagtggcgacgtggccccggcctgcagtcaccaggtcggggagcgggcagcactcacggccacactgtgtcctcaggttggcgccactccaccagctgctgcagcccatggccggctgtgcccgcgtggcccagtgtgcccaggccgtgcccacgctgctgcaggcattcttctcagcagtgacccaggtgagctcgctgcctggggccccccattcccacaggcctcacaactgaggggcaggccagagccagcactggggggccctcttgagctctgcagaaggctgctcccgccacacccaccatccacggtccctgtgagggtcagggaggcacatgccacagccccggcaggccccgtcccttgtcccatcccctttattccagcaggccccgttccccagtccccgtcccatccccttcatcccggcaggccacgtcccccaatccccgtcccatccccttcatcccggcaggtcctgtctcccatcccagcaggctccatccaactgccccagcaggccctgtcttccgtccccaggacagggcaagtgagtggcctgggctctggccacacagctggggccggagcagtttgtccccctgctgcccctgataattcagcatccccatctgaggccaaaataaaggctcccacaggctggtgccccccatctcccccattgctgcttcccacctcggggagctctacaagccagtgcaggagagcctgggaggtggggaggccggcagggggctgggcgttgcttgggcgcacccttggccaaacaagacgtgtgcctggccttgcagagcgggagttggcagaggagccgtggaacagaagcgacacctctgccgggggcacttgggccagcccagggcttccctccctgtgcccggatgctgccagctgagtctctgtgtccctgggtgttggggaaggcagtggacgaggagtctccagcccctcacctgccccccagccctcaccatggcttcacccccaaccttagggcctgcagtgggggtggggctgagcctgtttcccactcctgacccccaggtggctgacgggtccctgatcaaccagctggcgctgctgctcctgggcaggagcgactcgctctacccggccccagggtacgctgccggtgtgcacaggtaggtccctcctgcgctcctgccacagccctgggcgggtgcctcctggactcctccccctctcccctcccccctccccttcagtggcttcggcaccacccctagctgggccctcagcagcctcagaccctgccacccccacccacagccccacacccagccccaggcacttctctctgcttctcaagaacattcccgtccttctttctgccgagcctgtcctcttcagggttagctcaggtccctcttccccgtcttgtcccctggggtccttctctccaaaggcctgatgcatgcaggcccatcctggttccactctgagcctgggcctgaggccagcgctggtgccagccttctccccagtgagaacagtttctctgaggctggcagtcttctgtgttcctctatcggagggtgcagcatacacctaccactcagacgcttcccgggtttctccaggcccttggcctggatggggatggggtcataggtctgcacagagcaggcgtagacccggctttctgggcagtgtgctgagttctcagttcctggccctgtgtacgctgaaaccctccctggtggtggagctggcaagagacctgctggagttcctgggcagcgtgaatggtctctgcagcagggcgagcctcgtcaccagcgtggtaaggcgggcgctggcctcccacagccgctcctgacccaggaggcctgggtgggggctgaatctctgtccccgggcctaggtgtgggccatcggcgagtacctgtcggtgacctacgatcggaggtgcaccgtggagcagatcaacaagttcttcgaagccctggaggctctgctattcgaggtcacccagtgccgcccctctgctgccctgcccaggtgtcccccccaggtggtcaccgtgctgatgaccacgctgacgaagctggcctcccggagccaagatctgatccccaggtgcctggtcagggagggagcgaagccttctggctcctggggaagagaggtggcttctgaggtcttcccatccaggtgttgtgaaatggtcgcagcagcgcaggtcctgggtgggccctgctgagctaaagccactctgctgggcgcttcaggcctggcccctccacacagacccctgtcctgggaggggagcatctgcagctgacggagggaccttctttccccagggcctctttattgctgtcaaagatgaggaccctggctcacagtccagccaccagctccacgcacagcgaggagggcgcggaagccatccgtacccgggccacagagctgctgaccctgctgaagatgcctagcgtggcccagtttgtgctcacacccagcacggaggtgtgcagcccccgctatcaccgcgatgccaacacggccctgcccctggccctgcgcacggtcagccggctggtggagagggaggccggcctcatgccagggtgaagggacagtggccagggacttcggtgcagattaagagcctgggcagccagcttgctactgaggccaggctgataggagctcaggagggcgcgggagtcctgggagaggaggcaaggcccacggtgggcttggcaccctcacagacacgcggggctggcccccctgctcaccctctgggctttgtctccgagccttttgctcccaggcaacactgagctgagctgaggggtgccatggagcggctctgattggaggcttgaggccctgtggctgggtcgggtggaggctgctgggtctgtttcctagtcttttgtttttggacagttgat

SEQ ID NO: 10824 - DNA, 2869 bp, Homo sapiens
gttgaccggggtgcggagctcctgggctgcagctcctggagtttccgaggttcgtgcgcgtctggtggcggcggcgtgatgttctcggcaggagcggagagtttgctccaccaggccagggagatccaggacgaggagctgaagaagttctgttcccggatctgtaaactgctgcaggcggaggacttggggccggacaccctcgactccctgcagaggctcttcctcatcatctcagccacgaagtacagccggaggctggagaagacatgcgtagacctgctgcaggccaccctcggcctgcctgcatgccccgagcagctccaggtgctttgcgccgccatcctgcgagagatgtccccctctgacagcctcagcctggcctgggaccacacgcagaacagccggcagctgagcctggtggcctccgttctcttggcccagggtgacagaaacgaggaggtcagagccgtgggccagggcgtgctacgagcgctggagagccggcagcctgagggacccagcctcagacacctcctccccgtcatggccaaggtcgtggtcctcagcccgggcaccctccaggaggaccaggccaccctgctcagcaagcggctggtcgactggctgcgctacgccagcctccagcaagggctcccacactccggcggcttcttctccacgcccagggcccggcagccgggccccgtcaccgaggtggacggggcggtagccacagacttcttcacggtgctctccagcggccaccgcttcacagacgaccagtggctgaacgtgcaggccttctctatgctgcgggcgtggctgctgcacagcggccccgagggcccgggcaccctggacacagatgacaggtcagagcaggagggctccactctgtcggtgatctccgccacctcctctgccggccgcctgctgccgccccgggagcggcttcgggaggtggccttcgagtactgccagcgcctcattgagcaaagtaaccgacgagccctgaggaagggggactccgacctgcagaaagcttgcctggtggaggccgtgctggtgctggacgtgctgtgccggcaggacccgtccttcctgtaccgaagtctctcctgcctgaaggccctgcacgggcgggtgcgcggggacccggcctctgtgcgggtgctgctgcccctcgcccacttcttcctgagccacggggaagcggctgcagtggactcggaagccgtctaccagcacctgttcaccaggatcccggtggagcagttccacagccccatgctggcctttgaattcatccagttctgcagggacaacctccacctgttcagcgggcacctcagcaccctcagattgagcttccccaacctctttaagctccgagccgtgtccgaaccgctgtgctgtgcccacagttcctggcctggaacagcccacccctcacctccgagtttgtggcgctcctcccggccctggtggacgctggcacagccctggagatgctgcacgcgctgctggacctgccctgcttgacggcggtgctggacctgcagctcaggtcagcaccggctgcatccgagaggccactctgggacacctctctcagggcccccagctgcctggaggccttccgggacccgcagttccagggtcttttccaatacctgctgcgccccaaggccagtggcgccactgagaggttggcgccactccaccagctgctgcagcccatggccggctgtgcccgcgtggcccagtgtgcccaggccgtgcccacgctgctgcaggcattcttctcagcagtgacccaggtggctgacgggtccctgatcaaccagctggcgctgctgctcctgggcaggagcgactcgctctacccggccccagggtacgctgccggtgtgcacagtgtgctgagttctcagttcctggccctgtgtacgctgaaaccctccctggtggtggagctggcaagagacctgctggagttcctgggcagcgtgaatggtctctgcagcagggcgagcctcgtcaccagcgtggtgtgggccatcggcgagtacctgtcggtgacctacgatcggaggtgcaccgtggagcagatcaacaagttcttcgaagccctggaggctctgctattcgaggtcacccagtgccgcccctctgctgccctgcccaggtgtcccccccaggtggtcaccgtgctgatgaccacgctgacgaagctggcctcccggagccaagatctgatccccagggcctctttattgctgtcaaagatgaggaccctggctcacagtccagccaccagctccacgcacagcgaggagggcgcggaagccatccgtacccgggccacagagctgctgaccctgctgaagatgcctagcgtggcccagtttgtgctcacacccagcacggaggtgtgcagcccccgctatcaccgcgatgccaacacggccctgcccctggccctgcgcacggtcagccggctggtggagagggaggccggcctcatgccagggtgaagggacagtggccagggacttcggtgcagattaagagcctgggcagccagcttgctactgaggccaggctgataggagctcaggagggcgcgggagtcctgggagaggaggcaaggcccacggtgggcttggcaccctcacagacacgcggggctggcccccctgctcaccctctgggctttgtctccgagccttttgctcccaggcaacactgagctgagctgaggggtgccatggagcggctctgattggaggcttgaggccctgtggctgggtcgggtggaggctgctgggtctgtttcctagtcttttgtttttggacagttgat

SEQ ID NO: 10825 - DNA, 9309 bp, Homo sapiens
ggaagttgaccggggtgcggagctcctgggctgcagctcctggagtttccgaggttcgtgcgcgtctggtggcggcggcgtgatgttctcggcaggagcggagagtttgctccaccaggccaggtacgggggagctgcggccccggccctccttcctgcatctctccctaggggcacacgggggtgggtctcacagggcaggggcttgggcgccagccttgcaggaacccgactggactcgccctcgagacttggggatcgggtaaggcaacacggcggccaggcttggggtgaggaggtcggggagggtcatggtgggtccccggaggaggtgacacttgagcagagtcttggtgagtgaaagcaagtggggtgggacccagtcgacagtttagtcaaaggcttggcggtgagaactccgcgtctggcaggaaatcgggcagccgggagatttcagtgcctcacagtcaagaacgcaaagtcacagtgtccggaggcctgctaaggaataaggctgtgtgccaggctggggagctggaggccatccgagggctttgcggaaccgtgggagggttttgtgacttaaaaagatctctcttgcgcggatgtattagctaggctgagaaatcaccctccaggctggtttcaggctgtgtctggactcccagtaacgagtgagtagctccttcctcaccaactaaccagtcatgggggaaaacagtgtaagccaggactgaacagactcacggtccaccaaacaggcaaagacttcatactacatgtttaaaagaagaaaatgctgaccgggcgtggtggctcacgcctgtaatcccaccactttgggaggccaaggcaggcggatcacctgaggtcaggagttcgagaccagcgtgcccaacatgaggaaaccacgtctctactgaaaatacaaaaaaaaaaaaaaaaaaaaaaattagccgggcgtggtggtgggtgactgtaatcccagctactcgggaggctgaggcaggaggattgcttgaacctgtgaggtggaggttacagtgagctgagatggcgccactgcactccaggctgggggacagagcgaaactccgtctcaaaagaaaaaagaaaaaaagtaaagaaaatacagccagcactacagccccttggtaaacgtaaacaaacttggtgaggtgagaggccgaagcaggagaagtgcatgaacccaggaggccgagggtgcagtgagccaagatcgcaccactggactccagtctgggtgacagaacgagactccatgtcaaaacaaacaagcaaacctggactcagagctagaccaattggtgggaaagattcgggtggttgaaattgctgtgattatagtgagtgaggtcttgaaggcaggttaagttctaaagcccgaacaggacaaaaatctctgatcaaaataacccttaagagtccactcattaggaagaggcttggtgaatatgcagcaccatctcccagcagctcaacataggcaaccttcccttcaatcctggacagatatgtcattcatgtgaatgtggggactatatgaaaatgaaaaatactggcatctcagcatgtaacatgttaatcccaaggtccttgccaagagacaaggaaaaacacccactgagaacttcattcccagtcacattctgctcaaggtcataaacttgtgacatgaaaaacaaaaggaagagccctctttatttatttatttatttatttatttatttatttttattagagtctcttttgagacagagtctccctctgtcgcccaggctggagtacaatggcgcaatctcagttcactgcaacctccgcctcctgggttcaagcaattctcctgcctcagcctcccaagtagctgggattacaggcgcccgccaccacacccggctgattttttgtatctttagtagagatgggatttcaccacattgtccaggctggtctcgaattcctgacctcaggtgatccgcctgactcggcccctcgaagtgccgggattacaggtgtgagccaccatacccggctgagccctcactatttaaatacctgtttctctgcctccctggctcgggtgggcagccgtttttgaggatagagtgtggttgaatttccctatgtaacatacatgagttctgcagttgccctctgttagggtttcaagaaggttaatctattagggcttaccagttttcacaatattcttaagcctgtgatttctgatgatattttaaaataaatgactgtagtttgagggttaaggtttggagccggccaggcgcagtgactggcccacgcctgtaatccgaacacttcgggaggccgagttaggaggatcgcttgaggctaggactttgagaccagcctggacaacatagcgagacccgtctctacaaaacagaatttttaaaaaacttagccaggtgtggtggcacgtacccatagtcacagctactcaggaggctgaggcaggaggatcacttgagccaaggaggttgaggctgcggtaagctatgatggtgccactgcactccagctcgggtgacagagggagaccctgtctccaaagaaagccaaaaagatttggagtgaactttagtttctctctaaatgtgtcagagatacggaaagcaagggtgcaaaaagtgatcaaagatagcgctgcaagctgaaggataaatggagagagcgggaagcgagtaaaggatgggggcatggaggggtgccccgcaaggtcggggatttccaggaggaagagcctcagcccactagctcgggagctagtggggcatgtatcaggcacagggtctgtgcgaagggacagaagcaaaagaaacaggacatggagtctggagaaggaaggcggggccgggctcttggaggcagcgttggggtctgtaggagtttggatttgaaagcagtggggagctgttgaagggtttgggtgggttggattttagagagaagcttgagacttggagaatatgctgaagggaatttaatcgggatgaggggttccacctttctgggaaagattttccattgtgtgtatatatgtatatgtgtgtatatataatttatatataacattttatatattatatattacatatatatttagtaatatataatataattatatgttatatattatatgttatattatatatcattatatataatatataatgatatataatattttatatataatcaaaaaaagaataaaaaaaattcactgggcttagtgtagtcccagctacttgaaaggctgaggtgggagaactgcttgagctagaagatcaggctgcagtgagctgagattatgccactgcactccagcctgggtgacagcataagactctatctcaaaaaatatatatatagatagatagatagatataaaaatatatttttatatgtaatatatataaaatatatattatatacatttttgagatagagcatattatatattatatataacatatataacaactatataacatatataacataacatatataacaacataatatatagcatatattatgtataacatatattagatataacatatataacattagaaataatgtatataacataacataacgtatataacgcatataacaacatatataacgtatataacataacacgttatatatgatatataacatataacatgttatatatcataacgtgttatatgtcatataacatgattattatatatcatatataacatgataacatatatatcatatataacatatataacattatatataacatatatattatattatatatatatatttttttttgaagtagagtcttactctgtcacccaggctggagtgcagtggcacaatctcagctcactgcagcctgatcttccagctcaagcagttctcccacctcagcctttcaagtggctgggactacaccatgcccagtgaattttttttatttttatttttttttgtttttgagacggagttttgctctcgttgcccaagctggggtgcaatggcatgatctcagctcactgcaacctcctcctcccgggttcaagtgattctcctgcctcagcctcctgagtagctgggattacaggcttgtgccaccacgcccagctatttttttttgtatttttagtagaaacggggtttctccatgttagccagctggtcttgaactcctgacctcaggtgatcagcccgcctcggcctcccaaaatgctaggattacaggtgtgagccaccgtgcgtggccgaattttttttattcttttgtagagatggggtctcactgttttgcccaggatggtctcagacatctgcactcaactcatcctcccacctcagcgtcccaaagtgctgggattacaggtggcctggggagggcacagccacgtagggggcccttctcagggagtccccagagtcccctggcacagcaacccctttgcgcattattggttctttcttttagactgggatagaaacctaaaaacaggcttccatttgggacttttcagtatcttacctgtggcttactagggagattttaaaattaagccaattagttattcgagtaaaaaaacataatgggcttaccttacaatatgtcatgacatttgttctttaatatataagattttattctcaggccaggcgtggtggctcacgcttgtcatcccagcactttgggaggccgaggtgggcagatcatgaggtcaggagttttgagaccagcctggccaacatggtgaaaccccgtctctactaaaaatgcaaaaattagccgggcgtaggccaggcgcggtggctcacgcctgtaatcccagcactttgggaggccgaggtgggcagatcacgatgtcaggagatcaagaccatcctggccaacatggtgaaaccctgtctttactaaaaaatacaaaaaaattagccgggcgtggtggtgggtgcctgtaatcccatctactcggaagactgaggcaggagaattgcttgaaccccggaggcgaaggttgcagtgagccgagatcatgacactatattccagcccgggtgacagagcaagactccatctcggggaaaaaaaaaatttattcttgtttccataagcaaaaggctcattgaagacatcttttgaaaggcaccttattctagagtaaatttcctactcttgaatgagacccctaaaaagaatcggttttagtccttctgccctgggaacaagaaaatctaagtgcatggggcctccgtgagtgagattcgtcatagtgcgctgcagcgatggatcgggaaatcccagggtgagaggaaccagctcagggaatcagcgaatttatctcgagagccatgagccgtggaaccgtgttcctccacacactcggcttctcttttctaaagagggattttccctgctccaagggttatcctttttttggttccgagcagcgagtgcttctgggtcctgaagtcctcttctttgtttagggagatccaggacgaggagctgaagaagttctgttcccggatctgtaaactgctgcaggcggaggacttggggccggacaccctcgactccctgcagaggctcttcctcatcatctcagccacgaagtacagccggaggtgagtgtggcgacggctcaggccggctcctcacacagcggccccaggagaacccagcccacgcccagcaggtcactgcagatgctccttgggggttgagtcatttgtccacttaaaccagtgctgaaggtccatcctcatgtaaaatgctctgtccactggcccaagggtgcccggccaggtgctctggggcaccgggtgctcctgccacggtcgtgacgtgttaccgcccaccacgggcatctcgccttccaggctggagaagacatgcgtagacctgctgcaggccaccctcggcctgcctgcatgccccgagcagctccaggtgctttgcgccgccatcctgcgagagatgtccccctctgacagcctcagcctggcctgggaccacacgcagaacagccggcagctgagcctggtggcctccgttctcttggcccaggtagcgcagcagtcaccaccccagttggcaccggatggctgcttcccaaggaacaggggagacaggaagcaggggcgccagagccggcaggtggctgcttgttgtagacgcatctcggtgctgagtgcctggcacacttgaggctggggcatgccctgttgactggaacggggtcccatgcccagcaggcccacgtggtatgttggtgctcaggagaggtggtggagtttggtttctcagacagagccttgagacagcgagtcagtggaggctgggcctccagaccttctttttggggtttttgttttgttttttagaaacagggtctcactctgctgtccagtgtagagtgccatggagtgatcaatgctcactgcagcctcgacctccctggctcaagcaatcctcccatctcagcctcctgagtagctgggattacaggcatgcatcaccacacccagttaatgtttgtatttttttgtagggacctggggtctcactatgttgcccaggctggtctcaaacttctgggctcaagcaatccaccctccttggccaggagtttttgccaagtccatgtcctccctccctctgtgtcgggagcaggcctgggcactcagcgtggggatccaggggttcacaggctgcctttgtgtgagagaagctgctatctctgctcatgggttgcccaggggtgcagagtctgcaggaaggttgcgatggagctgggcttttccctccgttcccagcctgcagcgtcatgagttgcctcctgtgctggggtgcagcctgcggttgctttagttctgtgtgggcgagagcttgtgggccccggcgtactcagggcgttgtacttcatcactggggtcatcctggttggtgcccagccccctcacctcacagacctcctgcaggccacctccaggcctccgagatgaccccggtaatgctgtggtagctcctggcctttggaacaagatgactccggctcttcttgtttgtttcacccgcccttctcctcaagcaactcatttttttcagtggaagatgatcttgcagaactgctgccaggcgccagcggtgcaccccccgcccggcacgtggcctcccagccacccagccgccctcctccctgccctgacggccctgcccctgtgctgggtgtctctggtgctgctcagatgtttcagcacctgggtgtgcagagtgaggtgggtggtttaaagactgggatccacactggaggccccgcaggacggggtgtcctgtgtctgcggccagggccatggtggccgccagtgtgtttttagcattgaatcagccgtgccctcacccaggccccctccagcctcagcgatgcagctcccagggagagaggctggaggcggagcaggcaccttgtggcccggggtgggcctgcgcgggacatcctccctgccacctgctaggccggggtctcagcgaccgacgcttctcaggagtgtcacacagacttccgaaatgggggagctggtctctggcacaggccagtaccccagcgtttgccctgtttgatttgaagggtgacagaaacgaggaggtcagagccgtgggccagggcgtgctacgagcgctggagagccggcagcctgagggacccagcctcagacacctcctccccgtcatggccaaggtcgtggtcctcagcccgggcaccctccaggagggtacgcggggcccctcccaagaggctgttgggggtctgccttcccaggtccttccctgagggcccatggtgggttgggagtgtggggggcaggtgggggacacggggaggcccgagggtttgggacgctgcaggattctgttttctgagaaaagtcggccagcatcccaacaacccaggcatctgtaggattcaacctcacctccccatgccaccccacccactgcagaccaggccaccctgctcagcaagcggctggtcgactggctgcgctacgccagcctccagcaagggctcccacactccggcggcttcttctccacgcccagggcccggcaggtgaggctgggactgttctggaaccatggggaacagagtcacagacaacccctccctgagagctcctgtgcccacagcggcgaggcctgctgtcgttccgcggggtccaggacgagcctgcctctgctgcggggcttgggtcaggcagggccacagccccctgacccgtgtggctctgggggtctgtgcgcgggttcagtcccagggcctgcggagcagggtgtgcgacgcgcgtctgcctgggggtcaggtggggatggtgtttttgcatcacacagggcgggccgctgcccgggctcatgttcaggcagcttctcctccacctcctgaggagcttgtgctaaaggctggcgtttttcccggcctcggccccctccgcccactcctgcctgtccttcccacagccgggccccgtcaccgaggtggacggggcggtagccacagacttcttcacggtgctctccagcggccaccgcttcacagacgaccagtggctgaacgtgcaggccttctctatgctgcgggcgtggctgctgcacagcggccccgagggcccgggcaccctggacacaggtgtgcggggtggggggatgacgtcagacaggggtgggaggtgggcgcactatgggttggtcgcagggggacacgggcggaggtggggggactcgggtgtgcccaggatgcagcagaggtcaggactgagcaacgcagcctgctgacctggagctaggcggagagcactccctggccagcatctttggggtccagggtcagcaccggggatcctctggacaccccgtgaccctcatgcaatgtgcagatgtgagagctcccacttaaggcaggcacccttaaggttgttggagtgacgccactgagctcctcccggctgctctgtggacttgttggggaagaagcctcagccaccctgaagggcggccgtgatggggaagctgccgggtgggtggacgtcctgagacggtgacgcctcacgcctcccgggaggggctgcggcctgtgctctcctcctgcccttccaagcagggcagcaggcatgtcccagcccgggagccacacgtcagcctgctgagagttcccacctcccgcagatgacaggtcagagcaggagggctccactctgtcg

SEQ ID NO: 10826 - DNA, 465 bp, Homo sapiens
ggaagttgaccggggtgcggagctcctgggctgcagctcctggagtttccgaggttcgtgcgcgtctggtggcggcggcgtgatgttctcggcaggagcggagagtttgctccaccaggccagggagatccaggacgaggagctgaagaagttctgttcccggatctgtaaactgctgcaggcggaggacttggggccggacaccctcgactccctgcagaggctcttcctcatcatctcagccacgaagtacagccggagccgggccccgtcaccgaggtggacggggcggtagccacagacttcttcacggtgctctccagcggccaccgcttcacagacgaccagtggctgaacgtgcaggccttctctatgctgcgggcgtggctgctgcacagcggccccgagggcccgggcaccctggacacagatgacaggtcagagcaggagggctccactctgtcg

SEQ ID NO: 10827 - DNA, 5413 bp, Homo sapiens
agttccacagccccatgctggcctttgaattcatccagttctgcagggacaacctccacctgttcagcgggcacctcagcaccctcagattgagcttccccaacctctttaaggtatatttgggcatccctgggtgccagggcaggggcatggtaagtccctggggctcctcccctctttccagcggggttcagggcgagtcctggctgagcatagagccctgtgagtcccgggcctggaatgcggtgtgcagggtgaggtggggatctggggtgtccctgcagcgtcacgtgattgacggtgctgtccaagaactcccttgtgggtgttttggagagggggctgtgacacaagacggtgagtttgttctcacagcactggggcagggctgctgcctggtaggatccctcccccgggagccctgcctggtgccttgggcacttgggtgccatttgccttttttttttcttttgagatggagtctcattcctgtcacctaggctggagtgcagtggcgcaatctcagctcactgcaacccccgcctcctgggttcaagcgattctcctgcgtcagccacctgagtagttgagattacaggcacccaccaccatgtccagctaatttttggtatttttagtagagatggggtttcgacatgttggccaggctggtctcgaactcctgacctcagatgatcctcctgccttgacctcccaaagtgctgggattacaggcatgagccaccgcacccggcctggtgccatttgcttttgaagtgtcttttgcagcctcgcctcgctgtaaggtcttttcaactgaggtggggaatcctctttctggagaaaaaccaggacagtggaaaattattgacctgttggtacgaaagtagatacaggctgggggcagtggctcacacctgtaatcccagcacctcgggaggccaaggcaggaggatcttgaggccaggagttcaagaccagcctgggcaacacagggagacctcttgtctacaaaaagtaaacagcctcacatggtggtgtgtgcctgtagtctcagctgctcaggaggctgaggtgggaggatcacttgagcctgggaggttgaggttgcagtgagctatgattgcaccactgcactccagcctgggcgacagagcaagaccctgtctcaaaaaaataaaaagcgggaggaggcaaaggtagaagccctcctggggactgcaggtctgggacagctgtggggccctagctggctcctccctctgccgcctgctccacagctccgagccgtgtccgaaccgctgtgctgtgcccacagttcctggcctggaacagcccacccctcacctccgagtttgtggcgctcctcccggccctggtggacgctggcacagccctggagatgctgcacgcgctgctggacctgccctgcttgacggcggtgctggacctgcagctcaggtgggcccctcaccctctgccagcgctgcgtctcccagccagctggttccacacactgggccccctcctcgctgctcctgacccctacaccggggaccctccttcttccccccccaacacctgaccagtcctcccctgcaaagccacctctaggacagggtgtgtctgtcacccttggccacttgccaagggcagcccctgcaccctggagtgcctcacccgtcttcacgcccaggcctggagcctcccatgccaagcccttcctggcacccgaggtgctgtgatattagggacacctgccgtgtgtctccctgacgggggtgcccttgagtgcaggggccgcatcccagcctggccttgggcgtctgtccacgcaggtcagcaccggctgcatccgagaggccactctgggacacctctctcagggcccccagctgcctggaggccttccgggacccgcagttccagggtcttttccaatacctgctgcgccccaaggccagtggcgccactgagaggtacggggccctagggccagggggccaccagtggctcagagagcccggccacagccactggggtggggctcactgctcagccctaggctgaggccagggtgctttgtgtcccacacaaggctgcgtccccgtcatcaccattatagaggccctgcttctgcaccacgggtctgccgggggcggggcctggtctcagctctctctgctgcccacatcaaccctcataagcttggaggttggccctgtgggtgctccattttgcagatggacaaaccgagcctgagcccaggaagcaggaggcctgggaccggccacaggcctcctgccctcagcccacgccagcctttgtcccgatggctttactgtcccgggtgtgctgacgccaggggtctccccaaacccaggggagcaggaggtcccgagaggcgatgagtgaggatgggagcgggctcagctgtgcgagagggagcagtggcgacgtggccccggcctgcagtcaccaggtcggggagcgggcagcactcacggccacactgtgtcctcaggttggcgccactccaccagctgctgcagcccatggccggctgtgcccgcgtggcccagtgtgcccaggccgtgcccacgctgctgcaggcattcttctcagcagtgacccaggtgagctcgctgcctggggccccccattcccacaggcctcacaactgaggggcaggccagagccagcactggggggccctcttgagctctgcagaaggctgctcccgccacacccaccatccacggtccctgtgagggtcagggaggcacatgccacagccccggcaggccccgtcccttgtcccatcccctttattccagcaggccccgttccccagtccccgtcccatccccttcatcccggcaggccacgtcccccaatccccgtcccatccccttcatcccggcaggtcctgtctcccatcccagcaggctccatccaactgccccagcaggccctgtcttccgtccccaggacagggcaagtgagtggcctgggctctggccacacagctggggccggagcagtttgtccccctgctgcccctgataattcagcatccccatctgaggccaaaataaaggctcccacaggctggtgccccccatctcccccattgctgcttcccacctcggggagctctacaagccagtgcaggagagcctgggaggtggggaggccggcagggggctgggcgttgcttgggcgcacccttggccaaacaagacgtgtgcctggccttgcagagcgggagttggcagaggagccgtggaacagaagcgacacctctgccgggggcacttgggccagcccagggcttccctccctgtgcccggatgctgccagctgagtctctgtgtccctgggtgttggggaaggcagtggacgaggagtctccagcccctcacctgccccccagccctcaccatggcttcacccccaaccttagggcctgcagtgggggtggggctgagcctgtttcccactcctgacccccaggtggctgacgggtccctgatcaaccagctggcgctgctgctcctgggcaggagcgactcgctctacccggccccagggtacgctgccggtgtgcacaggtaggtccctcctgcgctcctgccacagccctgggcgggtgcctcctggactcctccccctctcccctcccccctccccttcagtggcttcggcaccacccctagctgggccctcagcagcctcagaccctgccacccccacccacagccccacacccagccccaggcacttctctctgcttctcaagaacattcccgtccttctttctgccgagcctgtcctcttcagggttagctcaggtccctcttccccgtcttgtcccctggggtccttctctccaaaggcctgatgcatgcaggcccatcctggttccactctgagcctgggcctgaggccagcgctggtgccagccttctccccagtgagaacagtttctctgaggctggcagtcttctgtgttcctctatcggagggtgcagcatacacctaccactcagacgcttcccgggtttctccaggcccttggcctggatggggatggggtcataggtctgcacagagcaggcgtagacccggctttctgggcagtgtgctgagttctcagttcctggccctgtgtacgctgaaaccctccctggtggtggagctggcaagagacctgctggagttcctgggcagcgtgaatggtctctgcagcagggcgagcctcgtcaccagcgtggtaaggcgggcgctggcctcccacagccgctcctgacccaggaggcctgggtgggggctgaatctctgtccccgggcctaggtgtgggccatcggcgagtacctgtcggtgacctacgatcggaggtgcaccgtggagcagatcaacaagttcttcgaagccctggaggctctgctattcgaggtcacccagtgccgcccctctgctgccctgcccaggtgtcccccccaggtggtcaccgtgctgatgaccacgctgacgaagctggcctcccggagccaagatctgatccccaggtgcctggtcagggagggagcgaagccttctggctcctggggaagagaggtggcttctgaggtcttcccatccaggtgttgtgaaatggtcgcagcagcgcaggtcctgggtgggccctgctgagctaaagccactctgctgggcgcttcaggcctggcccctccacacagacccctgtcctgggaggggagcatctgcagctgacggagggaccttctttccccagggcctctttattgctgtcaaagatgaggaccctggctcacagtccagccaccagctccacgcacagcgaggagggcgcggaagccatccgtacccgggccacagagctgctgaccctgctgaagatgcctagcgtggcccagtttgtgctcacacccagcacggaggtgtgcagcccccgctatcaccgcgatgccaacacggccctgcccctggccctgcgcacggtcagccggctggtggagagggaggccggcctcatgccagggtgaagggacagtggccagggacttcggtgcagattaagagcctgggcagccagcttgctactgaggccaggctgataggagctcaggagggcgcgggagtcctgggagaggaggcaaggcccacggtgggcttggcaccctcacagacacgcggggctggcccccctgctcaccctctgggctttgtctccgagccttttgctcccaggcaacactgagctgagctgaggggtgccatggagcggctctgattggaggcttgaggccctgtggctgggtcgggtggaggctgctgggtctgtttcctagtcttttgtttttggacagttgatgggcaagaagagct

SEQ ID NO: 10828 - DNA, 1299 bp, Homo sapiens
agttccacagccccatgctggcctttgaattcatccagttctgcagggacaacctccacctgttcagcgggcacctcagcaccctcagattgagcttccccaacctctttaagttcctggcctggaacagcccacccctcacctccgagtttgtggcgctcctcccggccctggtggacgctggcacagccctggagatgctgcacgcgctgctggacctgccctgcttgacggcggtgctggacctgcagctcaggtcagcaccggctgcatccgagaggccactctgggacacctctctcagggcccccagctgcctggaggccttccgggacccgcagttccagggtcttttccaatacctgctgcgccccaaggccagtggcgccactgagaggttggcgccactccaccagctgctgcagcccatggccggctgtgcccgcgtggcccagtgtgcccaggccgtgcccacgctgctgcaggcattcttctcagcagtgacccaggtggctgacgggtccctgatcaaccagctggcgctgctgctcctgggcaggagcgactcgctctacccggccccagggtacgctgccggtgtgcacaggtgtcccccccaggtggtcaccgtgctgatgaccacgctgacgaagctggcctcccggagccaagatctgatccccagggcctctttattgctgtcaaagatgaggaccctggctcacagtccagccaccagctccacgcacagcgaggagggcgcggaagccatccgtacccgggccacagagctgctgaccctgctgaagatgcctagcgtggcccagtttgtgctcacacccagcacggaggtgtgcagcccccgctatcaccgcgatgccaacacggccctgcccctggccctgcgcacggtcagccggctggtggagagggaggccggcctcatgccagggtgaagggacagtggccagggacttcggtgcagattaagagcctgggcagccagcttgctactgaggccaggctgataggagctcaggagggcgcgggagtcctgggagaggaggcaaggcccacggtgggcttggcaccctcacagacacgcggggctggcccccctgctcaccctctgggctttgtctccgagccttttgctcccaggcaacactgagctgagctgaggggtgccatggagcggctctgattggaggcttgaggccctgtggctgggtcgggtggaggctgctgggtctgtttcctagtcttttgtttttggacagttgatgggcaagaagagct

SEQ ID NO: 10829 - DNA, 2776 bp, Homo sapiens
gacatttagggaaggcagaaagtaggtcagggacggaggtgcctgtttacccgcgccggactcaccgccgccgccgccgcgggatccgagtgcgggcgcgggcgcgggcgctcccggcgagccacggtggtgctggctagagtgtatacgtttggacccaagcttaacttttccaatgtggaatcctgggccttcattggttccgatgtcataggaatctacgctagagggcttcctgtgtgccgggcactgtggtttttggaagaagctgaccgcctgaaaagaaattataaaacatgaaaatcgctttgaggtgaccaagtccagaggcccctaactcctcccaagctggatctggggtgtaagaactgtgacttcagatcatccaatggcagaccagagaatggacatttcttcaaccatcagtgatttcatgtccccgggccccaccgacctgctttccagctctcttggtaccagtggtgtggattgcaaccgcaaacggaaaggcagctccactgactaccaagaaagcatggacacagacaaagatgaccctcatggaaggttagaatatacagaacaccaaggaaggataaaaaatgcaagggaagctcacagtcagattgaaaagcggcgtcgggataaaatgaacagttttatagatgaattggcttctttggtaccaacatgcaacgcaatgtccaggaaattagataaacttactgtgctaaggatggctgttcagcacatgaaaacattaagaggtgccaccaatccatacacagaagcaaactacaaaccaacttttctatcagacgatgaattgaaacacctcattctcagggcagcagatggatttttgtttgtcgtaggatgtgaccgagggaagatactctttgtctcagagtctgtcttcaagatcctcaactacagccagaatgatctgattggtcagagtttgtttgactacctgcatcctaaagatattgccaaagtcaaggagcagctctcctcctctgacaccgcaccccgggagcggctcatagatgcaaaaactggacttccagttaaaacagatataacccctgggccatctcgattatgttctggagcacgacgttctttcttctgtaggatgaagtgtaacaggccttcagtaaaggttgaagacaaggacttcccctctacctgctcaaagaaaaaagatcgaaaaagcttctgcacaatccacagcacaggctatttgaaaagctggccacccacaaagatggggctggatgaagacaacgaaccagacaatgaggggtgtaacctcagctgcctcgtcgcaattggacgactgcattctcatgtagttccacaaccagtgaacggggaaatcagggtgaaatctatggaatatgtttctcggcacgcgatagatggaaagtttgtttttgtagaccagagggcaacagctattttggcatatttaccacaagaacttctaggcacatcgtgttatgaatattttcaccaagatgacataggacatcttgcagaatgtcataggcaagttttacagacgagagaaaaaattacaactaattgctataaatttaaaatcaaagatggttcttttatcacactacggagtcgatggttcagtttcatgaacccttggaccaaggaagtagaatatattgtctcaactaacactgttgttttagccaacgtcctggaaggcggggacccaaccttcccacagctcacagcatccccccacagcatggacagcatgctgccctctggagaaggtggcccaaagaggacccaccccactgttccagggattccagggggaacccgggctggggcaggaaaaataggccgaatgattgctgaggaaatcatggaaatccacaggataagagggtcatcgccttctagctgtggctccagcccattgaacatcacgagtacgcctccccctgatgcctcttctccaggaggcaagaagattttaaatggagggactccagacattccttccagtggcctactatcaggccaggctcaggagaacccaggttatccatattctgatagttcttctattcttggtgagaacccccacataggtatagacatgattgacaacgaccaaggatcaagtagtcccagtaatgatgaggcagcaatggctgtcatcatgagcctcttggaagcagatgctggactgggtggccctgttgactttagtgacttgccatggccgctgtaaacactacatgttgctttggcaacagctatagtatcaaagtgcattactggtggagttttacagtctgtgaagcttactggataaggagagaatagcttttatgtactgacttcataaaagccatctcagagccattgatacaagtcaatcttactatatgtaacttcagacaaagtggaactaagcctgctccagtgtttcctcatcattgattattgggctagctgtggatagcttgcattaattgtatattttggattctgtttgtgttgaattttttaatcattgtgcacagaagcatcattggtagcttttatatgcaaatggtcatttcagatgtatggtgtttttacactacaaagaagtcccccatgtggatatttcttatactaattgtatcataaagccgtttattcttccttgtaagaatcctttactataaatatgggttaaagtataatgtactagacagttaaatatttttaataaatgtttcccttgttctataaa

SEQ ID NO: 10830 - DNA, 2807 bp, Homo sapiens
ggaaagtaggttagtggtgcgacatttagggaaggcagaaagtaggtcagggacggaggtgcctgtttacccgcgccggactcaccgccgccgccgccgcgggatccgagtgcgggcgcgggcgcgggcgctcccggcgagccacggtggtgctggctagagtgtatacgtttggacccaagcttaacttttccaatgtggaatcctgggccttcattggtttttggaagaagctgaccgcctgaaaagaaattataaaacatgaaaatcgctttgaggtgaccaagtccagaggcccctaactcctcccaagctggatctggggtgtaagaactgtgacttcagatcatccaatggcagaccagagaatggacatttcttcaaccatcagtgatttcatgtccccgggccccaccgacctgctttccagctctcttggtaccagtggtgtggattgcaaccgcaaacggaaaggcagctccactgactaccattcacaggtcgaatttggggagcacaatggctggaggtcagatgcccactaggagatgctatgattaatatagaaagcatggacacagacaaagatgaccctcatggaaggttagaatatacagaacaccaaggaaggataaaaaatgcaagggaagctcacagtcagattgaaaagcggcgtcgggataaaatgaacagttttatagatgaattggcttctttggtaccaacatgcaacgcaatgtccaggaaattagataaacttactgtgctaaggatggctgttcagcacatgaaaacattaagaggtgccaccaatccatacacagaagcaaactacaaaccaacttttctatcagacgatgaattgaaacacctcattctcagggcagcagatggatttttgtttgtcgtaggatgtgaccgagggaagatactctttgtctcagagtctgtcttcaagatcctcaactacagccagaatgatctgattggtcagagtttgtttgactacctgcatcctaaagatattgccaaagtcaaggagcagctctcctcctctgacaccgcaccccgggagcggctcatagatgcaaaaactggacttccagttaaaacagatataacccctgggccatctcgattatgttctggagcacgacgttctttcttctgtaggatgaagtgtaacaggccttcagtaaaggttgaagacaaggacttcccctctacctgctcaaagaaaaaagatcgaaaaagcttctgcacaatccacagcacaggctatttgaaaagctggccacccacaaagatggggctggatgaagacaacgaaccagacaatgaggggtgtaacctcagctgcctcgtcgcaattggacgactgcattctcatgtagttccacaaccagtgaacggggaaatcagggtgaaatctatggaatatgtttctcggcacgcgatagatggaaagtttgtttttgtagaccagagggcaacagctattttggcatatttaccacaagaacttctaggcacatcgtgttatgaatattttcaccaagatgacataggacatcttgcagaatgtcataggcaagttttacagacgagagaaaaaattacaactaattgctataaatttaaaatcaaagatggttcttttatcacactacggagtcgatggttcagtttcatgaacccttggaccaaggaagtagaatatattgtctcaactaacactgttgttttagccaacgtcctggaaggcggggacccaaccttcccacagctcacagcatccccccacagcatggacagcatgctgccctctggagaaggtggcccaaagaggacccaccccactgttccagggattccagggggaacccgggctggggcaggaaaaataggccgaatgattgctgaggaaatcatggaaatccacaggataagagggtcatcgccttctagctgtggctccagcccattgaacatcacgagtacgcctccccctgatgcctcttctccaggaggcaagaagattttaaatggagggactccagacattccttccagtggcctactatcaggccaggctcaggagaacccaggttatccatattctgatagttcttctattcttggtgagaacccccacataggtatagacatgattgacaacgaccaaggatcaagtagtcccagtaatgatgaggcagcaatggctgtcatcatgagcctcttggaagcagatgctggactgggtggccctgttgactttagtgacttgccatggccgctgtaaacactacatgttgctttggcaacagctatagtatcaaagtgcattactggtggagttttacagtctgtgaagcttactggataaggagagaatagcttttatgtactgacttcataaaagccatctcagagccattgatacaagtcaatcttactatatgtaacttcagacaaagtggaactaagcctgctccagtgtttcctcatcattgattattgggctagctgtggatagcttgcattaattgtatattttggattctgtttgtgttgaattttttaatcattgtgcacagaagcatcattggtagcttttatatgcaaatggtcatttcagatgtatggtgtttttacactacaaagaagtcccccatgtggatatttcttatactaattgtatcataaagccgtttattcttccttgtaagaatcctttactataaatatgggttaaagtataatgtactagacagttaaatatttttaataaatgtttcccttgttct

SEQ ID NO: 10831 - DNA, 2746 bp, Homo sapiens
cggaggtgcctgtttacccgcgccggactcaccgccgccgccgccgcgggatccgagtgcgggcgcgggcgcgggcgctcccggcgagccacggtggtgctggctagagtgtatacgtttggacccaagcttaacttttccaatgtggaatcctgggccttcattggttccgatgtcataggaatctacgctagagggcttcctgtgtgccgggcactgtggtttttggaagaagctgaccgcctgaaaagaaattataaaacatgaaaatcgctttgaggtgaccaagtccagaggcccctaactcctcccaagctggatctggggtgtaagaactgtgacttcagatcatccaatggcagaccagagaatggacatttcttcaaccatcagtgatttcatgtccccgggccccaccgacctgctttccagctctcttggtaccagtggtgtggattgcaaccgcaaacggaaaggcagctccactgactaccaagaaagcatggacacagacaaagatgaccctcatggaaggttagaatatacagaacaccaaggaaggataaaaaatgcaagggaagctcacagtcagattgaaaagcggcgtcgggataaaatgaacagttttatagatgaattggcttctttggtaccaacatgcaacgcaatgtccaggaaattagataaacttactgtgctaaggatggctgttcagcacatgaaaacattaagaggtgccaccaatccatacacagaagcaaactacaaaccaacttttctatcagacgatgaattgaaacacctcattctcagggcagcagatggatttttgtttgtcgtaggatgtgaccgagggaagatactctttgtctcagagtctgtcttcaagatcctcaactacagccagaatgatctgattggtcagagtttgtttgactacctgcatcctaaagatattgccaaagtcaaggagcagctctcctcctctgacaccgcaccccgggagcggctcatagatgcaaaaactggacttccagttaaaacagatataacccctgggccatctcgattatgttctggagcacgacgttctttcttctgtaggatgaagtgtaacaggccttcagtaaaggttgaagacaaggacttcccctctacctgctcaaagaaaaaagcagatcgaaaaagcttctgcacaatccacagcacaggctatttgaaaagctggccacccacaaagatggggctggatgaagacaacgaaccagacaatgaggggtgtaacctcagctgcctcgtcgcaattggacgactgcattctcatgtagttccacaaccagtgaacggggaaatcagggtgaaatctatggaatatgtttctcggcacgcgatagatggaaagtttgtttttgtagaccagagggcaacagctattttggcatatttaccacaagaacttctaggcacatcgtgttatgaatattttcaccaagatgacataggacatcttgcagaatgtcataggcaagttttacagacgagagaaaaaattacaactaattgctataaatttaaaatcaaagatggttcttttatcacactacggagtcgatggttcagtttcatgaacccttggaccaaggaagtagaatatattgtctcaactaacactgttgttttagccaacgtcctggaaggcggggacccaaccttcccacagctcacagcatccccccacagcatggacagcatgctgccctctggagaaggtggcccaaagaggacccaccccactgttccagggattccagggggaacccgggctggggcaggaaaaataggccgaatgattgctgaggaaatcatggaaatccacaggataagagggtcatcgccttctagctgtggctccagcccattgaacatcacgagtacgcctccccctgatgcctcttctccaggaggcaagaagattttaaatggagggactccagacattccttccagtggcctactatcaggccaggctcaggagaacccaggttatccatattctgatagttcttctattcttggtgagaacccccacataggtatagacatgattgacaacgaccaaggatcaagtagtcccagtaatgatgaggcagcaatggctgtcatcatgagcctcttggaagcagatgctggactgggtggccctgttgactttagtgacttgccatggccgctgtaaacactacatgttgctttggcaacagctatagtatcaaagtgcattactggtggagttttacagtctgtgaagcttactggataaggagagaatagcttttatgtactgacttcataaaagccatctcagagccattgatacaagtcaatcttactatatgtaacttcagacaaagtggaactaagcctgctccagtgtttcctcatcattgattattgggctagctgtggatagcttgcattaattgtatattttggattctgtttgtgttgaattttttaatcattgtgcacagaagcatcattggtagcttttatatgcaaatggtcatttcagatgtatggtgtttttacactacaaagaagtcccccatgtggatatttcttatactaattgtatcataaagccgtttattcttccttgtaagaatcctttactataaatatgggttaaagtataatgtactagacagttaaatatttttaataaatgtttcccttgttctataaa

SEQ ID NO: 10832 - DNA, 2389 bp, Homo sapiens
ggagatgagcaaggaggccgtgagcctgtgggcgctcactgtgtccctccaacccccagtccccttgtgtgtctgcagagagatgacaggatcaggcagaagaaaacagcaatgtgtaactttgccattcatctccagagaattatgtttttatcttttgctttttcctccccccaggttagaatatacagaacaccaaggaaggataaaaaatgcaagggaagctcacagtcagattgaaaagcggcgtcgggataaaatgaacagttttatagatgaattggcttctttggtaccaacatgcaacgcaatgtccaggaaattagataaacttactgtgctaaggatggctgttcagcacatgaaaacattaagaggtgccaccaatccatacacagaagcaaactacaaaccaacttttctatcagacgatgaattgaaacacctcattctcagggcagcagatggatttttgtttgtcgtaggatgtgaccgagggaagatactctttgtctcagagtctgtcttcaagatcctcaactacagccagaatgatctgattggtcagagtttgtttgactacctgcatcctaaagatattgccaaagtcaaggagcagctctcctcctctgacaccgcaccccgggagcggctcatagatgcaaaaactggacttccagttaaaacagatataacccctgggccatctcgattatgttctggagcacgacgttctttcttctgtaggatgaagtgtaacaggccttcagtaaaggttgaagacaaggacttcccctctacctgctcaaagaaaaaagcagatcgaaaaagcttctgcacaatccacagcacaggctatttgaaaagctggccacccacaaagatggggctggatgaagacaacgaaccagacaatgaggggtgtaacctcagctgcctcgtcgcaattggacgactgcattctcatgtagttccacaaccagtgaacggggaaatcagggtgaaatctatggaatatgtttctcggcacgcgatagatggaaagtttgtttttgtagaccagagggcaacagctattttggcatatttaccacaagaacttctaggcacatcgtgttatgaatattttcaccaagatgacataggacatcttgcagaatgtcataggcaagttttacagacgagagaaaaaattacaactaattgctataaatttaaaatcaaagatggttcttttatcacactacggagtcgatggttcagtttcatgaacccttggaccaaggaagtagaatatattgtctcaactaacactgttgttttagccaacgtcctggaaggcggggacccaaccttcccacagctcacagcatccccccacagcatggacagcatgctgccctctggagaaggtggcccaaagaggacccaccccactgttccagggattccagggggaacccgggctggggcaggaaaaataggccgaatgattgctgaggaaatcatggaaatccacaggataagagggtcatcgccttctagctgtggctccagcccattgaacatcacgagtacgcctccccctgatgcctcttctccaggaggcaagaagattttaaatggagggactccagacattccttccagtggcctactatcaggccaggctcaggagaacccaggttatccatattctgatagttcttctattcttggtgagaacccccacataggtatagacatgattgacaacgaccaaggatcaagtagtcccagtaatgatgaggcagcaatggctgtcatcatgagcctcttggaagcagatgctggactgggtggccctgttgactttagtgacttgccatggccgctgtaaacactacatgttgctttggcaacagctatagtatcaaagtgcattactggtggagttttacagtctgtgaagcttactggataaggagagaatagcttttatgtactgacttcataaaagccatctcagagccattgatacaagtcaatcttactatatgtaacttcagacaaagtggaactaagcctgctccagtgtttcctcatcattgattattgggctagctgtggatagcttgcattaattgtatattttggattctgtttgtgttgaattttttaatcattgtgcacagaagcatcattggtagcttttatatgcaaatggtcatttcagatgtatggtgtttttacactacaaagaagtcccccatgtggatatttcttatactaattgtatcataaagccgtttattcttccttgtaagaatcctttactataaatatgggttaaagtataatgtactagacagttaaatatttttaataaatgtttcccttgttctataaa

SEQ ID NO: 10833 - DNA, 2728 bp, Homo sapiens
agtggtgcgacatttagggaaggcagaaagtaggtcagggacggaggtgcctgtttacccgcgccggactcaccgccgccgccgccgcgggatccgagtgcgggcgcgggcgcgggcgctcccggcgagccacggtggtgctggctagagtgtatacgtttggacccaagcttaacttttccaatgtggaatcctgggccttcattggtttttggaagaagctgaccgcctgaaaagaaattataaaacatgaaaatcgctttgaggtgaccaagtccagaggcccctaactcctcccaagctggatctggggtgtaagaactgtgacttcagatcatccaatggcagaccagagaatggacatttcttcaaccatcagtgatttcatgtccccgggccccaccgacctgctttccagctctcttggtaccagtggtgtggattgcaaccgcaaacggaaaggcagctccactgactaccaagaaagcatggacacagacaaagatgaccctcatggaaggttagaatatacagaacaccaaggaaggataaaaaatgcaagggaagctcacagtcagattgaaaagcggcgtcgggataaaatgaacagttttatagatgaattggcttctttggtaccaacatgcaacgcaatgtccaggaaattagataaacttactgtgctaaggatggctgttcagcacatgaaaacattaagaggtgccaccaatccatacacagaagcaaactacaaaccaacttttctatcagacgatgaattgaaacacctcattctcagggcagcagatggatttttgtttgtcgtaggatgtgaccgagggaagatactctttgtctcagagtctgtcttcaagatcctcaactacagccagaatgatctgattggtcagagtttgtttgactacctgcatcctaaagatattgccaaagtcaaggagcagctctcctcctctgacaccgcaccccgggagcggctcatagatgcaaaaactggacttccagttaaaacagatataacccctgggccatctcgattatgttctggagcacgacgttctttcttctgtaggatgaagtgtaacaggccttcagtaaaggttgaagacaaggacttcccctctacctgctcaaagaaaaaagcagatcgaaaaagcttctgcacaatccacagcacaggctatttgaaaagctggccacccacaaagatggggctggatgaagacaacgaaccagacaatgaggggtgtaacctcagctgcctcgtcgcaattggacgactgcattctcatgtagttccacaaccagtgaacggggaaatcagggtgaaatctatggaatatgtttctcggcacgcgatagatggaaagtttgtttttgtagaccagagggcaacagctattttggcatatttaccacaagaacttctaggcacatcgtgttatgaatattttcaccaagatgacataggacatcttgcagaatgtcataggcaagttttacagacgagagaaaaaattacaactaattgctataaatttaaaatcaaagatggttcttttatcacactacggagtcgatggttcagtttcatgaacccttggaccaaggaagtagaatatattgtctcaactaacactgttgttttagccaacgtcctggaaggcggggacccaaccttcccacagctcacagcatccccccacagcatggacagcatgctgccctctggagaaggtggcccaaagaggacccaccccactgttccagggattccagggggaacccgggctggggcaggaaaaataggccgaatgattgctgaggaaatcatggaaatccacaggataagagggtcatcgccttctagctgtggctccagcccattgaacatcacgagtacgcctccccctgatgcctcttctccaggaggcaagaagattttaaatggagggactccagacattccttccagtggcctactatcaggccaggctcaggagaacccaggttatccatattctgatagttcttctattcttggtgagaacccccacataggtatagacatgattgacaacgaccaaggatcaagtagtcccagtaatgatgaggcagcaatggctgtcatcatgagcctcttggaagcagatgctggactgggtggccctgttgactttagtgacttgccatggccgctgtaaacactacatgttgctttggcaacagctatagtatcaaagtgcattactggtggagttttacagtctgtgaagcttactggataaggagagaatagcttttatgtactgacttcataaaagccatctcagagccattgatacaagtcaatcttactatatgtaacttcagacaaagtggaactaagcctgctccagtgtttcctcatcattgattattgggctagctgtggatagcttgcattaattgtatattttggattctgtttgtgttgaattttttaatcattgtgcacagaagcatcattggtagcttttatatgcaaatggtcatttcagatgtatggtgtttttacactacaaagaagtcccccatgtggatatttcttatactaattgtatcataaagccgtttattcttccttgtaagaatcctttactataaatatgggttaaagtataatgtactagacagttaaatatttttaataaatgtttcccttgttcta

SEQ ID NO: 10834 - DNA, 11585 bp, Homo sapiens
cacactacggagtcgatggttcagtttcatgaacccttggaccaaggaagtagaatatattgtctcaactaacactgttgttttgtaagtacttttcctatatctgaagctccccttgcttcaaacagatgcctagggttcctcatctgggaaatggggtgcaggcaacatccagtatcacatcctttaatgccatcttgctaatacctgtgaagcctcaggactggcagaagctagaaaggattgttaacaaagggacaagcttcaggacttgtaccatgcaggccctggcttatgaaactgctccaggaaatagcaacatttccttccagataaagcagctaacctttgaattccacaggccctgcaccctaggcatccacttgtgctgctgtggaggaaggggttggcaatctatgaaaggctcattcaggcactagctcacactggccttggctgaggatggggaggtctccatacctgtcaggcagggggcccaagcactggcagctggaatgccatctcaaaaggctgctacctgctagatgagcagagggaggtgaaggagcctctctttggccaggcctgctccccacttttccttccccatagtgtccaaaaccccacctatggtaagagctgtgtgaggggccggggctaggtgcactgcaggctggcaggaggaggtgctgtaatgatggcagtaggttactgcagccaccacctctgctgaactgtgtcccacacatattaggaaggcctaggcaggcagtggggccaaaggccaggatgctatccattatattatcaaacagtgagacctgtttacccactcagacagacacttcattttctggcctgtccaggtccagagtggacaccggacaccttggccaagttgaatggtgcacagttctgagcaggcctgactcacgtttccttattgctgggatgttcacagagccaacgtcctggaaggcggggacccaaccttcccacagctcacagcatccccccacagcatggacagcatgctgccctctggagaaggtaactatgtgctgctggggccctggggcttgcccgtgggaaggtgcttgtggtcaaatatcctcccctaaagtattcagggtcccctccattcatattctgtggaacaagggaggcctcgaggggatgatgtgcggatttccccatgaatgcagaggacactgtcatgtcactttctctgttgagccggaatactaggagctcactgctgcacttcccaaagctgctggcccctggaagcccttgagctcgcaaactccctactccccttgtgctttcctcctgtgttggctagtggccatgatgtgaagtgctctttcgtgactgtcactaactcctgtggttggcaggcaggtgtctttcggcaccagggtgtgtaccatacccactgggctcccttctcaggctcagccttggccctgcccctgctgtccacgctggactcatccttcctgggaccatccccacatgcatggctgcagcccccatcgatgactcccacatccacatctcctggcccagtctctctcccgagctccagatctgtctctccaaatgcctcatagacagaaccacctggagtctcagaggcacctgaaattcagaatatcccaagctgattttctgcactcccctacctgattggttgtttaagccagaaacctggctgttgtctctcccccattatatctaaacacggagtcctgaaccttctatctcttaaacttcgtcaccactattgctatttcaccctcctcatctgctgcctggattattgcaaatcacttcgcaactctagtccccctctccccaccccatcctccattgtagttcattctccctgccgtggactttctaataacccagttctcatttgtgccttttctgtgtatcgtcctttggtactcctcattcccttgtggaaactgtccaaattcgttagtacggcatccaagaggcccctcatgatcggattggtacctgctgccccagtttcatctatcatgctctcatcatcatttatgatgaattccttggaggagtctcccaagttttaacctgcctcagtgctcctgcacgtgttggttgctgtgcctggaatgctttctcctccttacctctctgccaagctaattcatattcatctctcaagactcagctcggggttaacttgctccagaagctgcacctggccccagatgagttggttgcctcgtgcttgcctgtcaaacttacaacattttgctttagccattgttcatcttgttggttttcctgttaaactgtgagctccttgagggcagggacttgtctctgtaaccctggcacatacagtggtcttcaataaacgttttttttcagtgcatgaagggaaagaattagatgctgtatgaagggaaaaaactggcctcagatcctagaaggaaacttgagcctttccctgctggaatgccttttcctgacaagctgtagccctaaagtccctcaaggcacaactctgatgttgaactgcaaatggatcatgggataaactggttttactttaatacataatagtatttcttcctcagttttcccctttcctactctcagattcctttgttgtaggtggcccaaagaggacccaccccactgttccagggattccagggggaacccgggctggggcaggaaaaataggccgaatgattgctgaggaaatcatggaaatccacaggcaagtaacaccttctagttcctctgttaaaccagtggttctcaacccagggaaattttttcccccaggcaatattttgcaatgtcaggagacatttttggtcttcacaactgggtgggaggttgctacttaaacatcctgtggatagagaccagggatgctgcttgttaaacatcctacagtaaacaggacagttccctcctccccacccaacaaagaattatccaatccaaaatgttagtagtgcctagattaagaaatcctgccttaaataaagaagctaaaccaaaatagcccagcgctaaagagaattcttgagaagacttaactttcttatggctcaaggagcttctcagtgcggatagatgtacctttactttacaggaatgcaggagtagagctgtgaactatcagagtgatctggaccttaacaaaacattcactttttttcaatcaaagagctgcccaggattagtactagaaaccaagcagatcagctagttattactagctgtcttgggagagacttcctttccatatgaaagagaaggagcttagaagcagtccacctgggtctgagtcctgggcctgtctctctacctggctatgctgagacttacttaacctcttgctctctgttgatttaaaccataaaaagaaagcactatttcccaagaattgtgttaggattgtgagggcactcaggaaagttccaggaacacagcctgacatatagtgagtgcttaaaaattaattaaatctgtctttaagagcagtcgagagggaagcagttatcataagtctgtccaaatttggggaatagagaaggtggtaaccagattcttcagaacgaaacttaatgtaacataagaaaaggaagaaaacactgctgccgctggattctctcaggagaattagaggctggcctgttttccaattggccataaaggggctgttatccccctataggtaacacagctcttttccaaccccacaggattagtgggtgtgacttctgcatcaggaaggagacatgagggtagtgtgcagtgtaatcaggttcaaaccctatactttgcatttgcataccctgtattttgcttgagaccatccaagaacagtatcaaacagtccttgacctcaagaattttaaaatcttttataagtctattttctttatgataacaggaaaaagggagggtgcatgggccaaagcaagcaaaagaggaaagatttgaacttggccttagccagggtttgcaataagagtggatgttccctctagaaaagccagggctattcttgagtgggcatgtgagtggcaaattcagggtcaagaaacaagctacctaactgggcaggctttgtgtaggaaggagacacagagctatgataggcgattaagaaacacaagaaatgatactgtgcagtttggaagaaacctgtaagaccccatttgttgtaggatgctgaacaagcatccaaagtcttgtgttacgctttgtggaagttgcattggaatagggagagatgaaggtgggcatgtttgacaactcaggaatgaggccttatcctacagagatgacactgccaaaagagaaatcaatcatctaaggtctagcgtttgaagatgaaatcaggaatgatgaaacagcaattccaagatgagaaacctgggaaaatagtggtttcatagacataagtagagaaaggtgggggacactcagcaatttttccgtaagcaattagcagccgtttgtgcatgctgagaatacatgatatgtagttgtaaactgccgttaagaagcttctaatccagaaagaaaacttgttcactcataaatctagagaactaggcagtacaagaaccaaaagacttctgggtggtggaggagtggtctctgggtcacccaaaagctacattcatccatgtaggagctgagagtcctgtggttacacaactgccatcacactctccctaaactgtagctgcaatgccaagtgatggattctttcctgaggtccttcagcctgacaagtatttaggtggatttacagttctaagtcttcccttctataaatcttctgagagatatgctagataagaaaggcctggacccatttttcatcaaccactgccttcgaaggctgcttttcctgtcactactactaggctaccttttagaccctggtgccgtccatgtcctaagagtattcactagctaaacagtgtttgtggagaaggggacaaattgttttctgtggatcaaagatggaggttgatcttagaagttctcctccaattcacctggattctgtgaggaaataaaactggccacttacttgaaattcaccaactgaatgcaaactccaatccaagggctttgtcagtgagatgcttgactctagggactgcattctagatcaggtgcctgtagaacaaatccagcttgtcatctgtttttgtaaataaagttttattggaacacagccacaccgattcgtatctgtggctgctttcaagctgcagaggcagagttgagcatttgtgacaagacaccatatggcctagagagcctactatctggccccttacagaaaaagcttgccaaaccctaatctagatcttcatcccctttctcacctttaccccttaacaaagcacatacactccactgaaaaaagaaaaggcagtgtaattctcttttctgacaggataagagggtcatcgccttctagctgtggctccagcccattgaacatcacgagtacgcctccccctgatgcctcttctccaggaggcaagaaggtaagactgatgattcttagcctaagctagagaacctcttgcccaagatctgaaatgttgggggtgggagtatggaattgcaactgcgattgctgaaacaatttggactacttcctccttgaagtaaatgcatctgtgtgaggctggatacaaagcatactggtagggctagggaggcttgctgacatcctcagaggctttcttccatgtgagtggaagaagggagaaagaataaggaatggggaactgtcagttcatttaattgagggagcaattcaagagttcccatgagggaaagattattgagtacctcacatagaaaagtttctcattttctgccaggaattttcaagggagaaaatattagtgtctagggcaggcaatggaaacagcaatgccaccagcagtgctttggaaatcaagccatgctttatagctgcagaatacttggggatctgctgcctgggggttccattggtgtgacagcattggatccaagcagtggatcaatcaccagccctcatgaagagcttgctataagactacactataaataggtttaggaaccagtcatttgttttcatctttgctggagaacttataagcctaggcccatcttaatcgtaaattataaatctgtttatattgcctgatgccagtagagcttaggacagtttaaaggccatcattttggacacaatggcttcctttccccatctcctaaaacagagagagagaatatcaggaatttccataggcaggactcctagggcacaaaccatcaaaagcagggcaaggattttcaaaactgagctcctcggaggtttgttcaggttaccaagagctgtggtgttaccaggtgggatgggcgtggggatagttgctaaggagagagggtaagagtagaaatcctgcttctacaagggcagcaatacttcttttttatacaggaatcttctgcaaacatttctatttgaaaaagcgttttgctccccccaaaaaaggttgaaagttaacaaattaatgggtaagactacaaagtaagacctgggttcgaagcttggccttgccatgtgctagttatgtgaacttgtacaactttcaagccctagttttctttataatggagctaataatggttagggtagccagcatctttgcacgaggtcctactgtgagataatatatgtgaaagtgcttggcccaaaataccactgacagatgaagtctgagcttggtgtcccgtgacccccgcccccctgcccacaacacacacactgcttgccagctgtcttcttagctgttcttctgttatacctccaggtccttcctgcatattggatccaccatcttcttagggtggtcttccagtctctgcttcttaagttaacttttaggcacttgacttgactcctggtattaccaaggattctacttcttggttttgaaaggttatcagtccagtataggcttaaatattactcaaagaactttcatatacattgtctcatctcaccttcacaacattatagtgacaagatccaggctcctcagcgttcgttttataagtatggcccccaggctacaatcctgggctcatggcttccaattcttttcacatcaacaactaccagaaatcaaaagctgtgctctgcatcataaagccccagctatttttgaggcacttatgaaaattctcccttttctttgagaagaatggattataaaatggatctgtgagaagaaatttggatgtgttctcacgagatgagtcctgggcagcaggacttataagaaaagcagcttaaacaagacagttaaaactgacagcagtattaaatggtgcaccatacccagccctttccagtcactttcaaatttggaaggtccaaaaatgaaccatttagcctgcagttgtttgtcaggatcaagctaaaaaggaagcctaagtgagcctccataggtcgcaagagagtacagacatccagaagcactaaggaaaattcagataaagcagcagttctacaaatgtcatctgcagtctttttccagaaagagagggggcacaagatccttttaagggtctgcaaggttaaagctattttcttaataacattaaaacgttaattttttccctgtattgataatgtgcactattcatactaaaagcacggttgggtaaaattgctggcattttacaaaaatcagacaagtggcaccaaactatactagtagtcattgtattcttcaccaccacacactcacagtaaaaaaatagtttaaagccagtttcatttaagattgtccatcatggctaggtgcagtggctcacccctgtaatctcagcactctgggaagctgaggcaggcaaactgcttgagtccagcagttccaggcaagtctgggcaacatagagaaatcccatctctactaaaaaatacaaaaaaaattatccaggtgtggtggtgtacctgtaatcccagctactccggggactgaggtgggagaatcacctgagcccaggaggttgaggctgcagtgagctgagattgtgccactgtactccagcctgggcaaccagagtgagaccctatcaaggagggaaggaggaaaggaaggaagggagtgagggagggagggaaaatgtccatcattacttttataaaattctcaagcacacatctttttaatgctctgtgacaaaatgagaagtacacagaacttgtgctgcataccaaagtatgatgtttgtctcaaaaactacttgtgtgattaagttgtgagttgaactagctactattttcattggacaccatttttattgtatatggtcattcggttttgggtatttagaatactttttttttggaaatgaatgaagtgaacctgtcactttaaggaaaatgactgacatttgttgccaatgataaaatctgagctttcaagcaaaaattggaatttttagaaaacttgtctctgctactttgaccttgagatcttcctaaaacttaaaaaatgttgttgatgagatagggagtattaataatagtgatattttgatgctctataatgaaatgtgtcaatatatagaagatctgcataactcagtgaaccaatattttgtaactaaacaatgcaaggtatttcaaaatcatgtaagggtaaaagatccatcctaagtgccaagatataaagagtacaaaacattcattgatatggtttcagattccacattgcaactcacctttaagaaacttctacgtgtcaagttttgaagtggtatcaaaaaagaatacaattatttgaaaagtctattaaaatatgcctcccttttccaactacttatctgtgggaggttggatttccttcatatacttgaatcacaagacgtatctaaatagactgaatggaaaaacatatatgagaatccagttgaaaattattaagccagacattagatttgcaaaaatgtaagataatactctgcctggtaattttttgttactgttttagaaaatagttatttttcattaaaatactattcattatttatgttaacatgtagcgggtttattacatttaagaaatctattagttttaatttcaaatacagtaaatattgataaatacagcctacataagcaaaagttctttggagtcctcaatgatttttttaagagtgtaaaagggtccctagaccaaaacgttgctgtggaaataaagtaagttataatgccacctgctggcaaagcctgaaatcattgctgctcctgaaagcagcagctaccaaactgtttcctcacgtatatccagataggtctcaaagaatgctcttctttgagactcagccaggggaaggcagctggggtgagtgggggagattttgagacagagttctcttactgagtagtagtaataatcctccccagtagcctgtcttaacttaaaccacaggttactgaagttggcacctgtagtataagagatttacttctgttttcttcatttgactccttgagctgtgtctcttcacagcttgttaactccactttttcttcttcagaaatatctgtcactataagatgttttattcccttataggggaaacgtctagctgggctcattgaagtttaggcattggtcctaaagaaatatgtgggcatcatgattccaggcagttgaatgctcttgggattttattcagcctttaagttgcctctgtgggctcactaaaatggagagaaaagaatagttcgggggagaggttttttcttactctgaccatgtctgtctaacagttccttgtttgaaatcatccaatagaaaactgaagccatttgaagcttctccccaccccaccccatgcttcattttccttttggcattgctcataatactgattcaaacttcacacttccctccttttgtttgtagattttaaatggagggactccagacattccttccagtggcctactatcaggccaggctcaggagaacccaggttatccatattctgatagttcttctattcttggtaagtggcatcattattcgtttccattgcaatgagcttgcaaaacatcttacataaagtcaattttaagaactgaactgtgtgaaacaagctaatcctagataaatttgataggaacagaataaaagtttaaaatttgtttaaatctctaaaaagttgaccagtatttgagttttggtggaggtccaagtttgtgcctggaactcaagaggaggctacagctacctagacataggctttctcccatgtggggcataatctcttcagagagagaaggctaatgaaggttcagagataatgcctagaagggtgattagtaagcatatcagaaggtattaaaagtcattaagtgaaaagagtttgcttttcccatcacatccatctttttctcccctgggctttctagatctgtttttttcctaaactctcccttcctatttgcctttctttttgtaactcctcttaactggttacatcagattattaaaataagcttgactcaaatatttttaacatttactaaattttaagcgctttgtacttatttctaaaatgatcatttgattccttagagctgtctcttcacaacgtaaccccacttatttcttacgtatttttaaaaaattggttctttcctctaaaaaacagcgatataaaaaaagatagccatgcagcccaaaaagcagcatctcaccctaccattaaatgtaactttcttattaaaaatgtgcttaggaattgcttacttaatctgaagatgctttaaaaaagaaatcactgaccagtctttatctcctcccacaggtgagaacccccacataggtatagacatgattgacaacgaccaaggatcaagtagtcccagtaatgatgaggcagcaatggctgtcatcatgagcctcttggaagcagatgctggactgggtggccctgttgactttagtgacttgccatggccgctgtaaacactacatgttgctttggcaacagctatagtatcaaagtgcattactggtggagttttacagtctgtgaagcttactggataaggagagaatagcttttatgtactgacttcataaaagccatctcagagccattgatacaagtcaatcttactatatgtaacttcagacaaagtggaactaagcctgctccagtgtttcctcatcattgattattgggctagctgtggatagcttgcattaattgtatattttggattctgtttgtgttgaattttttaatcattgtgcacagaagcatcattggtagcttttatatgcaaatggtcatttcagatgtatggtgtttttacactacaaagaagtcccccatgtggatatttcttatactaattgtatcataaagccgtttattcttccttgtaagaatcctttactataaatatgggttaaagtataatgtactagacagttaaatatttttaataaatgtttcccttgttctat

SEQ ID NO: 10835 - DNA, 3862 bp, Homo sapiens
cacactacggagtcgatggttcagtttcatgaacccttggaccaaggaagtagaatatattgtctcaactaacactgttgttttagccaacgtcctggaaggcggggacccaaccttcccacagctcacagcatccccccacagcatggacagcatgctgccctctggagaaggtggcccaaagaggacccaccccactgttccagggattccagggggaacccgggctggggcaggaaaaataggccgaatgattgctgaggaaatcatggaaatccacaggcaagtaacaccttctagttcctctgttaaaccagtggttctcaacccagggaaattttttcccccaggcaatattttgcaatgtcaggagacatttttggtcttcacaactgggtgggaggttgctacttaaacatcctgtggatagagaccagggatgctgcttgttaaacatcctacagtaaacaggacagttccctcctccccacccaacaaagaattatccaatccaaaatgttagtagtgcctagattaagaaatcctgccttaaataaagaagctaaaccaaaatagcccagcgctaaagagaattcttgagaagacttaactttcttatggctcaaggagcttctcagtgcggatagatgtacctttactttacaggaatgcaggagtagagctgtgaactatcagagtgatctggaccttaacaaaacattcactttttttcaatcaaagagctgcccaggattagtactagaaaccaagcagatcagctagttattactagctgtcttgggagagacttcctttccatatgaaagagaaggagcttagaagcagtccacctgggtctgagtcctgggcctgtctctctacctggctatgctgagacttacttaacctcttgctctctgttgatttaaaccataaaaagaaagcactatttcccaagaattgtgttaggattgtgagggcactcaggaaagttccaggaacacagcctgacatatagtgagtgcttaaaaattaattaaatctgtctttaagagcagtcgagagggaagcagttatcataagtctgtccaaatttggggaatagagaaggtggtaaccagattcttcagaacgaaacttaatgtaacataagaaaaggaagaaaacactgctgccgctggattctctcaggagaattagaggctggcctgttttccaattggccataaaggggctgttatccccctataggtaacacagctcttttccaaccccacaggattagtgggtgtgacttctgcatcaggaaggagacatgagggtagtgtgcagtgtaatcaggttcaaaccctatactttgcatttgcataccctgtattttgcttgagaccatccaagaacagtatcaaacagtccttgacctcaagaattttaaaatcttttataagtctattttctttatgataacaggaaaaagggagggtgcatgggccaaagcaagcaaaagaggaaagatttgaacttggccttagccagggtttgcaataagagtggatgttccctctagaaaagccagggctattcttgagtgggcatgtgagtggcaaattcagggtcaagaaacaagctacctaactgggcaggctttgtgtaggaaggagacacagagctatgataggcgattaagaaacacaagaaatgatactgtgcagtttggaagaaacctgtaagaccccatttgttgtaggatgctgaacaagcatccaaagtcttgtgttacgctttgtggaagttgcattggaatagggagagatgaaggtgggcatgtttgacaactcaggaatgaggccttatcctacagagatgacactgccaaaagagaaatcaatcatctaaggtctagcgtttgaagatgaaatcaggaatgatgaaacagcaattccaagatgagaaacctgggaaaatagtggtttcatagacataagtagagaaaggtgggggacactcagcaatttttccgtaagcaattagcagccgtttgtgcatgctgagaatacatgatatgtagttgtaaactgccgttaagaagcttctaatccagaaagaaaacttgttcactcataaatctagagaactaggcagtacaagaaccaaaagacttctgggtggtggaggagtggtctctgggtcacccaaaagctacattcatccatgtaggagctgagagtcctgtggttacacaactgccatcacactctccctaaactgtagctgcaatgccaagtgatggattctttcctgaggtccttcagcctgacaagtatttaggtggatttacagttctaagtcttcccttctataaatcttctgagagatatgctagataagaaaggcctggacccatttttcatcaaccactgccttcgaaggctgcttttcctgtcactactactaggctaccttttagaccctggtgccgtccatgtcctaagagtattcactagctaaacagtgtttgtggagaaggggacaaattgttttctgtggatcaaagatggaggttgatcttagaagttctcctccaattcacctggattctgtgaggaaataaaactggccacttacttgaaattcaccaactgaatgcaaactccaatccaagggctttgtcagtgagatgcttgactctagggactgcattctagatcaggtgcctgtagaacaaatccagcttgtcatctgtttttgtaaataaagttttattggaacacagccacaccgattcgtatctgtggctgctttcaagctgcagaggcagagttgagcatttgtgacaagacaccatatggcctagagagcctactatctggccccttacagaaaaagcttgccaaaccctaatctagatcttcatcccctttctcacctttaccccttaacaaagcacatacactccactgaaaaaagaaaaggcagtgtaattctcttttctgacaggataagagggtcatcgccttctagctgtggctccagcccattgaacatcacgagtacgcctccccctgatgcctcttctccaggaggcaagaagattttaaatggagggactccagacattccttccagtggcctactatcaggccaggctcaggagaacccaggttatccatattctgatagttcttctattcttggtgagaacccccacataggtatagacatgattgacaacgaccaaggatcaagtagtcccagtaatgatgaggcagcaatggctgtcatcatgagcctcttggaagcagatgctggactgggtggccctgttgactttagtgacttgccatggccgctgtaaacactacatgttgctttggcaacagctatagtatcaaagtgcattactggtggagttttacagtctgtgaagcttactggataaggagagaatagcttttatgtactgacttcataaaagccatctcagagccattgatacaagtcaatcttactatatgtaacttcagacaaagtggaactaagcctgctccagtgtttcctcatcattgattattgggctagctgtggatagcttgcattaattgtatattttggattctgtttgtgttgaattttttaatcattgtgcacagaagcatcattggtagcttttatatgcaaatggtcatttcagatgtatggtgtttttacactacaaagaagtcccccatgtggatatttcttatactaattgtatcataaagccgtttattcttccttgtaagaatcctttactataaatatgggttaaagtataatgtactagacagttaaatatttttaataaatgtttcccttgttctat

SEQ ID NO: 10836 - DNA, 633 bp, Homo sapiens
gacggaggtgcctgtttacccgcgccggactcaccgccgccgccgccgcgggatccgagtgcgggcgcgggcgcgggcgctcccggcgagccacggtggtgctggctagagtgtatacgtttggacccaagcttaacttttccaatgtggaatcctgggccttcattggtttttggaagaagctgaccgcctgaaaagaaattataaaacatgaaaatcgctttgaggtgaccaagtccagaggcccctaactcctcccaagctggatctggggtgtaagaactgtgacttcagatcatccaatggcagaccagagaatggacatttcttcaaccatcagtgatttcatgtccccgggccccaccgacctgctttccagctctcttggtaccagtggtgtggattgcaaccgcaaacggaaaggcagctccactgactaccaagaaagcatggacacagacaaagatgaccctcatggaaggtaccatgaacctagtaatttgaacttcagcatccttatagccattttctttgcactgttacacattctgttacttggggcagcacccatgtcctcaactggagatgagcaaggaggccgtgagcctgtgggcgctcactgtgtccctccaa

SEQ ID NO: 10837 - DNA, 739 bp, Homo sapiens
gagtgcgggcgcgggcgcgggcgctcccggcgagccacggtggtgctggctagagtgtatacgtttggacccaagcttaacttttccaatgtggaatcctgggccttcattggttccgatgtcataggaatctacgctagagggcttcctgtgtgccgggcactgtggtttttggaagaagctgaccgcctgaaaagaaattataaaacatgaaaatcgctttgaggtgaccaagtccagaggcccctaactcctcccaagctggatctggggtgtaagaactgtgacttcagatcatccaatggcagaccagagaatggacatttcttcaaccatcagtgatttcatgtccccgggccccaccgacctgctttccagctctcttggtaccagtggtgtggattgcaaccgcaaacggaaaggcagctccactgactaccaacttgttgacttttcgtttgattcacaggtcgaatttggggagcacaatggctggaggtcagatgcccactaggagatgctatgattaatatagaaagcatggacacagacaaagatgaccctcatggaaggttagaatatacagaacaccaaggaaggataaaaaatgcaagggaagctcacagtcagattgaaaagcggcgtcgggataaaatgaacagttttatagatgaattggcttctttggtaccaacatgcaacgcaatgtccaggaaattagataaacttactgtgctaa

SEQ ID NO: 10838 - DNA, 4687 bp, Homo sapiens
gtttttggaagaagctgaccgcctgaaaagaaattataaaacatgaaaatcgctttgaggtgaccaagtccagaggcccctaactcctcccaagctggatctggggtgtaagaactgtgacttcaggtaacaaagtagtatcccctccctgccccctgtgaactcatgattcttggtagcttgcatggcagttcttcctttaggaagtgtagtttcttccaggaactctgaaacttggggtattctacctcatgcggttgtttggctggtcaaaaaagggagtgggggattctggaggtacttcatgtctgctgcatggcccaagggggccagggctccataaatcaccaagaccctgagggcagggctctgtactcattcctggccctgcttctgtaaatgttaatgacaaaataacaatgtcacccacccaacagggtctttaatatgattaaataatcatgaaatacttcttgaaggataaatcagagagaatagctaggaaatttccaaaaataaagagcagtaggagagtatttgttctgctagctattaaaatgtattctaaagcacagttgtaaaaacagtatagtactgtgatggaaataactagatcagaggaacagagtagagagtccagaaataggtgataaatcaataaaggtgtatttcaagttagtggcaatgggatgcatggactagcaaatggtgttagaaaaaatctcctatccattagagggaaataagaaattcctaagcttaggtagtatatcaaaataatttccaaatagcattaaattaaaaaaatcattaaaatcttagaaaaaagaatatttatattattttgggtaagaaaagacttaaaacatgtcacttttggtcccacatacaaatatcgtaaacaaagttaaaaagcaaaagggtgggaaaagtgtttacaacatcaatgatgaacaaagaattaatattcttagtatacaaatttattcgttcattcaatatttattgagcacttagtatgtactagaaagtattctgggcactaagggcacaagcagtaaataatgttcctgttctcctggtacttagaccctgatggagaggactgccagtgactatggtagattattgtaggtcacattttgataagggctaaggacaaaacattacgtaggtggctgggctagggaggcttggcagggtttgcattatgtggatattcaagggggcttcactgatggaatgacatgtgaagaaaaagggaaagtcattgaatgtcgagctgatagcacatttgctgtttttggaatgtcgagctcataggatttgctgatggattgaatgcgggttgtgaaagaaaggagtcagggtggcttctaggtttggggcctggcaaccagaaggattgacataggaatgactgagaggcttggcttggagatagagttttggttatggatgtttcagtttaacatctctcttgtatattcaagtgaggacgtcagggaggtggtcggccataaatatctgtaattcagggtgacatctaggctggagatataaatttgggaattgttgcagtgttgatagtatttgaaagaatgacactagctagagcccctggagagtgtgtgtagatacagaagagggcccaggacatccatgggaccctcccttagagttgagggagatggagccagctaaagagagcaaaaaggagtgaccactgaaatggaaggagtcccgtgagaagggggatctcccaagccaagagacagtgagaagggcgaggtcagctctcctctggatgtgctgatgggcaaggagagaactggccattggatctagcagtgaggaggtcactggtcaacccaacaagggctgttttatgggaatgatggggagagaatctgtttggagttggattattgagaataagaggaaaaaaactggagacagagaaatgggacaatagctggaggaggatggtattcaagtaagtttatttttcccaagatgggagttacataactcttgttttcacccaagtggaaatgattcagtagcgtggggagagtggatggtgcaggattgggctggggtgagggttctgaaatggtggtctcgaggaggtgggagaggtagaatccaggcatgagctggggaagggatcctaagtaggagcatctaaggaggtggtaggtgtgcacctgcctcttttctcagttcactaagaagcagagtcctcagcggagaatggagactaaggagacgatggaagtttgaggagagagggcaaagtatgaagtccttcatagcagaatgagaaaataaatggccaggggaatgaaggattgctgggcggcatgcaggcctctaaggggtatgtttctccagccatgtcctgttacacaggtgaacacggggtaggaggccattgtggtagaaaaacaggacatgagcagacacaacgtaagacagagaaacgcctgtaaagagaaaaagcaacatcagtaatagctgaagaatacaagtaaaaacaatgaggttttctttttttctctttagactggcaagagctcttgttggggatagaaattattgtcgcttttctggagcacagtgttacagtatgttccagaatacaacgtgtgtcccgttttgacctgtcagtcccacctttagaaatttattctaagaaataattgctcaaatgcaaggaaatatatgcacaaagatgttcaccccagcagtgcttatcaaagtgaaaaaatggcagtcatctaaacaggaggcagctggttcacttatctgtcggcctaacagtgatagtgggaaacagtagctcacactcaccctcctgttttgcagatgagggaagttgggtccagagaggggtagtgacagctccagtcctactccacggagctcagaccccctggctgtaggcaggcaccctgcccaacctcttcaactgggcttggagtcagagtcccttgcaaggcacttgtcaagcccttttcaagggccggtttgcttaatgcttttaaaatacgagttctcaaaatgttttgcaaatttgtttacaatgtcttcatttcatctcatggctttccttgcaaaggatgctgacagtggggggaaaacaggccgactgcctggccgtgatagaggggaccatattttcctgattcccaagtaagacttacagtggaagaaaggatattttctgctttcttacagtgtttacaaaagtcataacaggatgtgaggactatctggctgcaacatctgtcaccccattggtcgccagagttgattgggctgatctggctggttaggcaggtgtcccattcctccctcaccactccatgtgcgtccctcccaaagctgtatgctcagaaaggatgaccatccccgatagaggaggactggtctttggtcaagggtatatgagtagctgcaatcttctgctagggacccccaaacaagctctcaaaagtcataacaggagtacaaagataataaggaacttgcatttatttgtttccttgatcatatgtttattgattagaagaaaataaaattagcagccagccgtggtggctcacacttgaaatctcagcactttgggaggctgagacgggcagatctcttgaggtccagagttcaagaccagcctggccaacatggtgaaaccccatctctactaaaaatacaaatattagccaggtgtggtggtgtatgcctttagtcccagcttcccagcgttttggatggctgaggcacgagagtcacttgaacctgggaggtggaggtggtagtgagctgagattgcaccactgcactccagcctgggtgacagagtgagactttgtctcaaaacaaataaaaaataaaaataaaataaaattagctttgtgtgtggagaaaagggaggaaaaataattagcattgtcagagaacatctgggttatttggtcccctccgtgggaactgccctgggttttcacttctagagtttctggttctggtttaatttttccacgccacagcacagggaccgagaagctgctcagcttctctaggcttttatgtcttcaccagaaaaatgagcgggtgggcttaaatttcctacaaaaactcttaaaataaatatgatgctctttccattctatcacatgcctgttctgggtccgggggtgtgagagatgcattagtgctgctgtaaaccagccccgggtctccccccccggccccccaccaccaaacccccaagcaccaacctgggttctccaccacttttgagagctcatcgaaataaacacacctttgtgcctcttgtaacaattccagatcatccaatggcagaccagagaatggacatttcttcaaccatcagtgatttcatgtccccgggccccaccgacctgctttccagctctcttggtaccagtggtgtggattgcaaccgcaaacggaaaggcagctccactgactaccagtaaggcctttggggcatgtcttcctcttgttaaacttggtgtcagttctcgggcatggaacatctagcagccagctactgtttcatcctggaaaaggggatgggaataaaaaacccaactctaggtggcgacacagttggtttttggctttaccttcccctagtttgtaagcaagaaggagc

SEQ ID NO: 10839 - DNA, 457 bp, Homo sapiens
gtttttggaagaagctgaccgcctgaaaagaaattataaaacatgaaaatcgctttgaggtgaccaagtccagaggcccctaactcctcccaagctggatctggggtgtaagaactgtgacttcagatcatccaatggcagaccagagaatggacatttcttcaaccatcagtgatttcatgtccccgggccccaccgacctgctttccagctctcttggtaccagtggtgtggattgcaaccgcaaacggaaaggcagctccactgactaccagtaaggcctttggggcatgtcttcctcttgttaaacttggtgtcagttctcgggcatggaacatctagcagccagctactgtttcatcctggaaaaggggatgggaataaaaaacccaactctaggtggcgacacagttggtttttggctttaccttcccctagtttgtaagcaagaaggagc

SEQ ID NO: 10840 - DNA, 13976 bp, Homo sapiens
ggaagctcacagtcagattgaaaagcggcgtcgggataaaatgaacagttttatagatgaattggcttctttggtaccaacatgcaacgcaatgtccaggaaattagataaacttactgtgctaaggatggctgttcagcacatgaaaacattaagaggtgagaccctgggctctattgtcctttatgtccttgcccacaaatgttaccacccttgcctagaatgttcctatccctaaggcagatgtttattacttgcaattatgtagccttcagtagtatgcctttactcttcagcaacagccgtgatgccaaatgaagtgattattgagcttatgtgggttttgacatgcaattttgcagtcacacattctcagagcatagaaactgtgctttgcacgtctctgtatatgcatgtaatcaggctatgtgcctatcagagatgatactgctctgatgtctcacatcttgcctatgtttgtgcctggatcccatccttacaattataacacgcagaaatgtaggtgcacacagtgacacagaaaagtcagttcaaagatgaaaattcatcatggttcctttgaaaagtgagtcatgggttgtgggttctcgcgacattttgttgtcaggaatgaacactgaagatattttcatcttcctggaattttcccgaaccagatccactctttgtgagggaggcagtattttccttcttttctgagtgtggggagggtgagaaaacataggcagaaaagtggaagtgacttatccaaaccacaagagaaatctgaaatatatcaggcattttagtgaatgctgttcctggaattttccatagctagtcttggacttttggaggaaattggaaagtgggcgctcagtcagatctctgacctgcgtggtagaagaattgcgtctttttatatttgcacaaggccaccagaaataagaagtagctggttttgtctgactttagatcattacccaaaaatataaatgttgtatcctgtgctggaagaatggcatttaaaaattcatattagcaaagataacatgggttaaattattataaactaatttctattaaattggaaaaaagtggcaaatctcaagttacagtaaagagcagggatagggatcaataggatggttgcaacacgtcctgtctccttccctccccatggtactttgaattgttacagatccatttccttttattccttcactattctactcgctattctacagactccaaatcatttactgctggcatttttctctgttaagtgattgttctcctgaaaaatgccagattgacagccttttaaacctaagtcttgtcccctttcagtcctgggagtgcgagctgcattgactgaagcaatgcattcctccacattgccacgctcgtttaactcacccctgatgaagagtaactcacattaaatgccttccacaatatatttactcagggcctggaagactgaatggtttcccaagaacatttagagtggtgatttgaaggactaccagacaacccatttaatacagatcttaggaggagggaactctctgaggagcctctaccagtttacttccagagctgccttctttcttagaagcagattgttaaacttccttctattatctcttggttttccctgtaatgagaaaaacaggcttgttaggtctcctgtgggtaacagtgttctctcttccatggaattctctttggcttacaggattctgtccaaagccagatctaggctcatctcagttaaggcctaaacaataaaatttaaataccaggtcatagagactaggccacttacagaaggtttgaggcagcaagttagaatgagacattttctgaatatcaagtataccaattctttctctttttgcccctaaggtgccaccaatccatacacagaagcaaactacaaaccaacttttctatcagacgatgaattgaaacacctcattctcagggtatgttcaattatgggattgttttacaacgtttgtttttataaattttcaagtaagtaccagcatgtgggaatttgatgtttcaacactgagcttttttttttaggcctgcttcctctctcaggtccctccctttatcttattgtttggacaggcttcacatttcttccacaaaaccattctcctcctcttttaacctcgtctagacaaaaatggaaggtctatgccaccgcaatttaaaatcagaagagtcaggatttgttaaaaataagggggatttgagaatcacatttctgcatgaagattttaggaagggactgaaaccaacaacaattgagaatttctcttcacctgatttaaccactagcacaaaaaagtccacctaaatctttacaccaaaatctcatcaaaataacaaaactgtggctcacgcctataatcccagcactttgagaggccaagacgggcagatcacctgaggtcgagtttgagaccagcatggccaacatgttgaaaccctgtctctattaaatatataaaaattagctgggtgtggtggcagatgccttcttgggaggctgagacatgagaattgcttgaacctgggaggtggaggttgcagtaagctgagatcactccactgcactccagcttgggcaacagagtgagactctgtctcaaaaaacaaacaaacttacaaagactagtggtccaaaaaagaaaaataaatgcaagagatatatgctttcacctgcttgacttgagtgctctctctgtcttgctaaatctctgctgggagatggttgaggtggcactatgggaacctgttgtcttccatgaagaattaggtcggcacaaagctctaagttgtgttactaggtaaagtgagattaacttgggaattgaagggaaagaaactggattcagaaacgtgttcttgtagattgtaaacagatgaatagaaaaacgtaactaaaaggaaggatacccgcttccacctcccacaaagtcagggctgaccttacctgcacagccaacagaatcttcctacccatctttgagcagaagtttgcaaagctctagagtagagggtagtccatctggaattttgcatcatcactatccattttcagctctctataagcctggcctgtctgctcactccagcattctctatttatctcctcatgacgtgctatctcaaattggaaagcattcacctgcaaggaccagaagacctgatgaataaatagagtttaatttctcaagtataactggtctggagtaggttatgttgggttgctgcagtggttcaatgaggtcaataggaaccaggttctttgtctttgcactcagccacaccaagctagcatgctagcttgtttccttaatgtagccaggtacctttgccaggtctaagtagccagacccactgtaaaaacaggggtaaatgaagctctagtctggctgtcctttttatcaagaaaggatacaccttcctgaaaactcaacagtggacttcagcttattcaaaagtgtgtcacttggtcacgcctagctgcagggcagggtgcagaaacaagtgtttatagattttccagcctccctggtggagacaggcaagagagaaggggcctgggaatggtgttgggaattggcttccccaacagtgtttgccacacacactttccagagccacatgcatttgctcgattccttccagaagtgactcccacaacccaatatagtgcttcaactgtggtctgattggcctgaggttgaatgggactagtgccttccttgccaaaaaagccatctgattagtactgtatcatttggggcagctgcagtactgcctcctcccccttctctcctgaatatgaattattgttaggtcaggttttttacatcttgtataggtgcttttttgaacttaagataggacttctctttcatttctgtcaaaacctgtttgttgaatggccccacagtccagcttgtcattagtgacccttggaatctttgtgtgacttgtagatccaatacatgcctctgtgcctttcatccttgtttattcataaattcaacaaacatttttgtttacttactagatgcatggcattgttctaggaacatccaaatcaatgataaacactttagggtgggaccaggctcccgatcaagtgagtgatagtcttttggctaccactctcaggacacagttattcaaacacccaactttgcccacctctccatccttttcgtaaagatgtccgtgttctcagagaggatttgctgaggttaaaatatgaccgatgcctgtagcatctcgagagctgccgtcggtgccagcttcatgggcatgtgacctctgcagtttcacaaggccccatgcttggtttaatgccctgtcaccatcttgaaaacgtaatttttgaacaaggatccctgcattttcattttgtactgggccccacaaattatgtaactggtcctgattcccatactggtaacagatctgcagctgtagatgtgataggcctgcctctatgcctttcattcttgcgtattcatgaattcaacaaacccttttgtgtacttactagaggcttggcattgttctaggaacatccaaatcaatgacattttgggctggggtacaggcttgattattttaagaaaaagaatctatgtctttatttcatatatatatatatatatatatatatatatatatatatatgtaaaataattatcaagcagagtcctgtggatggacaaatttaaaaataaataaaacaagctccttttgcagtggcacgtgcttaatcgttttcttgttgctgcttttcttaataattttctatcagatacccatacttaccagggtatggaacaaggattatcatgctatctcagctaaatacttcatgttgggcttgtctcttctactcccttgtttatgcagcactcaagagtgatctctcttgcccgatgaaggttttgtcacctctctagcacgtgtcagtggctgtgaaatactgtccagtcccttatcacttccagggtcccagttccagggacttgcttccacagaaagccaggtctactcagatgatgttcagacagtttggccgcaggagctggacttctgcttttcctcagcaatgcaaaatggacaaactgctttctttactaagtgctttcaaaatatctttaataaagtgtatgtcagggatcagtcaactgtatcagtttacaatgtctacgttagtctacttccccatgttttgaaaactaggcagaccgtaccaaggcctctgtgtcttttattaaccagcaccatcttcccaagagtgaccctgccactggctggcccctgtggctctgtggtgctggtagtgttctcacagcttctgctccttagctgtccttcgggcccggctccttcacagatggtctgctggccagggtgctatggagttggaatgtccagagcctcccctcgctgatgcattcactgctttggaacctgctggctttcctctggagtactgaaatagctttacctgtgttgtcggttcaggcctgaccctgcccagcattacctccagggtgtcacagttcccttctgtccaggtacctttcaagccacattgccacatcaatgaaaagcctcaaaaacacttccatgagatacaagattatctgcaaggcaaacgaggaagtttttaataccctatttgttgacagaatgaggcttccagcagatggtgcttggaaagttacttccccctcactgtcatcccttgcccctgggccagcttagggacctaacttaggaaaggatcctccccagcttccttctggctgagtagcctgccagggtcttaagcaacagtgattctgttcccctctcactcatttcttctgtcccagcacaagtacatgcaccattcttttaccttctggcacattaattcatttcctagttctttgaattaaaccacatcatgaaggcccttttgtggaaaaagagaacagtttctctgtatttttccaaagagcagattaaggaccagtgaataaggtgagaaactagtccactgtgtattagaacgagggagggctgagtcataagagcaagggcatgacagagtggggcacaccctccttgtcaccggaagaccccagcaggagttgagtggttgtatgtctggaaggcagtgggtgggattcacacagcccaagctctcaggcactatagcttgggtatttacctgcttcagtctctttaccaaatgttgtcctatcttaatggctggctttattggaacatttagattttttcctgtatttaaactgaagaaggggtaagaagaatctaagcggggagttttgcttttctgaatgcaaatagtccggccctggatggagggataacatttgagagtagtagttctcagccctatgtacattagaatcacattaacgtggaagtgggatgggtttaaaaataccccagtgatcagccccatgccagaccatcagcataaaaacaaaaacaaaaaacactgctccgaatgttgagaaccactgttttagagagctccctgtacgtggaggttttcaagttgaaggcagatgatggctgagatgttggagaggggattcttgaagagtccttccaaatctcagattctctgactctccatagagttgttattattagagcaatgaaatatgattctctggaccatgataccttcaaaagaacacgtgcaagctgaattctgctttgaaatataacttactttaattggactttcttcctataataattagatgatatgcagaaacacacacacacacacacacacacacacacacacacacaatcttacagttcttcagagacgtttgttttcagcatcctgcactcaggatatcactgaaactgttagtgttcctgtgctttggatgcttagaaagcacatcctctatttgttatcagggtgattacaaattatgtttcctacagtatgagaaattgattatccatttctcctgattaggcagcagatggatttttgtttgtcgtaggatgtgaccgagggaagatactctttgtctcagagtctgtcttcaagatcctcaactacagccaggtattgttcatgctcctgttgatggtgggcagcctcacagcagtcagaagtgtcactcaattttgtcagaataattatagtatacaagtcacatgtgaacttcttccagaaaattcttaacttcttaacagataaattaatttagacttagaacaatcttgtaatatgttccgtattccccccattgaaagatctgactctgatctgatcgatagcattatggctttcttctattgctgcaaaataaatatcccacaatatgtggcaaggacagagggtaagaggctatctgacaagggagaaaggtaggcaggttaacacaataccagagaatacgtcacttggaaatccactccatactgtgtttgcagtgctgtgtcacttcttagctctattgaacctcagtttactctaaaaattaatgataacttataggatcaaataagagtaacatttataaacgcttctagaacagaacttttcacctattatgtcccccagagtttttattcatttattcattcactcacacactggtatttgcatggaagcttggtaggcagaagacttgaagaatcaaaatgacatttatgtaaattagaattaatgtaaatttaatttttccaaagatttctgctctttttagtctcagagcaaagttatggaggaagttgctgttatctctgttaatagacaaggtgactgaagcatatgatatgcgtgacttgcttgagaacagagaggctgaacagcagagctggaatcagagcccacccctatcttctgccttctgaggtcttacaggggaattccaagattgttgccttagaagagcataaactgtttatataattgagggttttcccgtcatgttatcaaaaccaacctccagatgcctccttcctggtgtcaggcaaagtggttggacatatgtacaggttcacataggaaaagtttgaggtctcatgcacaaaaacacaaaggcaacatgcagactgtgcatgcttacttgttgcataattgattttctgcatgcaattgacttgtcatgtttaacatttcatctccccagaatgatctgattggtcagagtttgtttgactacctgcatcctaaagatattgccaaagtcaaggagcagctctcctcctctgacaccgcaccccgggagcggctcatagatgcaaaaagtgagtaccagagaggcctcgcatttcctcagcagcccactcacaggcagccaaccctgagtgagcagagggcgggtgtgtgtgatgggctcagcctttccagtcctacttctctgtcctctttctggggcaccagagctatctttggctaaatggaattatttatgttctttggtcttttacataaaaagaagaaaaaaatctcaatgtccaaatttattgaaaagaagagctatttagactggattctttctgatttttagacttttcttttttctttcagaatctagaaaatcccagttgtatgctcctgagtttaaagggctaagtttgatttgttctcccagaacaaatgggctctatttacctgaattgcacacaggcagcctcataaaagtaagaaaacgtcaactataaatatggtgtttcttcaaccaaagtgttcctccttaggttggctcccccacctggctttcttcttttgcagtagtggaaccaccatccacatcgctccctctgcccccagcttcctgctactgcacacacttctgtgcaaggccccagtagctgtcatctactttagtcctgtgggaggctgtacactcctacagttaagaatgagagaatgaggactctggctgggcgcagtggctcacatctgtaatcccagcacttcgggaggctgaggcaggtggatctcttgaggtcaggggtttgcaaccaacctggccaacatggcaaaaccccgtctctactaataatacaaaaattagacaggtgtggtggtgcgtgcctgtaatccaagctacttgggaggctgaggcaggagagtttcttgaatccaggaggtgggggttgcagtaagctgagattgtaccactgactgcactccagcctgggtaacagagcaagactctgtctcagaaaaaaaaaaaaaaaaaaaaagaatgagaacacaagggagattactgggctcattccggctccaccattcactagctgtgtgaccttgagcaagttacttaacctctctctgtctcagttttctcatttatggaagagtacctatttctttgggttgttgtgaggattgaaagtgttaatgtatataaagcaggcagaacagttcctagcacatagtaagaacagtatcagtgtggcctaatgtcttgctcccaagctgtccacgttaatccctggaaaaaaataccaccagataatctccttcaagtcatctctttcattacagcacaccgcttgttcctaaaagtaaaatgcagactttggtatctgttgttctttatagtctagccttggcttttttaagtgaccttaggagaaaaatatgaatggcatttgggccttgcctttgaggctcttagcatatagtcagagaaatgagacagacagcaccctgcatagtaataggtacagccatagaaatagtgccaggcatagagaacggatgattaattctcatgtgggcgcaaggacaggcatcactgagtagatgacaaccgaggtgggtttgaaaagatgaattaatgtttgccaggtaatgaagggaggaacaaagaggaaacaatctgtgcacaggtgcaggggtgtggagccacatggcttgcttggtgctattggacaaaacgtgcacggaggggaagggctgaaccatgaagaccatttgttctgtggggacacagtgaagagctctgagttgggtggggcaggctcggattggcattctaggggagatcgcagagctggcaatgtgggaggtagatgggatgggaggaagcccagaaggagccctgggcagtggccattcctcggcacacttgctcgtgtgatggccatgggtgtgttttccctcggcttctgtactgacacctagccagtgtttggtaaggaggtgtgctcctcagaatcacctgggagcttttcaacatagtcatgctccacccccagagattctaatttggtttttccagacagcacagtccaataaaaacataatgcaaaccacaaacatgagccacatatataatttcatattttctggtagccagactttaaaaaataaaaataaatgtaaaattaactccaaaatatttcagcatgtaataattataaacaactaataagttcgttcacattcttttatttttctatactgtctttgaaatcctgtgtgtatttaacacttacagcacatttcaattcagaaaagccacatttcaagtgctcagtacctgcatgcagctagtggctaatgcattggacagcacagatctagaatggggtccaggaatctgtaggttgatcatgcatccagggtattctggcctacaagccaggttgagaacttaaggcagtccggctcccaccttgccttcccaatatccatatcctacccatccttcagtgccagcccaagttccttctcctctgggaagcacaggttgtctttgccatttatttggcactaatcatacatcaccctgtcctattattaatcttttcttggtgcacctccatttgccctttgttagccataagcgtctattgggcaagaaccccatactatatttcttttcatccccagagtacctaatccatttatttagtagcacactctgtgatttataaacatttccagactgacaacacacctgtccatgctgcatctgttaaagcctaaacttgggagatatttatctcatgtcatcattataaaacagtgaggcaggcaagaaaaggctttgctcaaggtcacactccccctcctgacagacaacactgctctcagtttatcacattttgtgtattgatttgcagctggacttccagttaaaacagatataacccctgggccatctcgattatgttctggagcacgacgttctttcttctgtaggatgaagtgtaacaggccttcagtaaaggttgaagacaaggacttcccctctacctgctcaaagaaaaaaggtaacaatttaacagtccattaaaaccctgtgacaggtgaagcatgctttctgcagcggagctctcagctgggcgttggttccatggtttctggctggccagagtggcaggtcccaggactgcagacaggaccctgcagtcctccctatgtgtagggcagttgggagcagaggagagagctgaaaagcctgatggcagagatttgtggagaggcctcctctgtttaaattgtgtttcttttaacatgattgaggaagaatactctcagccacaatcctaactgccttatgaacagccaccagtccaccaaaattactctgagctcaccagtgaccttgatgttgttaaatgcgatgaacatttttcctttgtcttccttcttgaagtgttctcttctcctggattccatgaaaccacattcttcttcctcctccccgaccccctgctgctacaggctctcttgctggcccctttgctggctgcccctctctgtcctgggctgcatctctgtctgcagtctctctctgttggtcatgtcatctactccctcagctttaaatgccaacaacttccacattcatatttccagcctagacttgtcttttgaactccagattcataaatatactgcttactaaatcaacctgctttggatatctcaggggagtctccaacaggatacgtgccgaagtaatcacctgagcctctcctccagcataaatggcactgccattcagctggctgctcatgctagaagccggggaggtgccctcacttctgcttcaccaccccactcttcaatcccgttagttatgaagtcctgccacaatgagtcccatctgcaaaagttctctgaaatgtttgtccctttccatgctgcctactttcactcagctccaggctgcccccaactctcaccaggtctcataaagtgtagacccacatgctccccacccccaacacagcagccaggatgatctttttatcagtccccttttaaaaacccttcagtgttccctattgttcttgaagaaaagctcaaaatatttaacgtgaccatgcagcccccgaccctgccactaagcacatgtgagccatgttgacttcctttgatgcctcaagccccttctgggcaatgcttctgcacatgctgtcgcttcctggttggaatttcttccctctccccatgaactcccttcacatggctctctccaacctcagactgccttatgtcttatagcaccctactggtttgctttctagtgctttcttatacttgctgttatatagttatttgtgcgattatttgtttaaagtctgtctcccccactaggctgtaaactccacaagggcatgtctgatttgtttttcactctattccagtaaccagcacagactccacgcttggcagacactccatagtggtttgcttgttggtgaagtctataggtgctccacatttaatgtgtcccaaatcgaactatcttttttctctctctctcttctagtctgttttctttcttctctgagtcagtgaatgacaccagcaaccacccaatccagaaaagttagagtcatcttcatttgtttctttcccttaagcctgatattcacagcaaatcccaacagtttgatctcagaaatttctcctgctttctttctctgctccctctcatcttcactgcactgccatagttcagtcctcctaatctcttgctgtattatagccactggcccctgaatcagccttcctacttctgttttctactgtcttccagttcatacgtcactctgctcctacagcatccaaaccacaatttgattttgctgtttctgcacttaaatacctgtagatgctctccatttcctgccttaaaaagacagaccaacattggttagaaagtaatccaaggcccttttaatcttcctccaacctgcctttccaatttgcccctcactcccagtacctccaatttcacttcaaccacacagagctcttggccagttcctatataggctgtgcctctgtgcctgtgtacgtcatcagcctttatacattctagtccctcagccactgctcatccttcttgatccacctcctctactggttttttgggggagccttcctctccctaggaagagttagatattccttccttggtgtatgtaatgaatgtccatggtataactggccctacttaagcattctgacactggatgacagtttgtttctctttccgtctgcccctttcattagatgcttacttctggagagtgaagccttgatttttttttattttttgactccctacctacatcccatcccaccatcggccgtgtacacctccatggcccaaacctagtgctgacactaaccacgaactttgctttctagcagatcgaaaaagcttctgcacaatccacagcacaggctatttgaaaagctggccacccacaaagatggggctggatgaagacaacgaaccagacaatgaggggtgtaacctcagctgcctcgtcgcaattggacgactgcattctcatgtagttccacaaccagtgaacggggaaatcagggtgaaatctatggaatatgtttctcggcacgcgatagatggaaagtttgtttttgtagaccagag

SEQ ID NO: 10841 - DNA, 764 bp, Homo sapiens
ggaagctcacagtcagattgaaaagcggcgtcgggataaaatgaacagttttatagatgaattggcttctttggtaccaacatgcaacgcaatgtccaggaaattagataaacttactgtgctaaggatggctgttcagcacatgaaaacattaagaggtgccaccaatccatacacagaagcaaactacaaaccaacttttctatcagacgatgaattgaaacacctcattctcagggcagcagatggatttttgtttgtcgtaggatgtgaccgagggaagatactctttgtctcagagtctgtcttcaagatcctcaactacagccagaatgatctgattggtcagagtttgtttgactacctgcatcctaaagatattgccaaagtcaaggagcagctctcctcctctgacaccgcaccccgggagcggctcatagatgcaaaaagatgaagtgtaacaggccttcagtaaaggttgaagacaaggacttcccctctacctgctcaaagaaaaaagatcgaaaaagcttctgcacaatccacagcacaggctatttgaaaagctggccacccacaaagatggggctggatgaagacaacgaaccagacaatgaggggtgtaacctcagctgcctcgtcgcaattggacgactgcattctcatgtagttccacaaccagtgaacggggaaatcagggtgaaatctatggaatatgtttctcggcacgcgatagatggaaagtttgtttttgtagaccagag

SEQ ID NO: 10842 - DNA, 13174 bp, Homo sapiens
agggcaacagctattttggcatatttaccacaagaacttctaggcacatcgtgttatgaatattttcaccaagatgacataggacatcttgcagaatgtcataggcaaggtaagctaggatgtatgaaagatcttaagttgaaagtgtccccttgcttctagactagtcaacatgaccttccagggaaatctgtccactgaggatgtagagtcagccagcctaggactcttcaggtcagaacatctgtgtgaagaggaagctgatacctgcaggcactgtttatcccccttgtagttgccctgtgctgactgcatggcagtttctgaaagacatctcttgttcagagggttttcccagaccctgtaaagatttagtatggcccagactgatctgattctcttttccattcaagcctgcactacctcctgtgttttctgtcttgactaatgctgtggcttcatgtgcaggctcctgagagagaccaacattgaccccttctttcactgtgtctccaccagatcctgttcattcacctcagacatgcatttccaaaagtctactttttaccacctctgccatcaccctggttcaggccctcgtgcctacttagagacctgtgatagacttctcagggtttctctgatccctctcacccccagttcatcttccatagttatcctatttatccccagatagattgagcctggtaacatcagcctgcttaaaaacctcctgctttagactcaagcccaaatgcttttgacaggcaatcaaatgtgagaccttccaccttctggccccagcccacctcctcagtttcagtccccatccctgcctgcagaggcctgtgctccaggcacactgacctcactggcctctccccaaccagaccctgctgctcctcaggcactgctgggttcttccctccctccttctcttggcaaactcgtgttcatccctcaaggctctgatctcttctccctgtatagccttccctcactactcttcttgagggcaggagtcatagcctgtctcctcttgtatctccagtgcctggcacatgagaagggctcattacatgttacatgaaagaatgaggttgaataggtgagtagcctctgttgatttggatgttcttagaaatgagataagttctatattgcccttgggctttgtgattgagataaagcatgacattttggacagtgccttctcatttgctggtggtcatgttagagctgattccagttagatgtataacatgcagtcagtaattccctagagcctcaattttacagactatggaaaatcatgacagcttcacaaatgaattgaaaggctctgagttagaccctcagaaacaacctatttcctgagtgttgaccactgcagtttccttggcttactaaagagcgatgtcgttggagctcaagtacctttaatattttgtattggatgtcctgtttaatactttggtctgagaaaacaacaatgtccatgttttctttacattttcagttttacagacgagagaaaaaattacaactaattgctataaatttaaaatcaaagatggttcttttatcacactacggagtcgatggttcagtttcatgaacccttggaccaaggaagtagaatatattgtctcaactaacactgttgttttgtaagtacttttcctatatctgaagctccccttgcttcaaacagatgcctagggttcctcatctgggaaatggggtgcaggcaacatccagtatcacatcctttaatgccatcttgctaatacctgtgaagcctcaggactggcagaagctagaaaggattgttaacaaagggacaagcttcaggacttgtaccatgcaggccctggcttatgaaactgctccaggaaatagcaacatttccttccagataaagcagctaacctttgaattccacaggccctgcaccctaggcatccacttgtgctgctgtggaggaaggggttggcaatctatgaaaggctcattcaggcactagctcacactggccttggctgaggatggggaggtctccatacctgtcaggcagggggcccaagcactggcagctggaatgccatctcaaaaggctgctacctgctagatgagcagagggaggtgaaggagcctctctttggccaggcctgctccccacttttccttccccatagtgtccaaaaccccacctatggtaagagctgtgtgaggggccggggctaggtgcactgcaggctggcaggaggaggtgctgtaatgatggcagtaggttactgcagccaccacctctgctgaactgtgtcccacacatattaggaaggcctaggcaggcagtggggccaaaggccaggatgctatccattatattatcaaacagtgagacctgtttacccactcagacagacacttcattttctggcctgtccaggtccagagtggacaccggacaccttggccaagttgaatggtgcacagttctgagcaggcctgactcacgtttccttattgctgggatgttcacagagccaacgtcctggaaggcggggacccaaccttcccacagctcacagcatccccccacagcatggacagcatgctgccctctggagaaggtaactatgtgctgctggggccctggggcttgcccgtgggaaggtgcttgtggtcaaatatcctcccctaaagtattcagggtcccctccattcatattctgtggaacaagggaggcctcgaggggatgatgtgcggatttccccatgaatgcagaggacactgtcatgtcactttctctgttgagccggaatactaggagctcactgctgcacttcccaaagctgctggcccctggaagcccttgagctcgcaaactccctactccccttgtgctttcctcctgtgttggctagtggccatgatgtgaagtgctctttcgtgactgtcactaactcctgtggttggcaggcaggtgtctttcggcaccagggtgtgtaccatacccactgggctcccttctcaggctcagccttggccctgcccctgctgtccacgctggactcatccttcctgggaccatccccacatgcatggctgcagcccccatcgatgactcccacatccacatctcctggcccagtctctctcccgagctccagatctgtctctccaaatgcctcatagacagaaccacctggagtctcagaggcacctgaaattcagaatatcccaagctgattttctgcactcccctacctgattggttgtttaagccagaaacctggctgttgtctctcccccattatatctaaacacggagtcctgaaccttctatctcttaaacttcgtcaccactattgctatttcaccctcctcatctgctgcctggattattgcaaatcacttcgcaactctagtccccctctccccaccccatcctccattgtagttcattctccctgccgtggactttctaataacccagttctcatttgtgccttttctgtgtatcgtcctttggtactcctcattcccttgtggaaactgtccaaattcgttagtacggcatccaagaggcccctcatgatcggattggtacctgctgccccagtttcatctatcatgctctcatcatcatttatgatgaattccttggaggagtctcccaagttttaacctgcctcagtgctcctgcacgtgttggttgctgtgcctggaatgctttctcctccttacctctctgccaagctaattcatattcatctctcaagactcagctcggggttaacttgctccagaagctgcacctggccccagatgagttggttgcctcgtgcttgcctgtcaaacttacaacattttgctttagccattgttcatcttgttggttttcctgttaaactgtgagctccttgagggcagggacttgtctctgtaaccctggcacatacagtggtcttcaataaacgttttttttcagtgcatgaagggaaagaattagatgctgtatgaagggaaaaaactggcctcagatcctagaaggaaacttgagcctttccctgctggaatgccttttcctgacaagctgtagccctaaagtccctcaaggcacaactctgatgttgaactgcaaatggatcatgggataaactggttttactttaatacataatagtatttcttcctcagttttcccctttcctactctcagattcctttgttgtaggtggcccaaagaggacccaccccactgttccagggattccagggggaacccgggctggggcaggaaaaataggccgaatgattgctgaggaaatcatggaaatccacaggcaagtaacaccttctagttcctctgttaaaccagtggttctcaacccagggaaattttttcccccaggcaatattttgcaatgtcaggagacatttttggtcttcacaactgggtgggaggttgctacttaaacatcctgtggatagagaccagggatgctgcttgttaaacatcctacagtaaacaggacagttccctcctccccacccaacaaagaattatccaatccaaaatgttagtagtgcctagattaagaaatcctgccttaaataaagaagctaaaccaaaatagcccagcgctaaagagaattcttgagaagacttaactttcttatggctcaaggagcttctcagtgcggatagatgtacctttactttacaggaatgcaggagtagagctgtgaactatcagagtgatctggaccttaacaaaacattcactttttttcaatcaaagagctgcccaggattagtactagaaaccaagcagatcagctagttattactagctgtcttgggagagacttcctttccatatgaaagagaaggagcttagaagcagtccacctgggtctgagtcctgggcctgtctctctacctggctatgctgagacttacttaacctcttgctctctgttgatttaaaccataaaaagaaagcactatttcccaagaattgtgttaggattgtgagggcactcaggaaagttccaggaacacagcctgacatatagtgagtgcttaaaaattaattaaatctgtctttaagagcagtcgagagggaagcagttatcataagtctgtccaaatttggggaatagagaaggtggtaaccagattcttcagaacgaaacttaatgtaacataagaaaaggaagaaaacactgctgccgctggattctctcaggagaattagaggctggcctgttttccaattggccataaaggggctgttatccccctataggtaacacagctcttttccaaccccacaggattagtgggtgtgacttctgcatcaggaaggagacatgagggtagtgtgcagtgtaatcaggttcaaaccctatactttgcatttgcataccctgtattttgcttgagaccatccaagaacagtatcaaacagtccttgacctcaagaattttaaaatcttttataagtctattttctttatgataacaggaaaaagggagggtgcatgggccaaagcaagcaaaagaggaaagatttgaacttggccttagccagggtttgcaataagagtggatgttccctctagaaaagccagggctattcttgagtgggcatgtgagtggcaaattcagggtcaagaaacaagctacctaactgggcaggctttgtgtaggaaggagacacagagctatgataggcgattaagaaacacaagaaatgatactgtgcagtttggaagaaacctgtaagaccccatttgttgtaggatgctgaacaagcatccaaagtcttgtgttacgctttgtggaagttgcattggaatagggagagatgaaggtgggcatgtttgacaactcaggaatgaggccttatcctacagagatgacactgccaaaagagaaatcaatcatctaaggtctagcgtttgaagatgaaatcaggaatgatgaaacagcaattccaagatgagaaacctgggaaaatagtggtttcatagacataagtagagaaaggtgggggacactcagcaatttttccgtaagcaattagcagccgtttgtgcatgctgagaatacatgatatgtagttgtaaactgccgttaagaagcttctaatccagaaagaaaacttgttcactcataaatctagagaactaggcagtacaagaaccaaaagacttctgggtggtggaggagtggtctctgggtcacccaaaagctacattcatccatgtaggagctgagagtcctgtggttacacaactgccatcacactctccctaaactgtagctgcaatgccaagtgatggattctttcctgaggtccttcagcctgacaagtatttaggtggatttacagttctaagtcttcccttctataaatcttctgagagatatgctagataagaaaggcctggacccatttttcatcaaccactgccttcgaaggctgcttttcctgtcactactactaggctaccttttagaccctggtgccgtccatgtcctaagagtattcactagctaaacagtgtttgtggagaaggggacaaattgttttctgtggatcaaagatggaggttgatcttagaagttctcctccaattcacctggattctgtgaggaaataaaactggccacttacttgaaattcaccaactgaatgcaaactccaatccaagggctttgtcagtgagatgcttgactctagggactgcattctagatcaggtgcctgtagaacaaatccagcttgtcatctgtttttgtaaataaagttttattggaacacagccacaccgattcgtatctgtggctgctttcaagctgcagaggcagagttgagcatttgtgacaagacaccatatggcctagagagcctactatctggccccttacagaaaaagcttgccaaaccctaatctagatcttcatcccctttctcacctttaccccttaacaaagcacatacactccactgaaaaaagaaaaggcagtgtaattctcttttctgacaggataagagggtcatcgccttctagctgtggctccagcccattgaacatcacgagtacgcctccccctgatgcctcttctccaggaggcaagaaggtaagactgatgattcttagcctaagctagagaacctcttgcccaagatctgaaatgttgggggtgggagtatggaattgcaactgcgattgctgaaacaatttggactacttcctccttgaagtaaatgcatctgtgtgaggctggatacaaagcatactggtagggctagggaggcttgctgacatcctcagaggctttcttccatgtgagtggaagaagggagaaagaataaggaatggggaactgtcagttcatttaattgagggagcaattcaagagttcccatgagggaaagattattgagtacctcacatagaaaagtttctcattttctgccaggaattttcaagggagaaaatattagtgtctagggcaggcaatggaaacagcaatgccaccagcagtgctttggaaatcaagccatgctttatagctgcagaatacttggggatctgctgcctgggggttccattggtgtgacagcattggatccaagcagtggatcaatcaccagccctcatgaagagcttgctataagactacactataaataggtttaggaaccagtcatttgttttcatctttgctggagaacttataagcctaggcccatcttaatcgtaaattataaatctgtttatattgcctgatgccagtagagcttaggacagtttaaaggccatcattttggacacaatggcttcctttccccatctcctaaaacagagagagagaatatcaggaatttccataggcaggactcctagggcacaaaccatcaaaagcagggcaaggattttcaaaactgagctcctcggaggtttgttcaggttaccaagagctgtggtgttaccaggtgggatgggcgtggggatagttgctaaggagagagggtaagagtagaaatcctgcttctacaagggcagcaatacttcttttttatacaggaatcttctgcaaacatttctatttgaaaaagcgttttgctccccccaaaaaaggttgaaagttaacaaattaatgggtaagactacaaagtaagacctgggttcgaagcttggccttgccatgtgctagttatgtgaacttgtacaactttcaagccctagttttctttataatggagctaataatggttagggtagccagcatctttgcacgaggtcctactgtgagataatatatgtgaaagtgcttggcccaaaataccactgacagatgaagtctgagcttggtgtcccgtgacccccgcccccctgcccacaacacacacactgcttgccagctgtcttcttagctgttcttctgttatacctccaggtccttcctgcatattggatccaccatcttcttagggtggtcttccagtctctgcttcttaagttaacttttaggcacttgacttgactcctggtattaccaaggattctacttcttggttttgaaaggttatcagtccagtataggcttaaatattactcaaagaactttcatatacattgtctcatctcaccttcacaacattatagtgacaagatccaggctcctcagcgttcgttttataagtatggcccccaggctacaatcctgggctcatggcttccaattcttttcacatcaacaactaccagaaatcaaaagctgtgctctgcatcataaagccccagctatttttgaggcacttatgaaaattctcccttttctttgagaagaatggattataaaatggatctgtgagaagaaatttggatgtgttctcacgagatgagtcctgggcagcaggacttataagaaaagcagcttaaacaagacagttaaaactgacagcagtattaaatggtgcaccatacccagccctttccagtcactttcaaatttggaaggtccaaaaatgaaccatttagcctgcagttgtttgtcaggatcaagctaaaaaggaagcctaagtgagcctccataggtcgcaagagagtacagacatccagaagcactaaggaaaattcagataaagcagcagttctacaaatgtcatctgcagtctttttccagaaagagagggggcacaagatccttttaagggtctgcaaggttaaagctattttcttaataacattaaaacgttaattttttccctgtattgataatgtgcactattcatactaaaagcacggttgggtaaaattgctggcattttacaaaaatcagacaagtggcaccaaactatactagtagtcattgtattcttcaccaccacacactcacagtaaaaaaatagtttaaagccagtttcatttaagattgtccatcatggctaggtgcagtggctcacccctgtaatctcagcactctgggaagctgaggcaggcaaactgcttgagtccagcagttccaggcaagtctgggcaacatagagaaatcccatctctactaaaaaatacaaaaaaaattatccaggtgtggtggtgtacctgtaatcccagctactccggggactgaggtgggagaatcacctgagcccaggaggttgaggctgcagtgagctgagattgtgccactgtactccagcctgggcaaccagagtgagaccctatcaaggagggaaggaggaaaggaaggaagggagtgagggagggagggaaaatgtccatcattacttttataaaattctcaagcacacatctttttaatgctctgtgacaaaatgagaagtacacagaacttgtgctgcataccaaagtatgatgtttgtctcaaaaactacttgtgtgattaagttgtgagttgaactagctactattttcattggacaccatttttattgtatatggtcattcggttttgggtatttagaatactttttttttggaaatgaatgaagtgaacctgtcactttaaggaaaatgactgacatttgttgccaatgataaaatctgagctttcaagcaaaaattggaatttttagaaaacttgtctctgctactttgaccttgagatcttcctaaaacttaaaaaatgttgttgatgagatagggagtattaataatagtgatattttgatgctctataatgaaatgtgtcaatatatagaagatctgcataactcagtgaaccaatattttgtaactaaacaatgcaaggtatttcaaaatcatgtaagggtaaaagatccatcctaagtgccaagatataaagagtacaaaacattcattgatatggtttcagattccacattgcaactcacctttaagaaacttctacgtgtcaagttttgaagtggtatcaaaaaagaatacaattatttgaaaagtctattaaaatatgcctcccttttccaactacttatctgtgggaggttggatttccttcatatacttgaatcacaagacgtatctaaatagactgaatggaaaaacatatatgagaatccagttgaaaattattaagccagacattagatttgcaaaaatgtaagataatactctgcctggtaattttttgttactgttttagaaaatagttatttttcattaaaatactattcattatttatgttaacatgtagcgggtttattacatttaagaaatctattagttttaatttcaaatacagtaaatattgataaatacagcctacataagcaaaagttctttggagtcctcaatgatttttttaagagtgtaaaagggtccctagaccaaaacgttgctgtggaaataaagtaagttataatgccacctgctggcaaagcctgaaatcattgctgctcctgaaagcagcagctaccaaactgtttcctcacgtatatccagataggtctcaaagaatgctcttctttgagactcagccaggggaaggcagctggggtgagtgggggagattttgagacagagttctcttactgagtagtagtaataatcctccccagtagcctgtcttaacttaaaccacaggttactgaagttggcacctgtagtataagagatttacttctgttttcttcatttgactccttgagctgtgtctcttcacagcttgttaactccactttttcttcttcagaaatatctgtcactataagatgttttattcccttataggggaaacgtctagctgggctcattgaagtttaggcattggtcctaaagaaatatgtgggcatcatgattccaggcagttgaatgctcttgggattttattcagcctttaagttgcctctgtgggctcactaaaatggagagaaaagaatagttcgggggagaggttttttcttactctgaccatgtctgtctaacagttccttgtttgaaatcatccaatagaaaactgaagccatttgaagcttctccccaccccaccccatgcttcattttccttttggcattgctcataatactgattcaaacttcacacttccctccttttgtttgtagattttaaatggagggactccagacattccttccagtggcctactatcaggccaggctcaggagaacccaggttatccatattctgatagttcttctattcttggtaagtggcatcattattcgtttccattgcaatgagcttgcaaaacatcttacataaagtcaattttaagaactgaactgtgtgaaacaagctaatcctagataaatttgataggaacagaataaaagtttaaaatttgtttaaatctctaaaaagttgaccagtatttgagttttggtggaggtccaagtttgtgcctggaactcaagaggaggctacagctacctagacataggctttctcccatgtggggcataatctcttcagagagagaaggctaatgaaggttcagagataatgcctagaagggtgattagtaagcatatcagaaggtattaaaagtcattaagtgaaaagagtttgcttttcccatcacatccatctttttctcccctgggctttctagatctgtttttttcctaaactctcccttcctatttgcctttctttttgtaactcctcttaactggttacatcagattattaaaataagcttgactcaaatatttttaacatttactaaattttaagcgctttgtacttatttctaaaatgatcatttgattccttagagctgtctcttcacaacgtaaccccacttatttcttacgtatttttaaaaaattggttctttcctctaaaaaacagcgatataaaaaaagatagccatgcagcccaaaaagcagcatctcaccctaccattaaatgtaactttcttattaaaaatgtgcttaggaattgcttacttaatctgaagatgctttaaaaaagaaatcactgaccagtctttatctcctcccacaggtgagaacccccacataggtatagacatgattgacaacgaccaaggatcaagtagtcccagtaatgatgaggcagcaatggctgtcatcatgagcctcttggaagcagatgctggactgggtggccctgttgactttagtgacttgccatggccgctgtaaacactacatgttgctttggcaacagctatagtatcaaagtgcattactggtggagttttacagtctgtgaagcttactggataaggagagaatagcttttatgtactgacttcataaaagccatctcagagccattgatacaagtcaatcttactatatgtaacttcagacaaagtggaactaagcctgctccagtgtttcctcatcattgattattgggctagctgtggatagcttgcattaattgtatattttggattctgtttgtgttgaattttttaatcattgtgcacagaagcatcattggtagcttttatatgcaaatggtcatttcagatgtatggtgtttttacactacaaagaagtcccccatgtggatatttcttatactaattgtatcataaagccgtttattcttccttgtaagaatcctttactataaatatgggttaaagtataatgtactagacagttaaatatttttaataaatgtttcccttgttctataaa

SEQ ID NO: 10843 - DNA, 1421 bp, Homo sapiens
agggcaacagctattttggcatatttaccacaagaacttctaggcacatcgtgttatgaatattttcaccaagatgacataggacatcttgcagaatgtcataggcaagttttacagacgagagaaaaaattacaactaattgctataaatttaaaatcaaagatggttcttttatcacactacggagtcgatggttcagtttcatgaacccttggaccaaggaagtagaatatattgtctcaactaacactgttgttttgtccagagtggacaccggacaccttggccaagttgaatggtgcacagttctgagcaggcctgactcacgtttccttattgctgggatgttcacagagccaacgtcctggaaggcggggacccaaccttcccacagctcacagcatccccccacagcatggacagcatgctgccctctggagaaggtggcccaaagaggacccaccccactgttccagggattccagggggaacccgggctggggcaggaaaaataggccgaatgattgctgaggaaatcatggaaatccacaggataagagggtcatcgccttctagctgtggctccagcccattgaacatcacgagtacgcctccccctgatgcctcttctccaggaggcaagaagattttaaatggagggactccagacattccttccagtggcctactatcaggccaggctcaggagaacccaggttatccatattctgatagttcttctattcttggtgagaacccccacataggtatagacatgattgacaacgaccaaggatcaagtagtcccagtaatgatgaggcagcaatggctgtcatcatgagcctcttggaagcagatgctggactgggtggccctgttgactttagtgacttgccatggccgctgtaaacactacatgttgctttggcaacagctatagtatcaaagtgcattactggtggagttttacagtctgtgaagcttactggataaggagagaatagcttttatgtactgacttcataaaagccatctcagagccattgatacaagtcaatcttactatatgtaacttcagacaaagtggaactaagcctgctccagtgtttcctcatcattgattattgggctagctgtggatagcttgcattaattgtatattttggattctgtttgtgttgaattttttaatcattgtgcacagaagcatcattggtagcttttatatgcaaatggtcatttcagatgtatggtgtttttacactacaaagaagtcccccatgtggatatttcttatactaattgtatcataaagccgtttattcttccttgtaagaatcctttactataaatatgggttaaagtataatgtactagacagttaaatatttttaataaatgtttcccttgttctataaa

SEQ ID NO: 10844 - DNA, 519 bp, Homo sapiens
cgggcgttcggattggctggcgggaagaggtggtgctggctagagtgtatacgtttggacccaagcttaacttttccaatgtggaatcctgggccttcattggttccgatgtcataggaatctacgctagagggcttcctgtgtgccgggcactgtggtttttggaagaagctgaccgcctgaaaagaaattataaaacatgaaaatcgctttgaggtgaccaagtccagaggcccctaactcctcccaagctggatctggggtgtaagaactgtgacttcagatcatccaatggcagaccagagaatggacatttcttcaaccatcagtgatttcatgtccccgggccccaccgacctgctttccagctctcttggtaccagtggtgtggattgcaaccgcaaacggaaaggcagctccactgactaccaagaaagcatggacacagacaaagatgaccctcatggaaggttagaatatacagaacaccaaggaaggataaaaaatgcaagggaagct

SEQ ID NO: 10845 - DNA, 571 bp, Homo sapiens
accctaccccagcaggcgctaaaggagagctgacatgatggataacgaaaaagaagacgctgtccttctattcagggagtttaacatctggaagagccgggagttctttgtgctaaaggccctctacaaagtgcctgagatgcaaaaataagtcactttctctgtcctctcagcaaccgagtcgcatgtcgttatcaaatttttattttctgtaactgtttccttccgtcttgctccgtagacagctttttgcagcagagagcgctgccgcggggctggtgtctactcttcagtaagtggtcaaaacctggctactggaaggaaatgcaatggaatcgctccgcgctcgagtattctctttggaactacgggaatgacagctccagtgggacacttggaggtcatgatgaacgcaaagaacgtggtgctggctagagtgtatacgtttggacccaagcttaacttttccaatgtggaatcctgggccttcattgatcatccaatggcagaccagagaatggacatttcttcaaccatcagtgatttcatgtccccgggccccaccgacctg

SEQ ID NO: 10846 - DNA, 2641 bp, Homo sapiens
ctgggccggcggggagcggattggtcggaaagtaggttagtggtgcgacatttagggaaggcagaaagtaggtcagggacggaggtgcctgtttacccgcgccggactcaccgccgccgccgccgcgggatccgagtgcgggcgcgggcgcgggcgctcccggcgagccacggtggtgctggctagagtgtatacgtttggacccaagcttaacttttccaatgtggaatcctgggccttcattgatcatccaatggcagaccagagaatggacatttcttcaaccatcagtgatttcatgtccccgggccccaccgacctgctttccagctctcttggtaccagtggtgtggattgcaaccgcaaacggaaaggcagctccactgactaccaagaaagcatggacacagacaaagatgaccctcatggaaggttagaatatacagaacaccaaggaaggataaaaaatgcaagggaagctcacagtcagattgaaaagcggcgtcgggataaaatgaacagttttatagatgaattggcttctttggtaccaacatgcaacgcaatgtccaggaaattagataaacttactgtgctaaggatggctgttcagcacatgaaaacattaagaggtgccaccaatccatacacagaagcaaactacaaaccaacttttctatcagacgatgaattgaaacacctcattctcagggcagcagatggatttttgtttgtcgtaggatgtgaccgagggaagatactctttgtctcagagtctgtcttcaagatcctcaactacagccagaatgatctgattggtcagagtttgtttgactacctgcatcctaaagatattgccaaagtcaaggagcagctctcctcctctgacaccgcaccccgggagcggctcatagatgcaaaaactggacttccagttaaaacagatataacccctgggccatctcgattatgttctggagcacgacgttctttcttctgtaggatgaagtgtaacaggccttcagtaaaggttgaagacaaggacttcccctctacctgctcaaagaaaaaagcagatcgaaaaagcttctgcacaatccacagcacaggctatttgaaaagctggccacccacaaagatggggctggatgaagacaacgaaccagacaatgaggggtgtaacctcagctgcctcgtcgcaattggacgactgcattctcatgtagttccacaaccagtgaacggggaaatcagggtgaaatctatggaatatgtttctcggcacgcgatagatggaaagtttgtttttgtagaccagagggcaacagctattttggcatatttaccacaagaacttctaggcacatcgtgttatgaatattttcaccaagatgacataggacatcttgcagaatgtcataggcaagttttacagacgagagaaaaaattacaactaattgctataaatttaaaatcaaagatggttcttttatcacactacggagtcgatggttcagtttcatgaacccttggaccaaggaagtagaatatattgtctcaactaacactgttgttttagccaacgtcctggaaggcggggacccaaccttcccacagctcacagcatccccccacagcatggacagcatgctgccctctggagaaggtggcccaaagaggacccaccccactgttccagggattccagggggaacccgggctggggcaggaaaaataggccgaatgattgctgaggaaatcatggaaatccacaggataagagggtcatcgccttctagctgtggctccagcccattgaacatcacgagtacgcctccccctgatgcctcttctccaggaggcaagaagattttaaatggagggactccagacattccttccagtggcctactatcaggccaggctcaggagaacccaggttatccatattctgatagttcttctattcttggtgagaacccccacataggtatagacatgattgacaacgaccaaggatcaagtagtcccagtaatgatgaggcagcaatggctgtcatcatgagcctcttggaagcagatgctggactgggtggccctgttgactttagtgacttgccatggccgctgtaaacactacatgttgctttggcaacagctatagtatcaaagtgcattactggtggagttttacagtctgtgaagcttactggataaggagagaatagcttttatgtactgacttcataaaagccatctcagagccattgatacaagtcaatcttactatatgtaacttcagacaaagtggaactaagcctgctccagtgtttcctcatcattgattattgggctagctgtggatagcttgcattaattgtatattttggattctgtttgtgttgaattttttaatcattgtgcacagaagcatcattggtagcttttatatgcaaatggtcatttcagatgtatggtgtttttacactacaaagaagtcccccatgtggatatttcttatactaattgtatcataaagccgtttattcttccttgtaagaatcctttactataaatatgggttaaagtataatgtactagacagttaaatatttttaataaatgtttcccttgttctat

SEQ ID NO: 10847 - DNA, 4563 bp, Homo sapiens
aagctggccacccacaaagatggggctggatgaagacaacgaaccagacaatgaggggtgtaacctcagctgcctcgtcgcaattggacgactgcattctcatgtagttccacaaccagtgaacggggaaatcagggtgaaatctatggaatatgtttctcggcacgcgatagatggaaagtttgtttttgtagaccagaggtaagagtctacatactacccttgagcaatgatggtagaggattttcaaccctgatctaaaaagcagagaagactgggccatcagctggcttttctaagaatgaagaaagaaagaaaaagctgggtgcagtggctcacacctcaaatcccagcactttttgaggccaaggtgggtggatcacttgagcccaggagtttgagactagcctgggcaacgtggcaaaaccctgtctcaactaaaaatacaaaaattagccaggcatggtgacacatacctgtagtcccatctactctggaggctgaagcaggaggatcagctgagcctcgggaggtcaaggctgcagtgagctgtgattgcaccactgcacttccgcctgggcaacagagtgagaccctgtttcaaaaaaaaagagacaaatgatgagagtctctgttaaaaaatgagattcaataggatatcatcataaatacagagatttttctgtcattctttggcatatagagacaattaagtggggtgccttgatgtccatggctaaaagaaaaacagtagggatagcatgctgtctgaatctatggaatgttccagaaccattattgtgattgaaattcttttgaatctaggacttggaagcaattatttagtcctgagctgtccaataaaatactcgttggccatggtagcctcccatgtggctaacggcacagacatagaacatttccatcatcacagaaagtcttgttggacagcgttgatctaatccaacctccttattttatggatgaagaacagaggccagcctggggactggtctcctgtaggattcacaattaattggtaatagacctggaccaaggacccaggtgtcccaaatttactgctgcctactgctttccctcagaatatgcacaggctaataatttttctggctactagagacagccacaacatgctggaaaaagagacagcctcagctgtcttgtggcctcagctgctgcagcttctggcatttggttgtcctgataaaaaggaggcagcaaaaactagaagccttgcactgaggtttagatttataccacattttaatctaattaatgtggttccttttttaaagacagatctcagtctgtcacccaggctagatctagtgcagtggcgagatcttggcttactgtagccttgacctcccgggctcaagcagtcctcccacctcagcctcccaggtagctgtgaccataggcatgtgccaccatacccagctcattgttctgtgtttttggtaaagacagggtttcaccatgttgcccaagctaatcttgaattcctgagctcagacaatctgcccaactcggcctcccaaagtgctgggatgacaggcatgaaccaccatgcccgactggttgcaatttttaaagccccctcagatttgatttcttgtgataatagtccctttacaaaggctttgctctgtttccctctatttttatagccttgattaaattcagatgcctgaaaaaaagagagaaagatccacacagtgagccctctgaaaatccatccagctcttttgcctgcagctttgaccttgctctcataggctgtagcagggtttatccattgcaaagttgcaattaatcatctgaatggctttttcttctttaaatattcctttattcccttttagggcaacagctattttggcatatttaccacaagaacttctaggcacatcgtgttatgaatattttcaccaagatgacataggacatcttgcagaatgtcataggcaaggtaagctaggatgtatgaaagatcttaagttgaaagtgtccccttgcttctagactagtcaacatgaccttccagggaaatctgtccactgaggatgtagagtcagccagcctaggactcttcaggtcagaacatctgtgtgaagaggaagctgatacctgcaggcactgtttatcccccttgtagttgccctgtgctgactgcatggcagtttctgaaagacatctcttgttcagagggttttcccagaccctgtaaagatttagtatggcccagactgatctgattctcttttccattcaagcctgcactacctcctgtgttttctgtcttgactaatgctgtggcttcatgtgcaggctcctgagagagaccaacattgaccccttctttcactgtgtctccaccagatcctgttcattcacctcagacatgcatttccaaaagtctactttttaccacctctgccatcaccctggttcaggccctcgtgcctacttagagacctgtgatagacttctcagggtttctctgatccctctcacccccagttcatcttccatagttatcctatttatccccagatagattgagcctggtaacatcagcctgcttaaaaacctcctgctttagactcaagcccaaatgcttttgacaggcaatcaaatgtgagaccttccaccttctggccccagcccacctcctcagtttcagtccccatccctgcctgcagaggcctgtgctccaggcacactgacctcactggcctctccccaaccagaccctgctgctcctcaggcactgctgggttcttccctccctccttctcttggcaaactcgtgttcatccctcaaggctctgatctcttctccctgtatagccttccctcactactcttcttgagggcaggagtcatagcctgtctcctcttgtatctccagtgcctggcacatgagaagggctcattacatgttacatgaaagaatgaggttgaataggtgagtagcctctgttgatttggatgttcttagaaatgagataagttctatattgcccttgggctttgtgattgagataaagcatgacattttggacagtgccttctcatttgctggtggtcatgttagagctgattccagttagatgtataacatgcagtcagtaattccctagagcctcaattttacagactatggaaaatcatgacagcttcacaaatgaattgaaaggctctgagttagaccctcagaaacaacctatttcctgagtgttgaccactgcagtttccttggcttactaaagagcgatgtcgttggagctcaagtacctttaatattttgtattggatgtcctgtttaatactttggtctgagaaaacaacaatgtccatgttttctttacattttcagttttacagacgagagaaaaaattacaactaattgctataaatttaaaatcaaagatggttcttttatcacactacggagtcgatggttcagtttcatgaacccttggaccaaggaagtagaatatattgtctcaactaacactgttgttttgtaagtacttttcctatatctgaagctccccttgcttcaaacagatgcctagggttcctcatctgggaaatggggtgcaggcaacatccagtatcacatcctttaatgccatcttgctaatacctgtgaagcctcaggactggcagaagctagaaaggattgttaacaaagggacaagcttcaggacttgtaccatgcaggccctggcttatgaaactgctccaggaaatagcaacatttccttccagataaagcagctaacctttgaattccacaggccctgcaccctaggcatccacttgtgctgctgtggaggaaggggttggcaatctatgaaaggctcattcaggcactagctcacactggccttggctgaggatggggaggtctccatacctgtcaggcagggggcccaagcactggcagctggaatgccatctcaaaaggctgctacctgctagatgagcagagggaggtgaaggagcctctctttggccaggcctgctccccacttttccttccccatagtgtccaaaaccccacctatggtaagagctgtgtgaggggccggggctaggtgcactgcaggctggcaggaggaggtgctgtaatgatggcagtaggttactgcagccaccacctctgctgaactgtgtcccacacatattaggaaggcctaggcaggcagtggggccaaaggccaggatgctatccattatattatcaaacagtgagacctgtttacccactcagacagacacttcattttctggcctgtccaggtccagagtggacaccggacaccttggccaagttgaatggtgcacagttctgagcaggcctgactcacgtttccttattgctgggatgttcacagagccaacgtcctggaaggcggggacccaaccttcccacagctcacagcatccccccacagcatggacagcatgctgccctctggagaaggtaactatgtgctgctggggccctggggcttgcccgtgggaag

SEQ ID NO: 10848 - DNA, 591 bp, Homo sapiens
aagctggccacccacaaagatggggctggatgaagacaacgaaccagacaatgaggggtgtaacctcagctgcctcgtcgcaattggacgactgcattctcatgtagttccacaaccagtgaacggggaaatcagggtgaaatctatggaatatgtttctcggcacgcgatagatggaaagtttgtttttgtagaccagagggcaacagctattttggcatatttaccacaagaacttctaggcacatcgtgttatgaatattttcaccaagatgacataggacatcttgcagaatgtcataggcaagttttacagacgagagaaaaaattacaactaattgctataaatttaaaatcaaagatggttcttttatcacactacggagtcgatggttcagtttcatgaacccttggaccaaggaagtagaatatattgtctcaactaacactgttgttttagccaacgtcctggaaggcggggacccaaccttcccacagctcacagcatccccccacagcatggacagcatgctgccctctggagaaggtaactatgtgctgctggggccctggggcttgcccgtgggaag

SEQ ID NO: 10849 - DNA, 551 bp, Homo sapiens
gtgcgacatttagggaaggcagaaagtaggtcagggacggaggtgcctgtttacccgcgccggactcaccgccgccgccgccgcgggatccgagtgcgggcgcgggcgcgggcgctcccggcgagccacggtggtgctggctagagtgtatacgtttggacccaagcttaacttttccaatgtggaatcctgggccttcattgatcatccaatggcagaccagagaatggacatttcttcaaccatcagtgatttcatgtccccgggccccaccgacctgctttccagctctcttggtaccagtggtgtggattgcaaccgcaaacggaaaggcagctccactgactaccattcacaggtcgaatttggggagcacaatggctggaggtcagatgcccactaggagatgctatgattaatatagaaagcatggacacagacaaagatgaccctcatggaaggttagaatatacagaacaccaaggaaggataaaaaatgcaagggaagctcacagtcagattgaaaagcggcgtcgggataaaatgaacag

SEQ ID NO: 10850 - DNA, 868 bp, Homo sapiens
gaaagtaggtcagggacggaggtgcctgtttacccgcgccggactcaccgccgccgccgccgcgggatccgagtgcgggcgcgggcgcgggcgctcccggcgagccacggtggtgctggctagagtgtatacgtttggacccaagcttaacttttccaatgtggaatcctgggccttcattggttccgatgtcataggaatctacgctagagggcttcctgtgtgccgggcactgtgatcatccaatggcagaccagagaatggacatttcttcaaccatcagtgatttcatgtccccgggccccaccgacctgctttccagctctcttggtaccagtggtgtggattgcaaccgcaaacggaaaggcagctccactgactaccattcacaggtcgaatttggggagcacaatggctggaggtcagatgcccactaggagatgctatgattaatatagaaagcatggacacagacaaagatgaccctcatggaaggttagaatatacagaacaccaaggaaggataaaaaatgcaagggaagctcacagtcagattgaaaagcggcgtcgggataaaatgaacagttttatagatgaattggcttctttggtaccaacatgcaacgcaatgtccaggaaattagataaacttactgtgctaaggatggctgttcagcacatgaaaacattaagaggtgccaccaatccatacacagaagcaaactacaaaccaacttttctatcagacgatgaattgaaacacctcattctcagggcagcagatggatttttgtttgtcgtaggatgtgaccgagggaagatactctttgtctcagagtctgtcttcaagatcctcaactacagccag

SEQ ID NO: 10851 - DNA, 390 bp, Homo sapiens
ggtggtgctggctagagtgtatacgtttggacccaagcttaacttttccaatgtggaatcctgggccttcattggtttttggaagaagctgaccgcctgaaaagaaattataaaacatgaaaatcgctttgaggtgaccaagtccagaggcccctaactcctcccaagctggatctggggtgtaagaactgtgacttcagatcatccaatggcagaccagagaatggacatttcttcaaccatcagtgatttcatgtccccgggccccaccgacctgctttccagctctcttggtaccagtggtgtggattgcaaccgcaaacggaaaggcagctccactgactaccagttagaatatacagaacaccaaggaaggataaaaaatgcaag

SEQ ID NO: 10852 - DNA, 567 bp, Homo sapiens
ggtgcgacatttagggaaggcagaaagtaggtcagggacggaggtgcctgtttacccgcgccggactcaccgccgccgccgccgcgggatccgagtgcgggcgcgggcgcgggcgctcccggcgagccacggtttttggaagaagctgaccgcctgaaaagaaattataaaacatgaaaatcgctttgaggtgaccaagtccagaggcccctaactcctcccaagctggatctggggtgtaagaactgtgacttcagatcatccaatggcagaccagagaatggacatttcttcaaccatcagtgatttcatgtccccgggccccaccgacctgctttccagctctcttggtaccagtggtgtggattgcaaccgcaaacggaaaggcagctccactgactaccaagaaagcatggacacagacaaagatgaccctcatggaaggttagaatatacagaacaccaaggaaggataaaaaatgcaagggaagctcacagtcagattgaaaagcggcgtcgggataaaatgaacagttttatagatgaattggcttctttggtaccaac

SEQ ID NO: 10853 - DNA, 4325 bp, Homo sapiens
gcacatcctctatttgttatcagggtgattacaaattatgtttcctacagtatgagaaattgattatccatttctcctgattaggcagcagatggatttttgtttgtcgtaggatgtgaccgagggaagatactctttgtctcagagtctgtcttcaagatcctcaactacagccaggtattgttcatgctcctgttgatggtgggcagcctcacagcagtcagaagtgtcactcaattttgtcagaataattatagtatacaagtcacatgtgaacttcttccagaaaattcttaacttcttaacagataaattaatttagacttagaacaatcttgtaatatgttccgtattccccccattgaaagatctgactctgatctgatcgatagcattatggctttcttctattgctgcaaaataaatatcccacaatatgtggcaaggacagagggtaagaggctatctgacaagggagaaaggtaggcaggttaacacaataccagagaatacgtcacttggaaatccactccatactgtgtttgcagtgctgtgtcacttcttagctctattgaacctcagtttactctaaaaattaatgataacttataggatcaaataagagtaacatttataaacgcttctagaacagaacttttcacctattatgtcccccagagtttttattcatttattcattcactcacacactggtatttgcatggaagcttggtaggcagaagacttgaagaatcaaaatgacatttatgtaaattagaattaatgtaaatttaatttttccaaagatttctgctctttttagtctcagagcaaagttatggaggaagttgctgttatctctgttaatagacaaggtgactgaagcatatgatatgcgtgacttgcttgagaacagagaggctgaacagcagagctggaatcagagcccacccctatcttctgccttctgaggtcttacaggggaattccaagattgttgccttagaagagcataaactgtttatataattgagggttttcccgtcatgttatcaaaaccaacctccagatgcctccttcctggtgtcaggcaaagtggttggacatatgtacaggttcacataggaaaagtttgaggtctcatgcacaaaaacacaaaggcaacatgcagactgtgcatgcttacttgttgcataattgattttctgcatgcaattgacttgtcatgtttaacatttcatctccccagaatgatctgattggtcagagtttgtttgactacctgcatcctaaagatattgccaaagtcaaggagcagctctcctcctctgacaccgcaccccgggagcggctcatagatgcaaaaagtgagtaccagagaggcctcgcatttcctcagcagcccactcacaggcagccaaccctgagtgagcagagggcgggtgtgtgtgatgggctcagcctttccagtcctacttctctgtcctctttctggggcaccagagctatctttggctaaatggaattatttatgttctttggtcttttacataaaaagaagaaaaaaatctcaatgtccaaatttattgaaaagaagagctatttagactggattctttctgatttttagacttttcttttttctttcagaatctagaaaatcccagttgtatgctcctgagtttaaagggctaagtttgatttgttctcccagaacaaatgggctctatttacctgaattgcacacaggcagcctcataaaagtaagaaaacgtcaactataaatatggtgtttcttcaaccaaagtgttcctccttaggttggctcccccacctggctttcttcttttgcagtagtggaaccaccatccacatcgctccctctgcccccagcttcctgctactgcacacacttctgtgcaaggccccagtagctgtcatctactttagtcctgtgggaggctgtacactcctacagttaagaatgagagaatgaggactctggctgggcgcagtggctcacatctgtaatcccagcacttcgggaggctgaggcaggtggatctcttgaggtcaggggtttgcaaccaacctggccaacatggcaaaaccccgtctctactaataatacaaaaattagacaggtgtggtggtgcgtgcctgtaatccaagctacttgggaggctgaggcaggagagtttcttgaatccaggaggtgggggttgcagtaagctgagattgtaccactgactgcactccagcctgggtaacagagcaagactctgtctcagaaaaaaaaaaaaaaaaaaaaagaatgagaacacaagggagattactgggctcattccggctccaccattcactagctgtgtgaccttgagcaagttacttaacctctctctgtctcagttttctcatttatggaagagtacctatttctttgggttgttgtgaggattgaaagtgttaatgtatataaagcaggcagaacagttcctagcacatagtaagaacagtatcagtgtggcctaatgtcttgctcccaagctgtccacgttaatccctggaaaaaaataccaccagataatctccttcaagtcatctctttcattacagcacaccgcttgttcctaaaagtaaaatgcagactttggtatctgttgttctttatagtctagccttggcttttttaagtgaccttaggagaaaaatatgaatggcatttgggccttgcctttgaggctcttagcatatagtcagagaaatgagacagacagcaccctgcatagtaataggtacagccatagaaatagtgccaggcatagagaacggatgattaattctcatgtgggcgcaaggacaggcatcactgagtagatgacaaccgaggtgggtttgaaaagatgaattaatgtttgccaggtaatgaagggaggaacaaagaggaaacaatctgtgcacaggtgcaggggtgtggagccacatggcttgcttggtgctattggacaaaacgtgcacggaggggaagggctgaaccatgaagaccatttgttctgtggggacacagtgaagagctctgagttgggtggggcaggctcggattggcattctaggggagatcgcagagctggcaatgtgggaggtagatgggatgggaggaagcccagaaggagccctgggcagtggccattcctcggcacacttgctcgtgtgatggccatgggtgtgttttccctcggcttctgtactgacacctagccagtgtttggtaaggaggtgtgctcctcagaatcacctgggagcttttcaacatagtcatgctccacccccagagattctaatttggtttttccagacagcacagtccaataaaaacataatgcaaaccacaaacatgagccacatatataatttcatattttctggtagccagactttaaaaaataaaaataaatgtaaaattaactccaaaatatttcagcatgtaataattataaacaactaataagttcgttcacattcttttatttttctatactgtctttgaaatcctgtgtgtatttaacacttacagcacatttcaattcagaaaagccacatttcaagtgctcagtacctgcatgcagctagtggctaatgcattggacagcacagatctagaatggggtccaggaatctgtaggttgatcatgcatccagggtattctggcctacaagccaggttgagaacttaaggcagtccggctcccaccttgccttcccaatatccatatcctacccatccttcagtgccagcccaagttccttctcctctgggaagcacaggttgtctttgccatttatttggcactaatcatacatcaccctgtcctattattaatcttttcttggtgcacctccatttgccctttgttagccataagcgtctattgggcaagaaccccatactatatttcttttcatccccagagtacctaatccatttatttagtagcacactctgtgatttataaacatttccagactgacaacacacctgtccatgctgcatctgttaaagcctaaacttgggagatatttatctcatgtcatcattataaaacagtgaggcaggcaagaaaaggctttgctcaaggtcacactccccctcctgacagacaacactgctctcagtttatcacattttgtgtattgatttgcagctggacttccagttaaaacagatataacccctgggccatctcgattatgttctggagcacgacgttctttcttctgtaggatgaagtgtaacaggccttcagtaaaggttgaagacaaggact

SEQ ID NO: 10854 - DNA, 418 bp, Homo sapiens
gcacatcctctatttgttatcagggtgattacaaattatgtttcctacagtatgagaaattgattatccatttctcctgattaggcagcagatggatttttgtttgtcgtaggatgtgaccgagggaagatactctttgtctcagagtctgtcttcaagatcctcaactacagccagaatgatctgattggtcagagtttgtttgactacctgcatcctaaagatattgccaaagtcaaggagcagctctcctcctctgacaccgcaccccgggagcggctcatagatgcaaaaactggacttccagttaaaacagatataacccctgggccatctcgattatgttctggagcacgacgttctttcttctgtaggatgaagtgtaacaggccttcagtaaaggttgaagacaaggact

SEQ ID NO: 10855 - DNA, 807 bp, Homo sapiens
accctaccccagcaggcgctaaaggagagctgacatgatggataacgaaaaagaagacgctgtccttctattcagggagtttaacatctggaagagccgggagttctttgtgctaaaggccctctacaaagtgcctgagatgcaaaaataagtcactttctctgtcctctcagcaaccgagtcgcatgtcgttatcaaatttttattttctgtaactgtttccttccgtcttgctccgtagacagctttttgcagcagagagcgctgccgcggggctggtgtctactcttcagtaagtggtcaaaacctggctactggaaggaaatgcaatggaatcgctccgcgctcgagtattctctttggaactacgggaatgacagctccagtgggacacttggaggtcatgatgaacgcaaagaacgtggtgctggctagagtgtatacgtttggacccaagcttaacttttccaatgtggaatcctgggccttcattggtttttggaagaagctgaccgcctgaaaagaaattataaaacatgaaaatcgctttgaggtgaccaagtccagaggcccctaactcctcccaagctggatctggggtgtaagaactgtgacttcagatcatccaatggcagaccagagaatggacatttcttcaaccatcagtgatttcatgtccccgggccccaccgacctgctttccagctctcttggtaccagtggtgtggattgcaaccgcaaacggaaaggcagctccactgactaccaagaaagcatggacacagacaaagatgaccctcatggaag

SEQ ID NO: 10856 - DNA, 2759 bp, Homo sapiens
gacggaggtgcctgtttacccgcgccggactcaccgccgccgccgccgcgggatccgagtgcgggcgcgggcgcgggcgctcccggcgagccacggtggtgctggctagagtgtatacgtttggacccaagcttaacttttccaatgtggaatcctgggccttcattggtttttggaagaagctgaccgcctgaaaagaaattataaaacatgaaaatcgctttgaggtgaccaagtccagaggcccctaactcctcccaagctggatctggggtgtaagaactgtgacttcagatcatccaatggcagaccagagaatggacatttcttcaaccatcagtgatttcatgtccccgggccccaccgacctgctttccagctctcttggtaccagtggtgtggattgcaaccgcaaacggaaaggcagctccactgactaccattcacaggtcgaatttggggagcacaatggctggaggtcagatgcccactaggagatgctatgattaatatagaaagcatggacacagacaaagatgaccctcatggaaggttagaatatacagaacaccaaggaaggataaaaaatgcaagggaagctcacagtcagattgaaaagcggcgtcgggataaaatgaacagttttatagatgaattggcttctttggtaccaacatgcaacgcaatgtccaggaaattagataaacttactgtgctaaggatggctgttcagcacatgaaaacattaagaggtgccaccaatccatacacagaagcaaactacaaaccaacttttctatcagacgatgaattgaaacacctcattctcagggcagcagatggatttttgtttgtcgtaggatgtgaccgagggaagatactctttgtctcagagtctgtcttcaagatcctcaactacagccagaatgatctgattggtcagagtttgtttgactacctgcatcctaaagatattgccaaagtcaaggagcagctctcctcctctgacaccgcaccccgggagcggctcatagatgcaaaaactggacttccagttaaaacagatataacccctgggccatctcgattatgttctggagcacgacgttctttcttctgtaggatgaagtgtaacaggccttcagtaaaggttgaagacaaggacttcccctctacctgctcaaagaaaaaagcagatcgaaaaagcttctgcacaatccacagcacaggctatttgaaaagctggccacccacaaagatggggctggatgaagacaacgaaccagacaatgaggggtgtaacctcagctgcctcgtcgcaattggacgactgcattctcatgtagttccacaaccagtgaacggggaaatcagggtgaaatctatggaatatgtttctcggcacgcgatagatggaaagtttgtttttgtagaccagagggcaacagctattttggcatatttaccacaagaacttctaggcacatcgtgttatgaatattttcaccaagatgacataggacatcttgcagaatgtcataggcaagttttacagacgagagaaaaaattacaactaattgctataaatttaaaatcaaagatggttcttttatcacactacggagtcgatggttcagtttcatgaacccttggaccaaggaagtagaatatattgtctcaactaacactgttgttttagccaacgtcctggaaggcggggacccaaccttcccacagctcacagcatccccccacagcatggacagcatgctgccctctggagaaggtggcccaaagaggacccaccccactgttccagggattccagggggaacccgggctggggcaggaaaaataggccgaatgattgctgaggaaatcatggaaatccacaggataagagggtcatcgccttctagctgtggctccagcccattgaacatcacgagtacgcctccccctgatgcctcttctccaggaggcaagaagattttaaatggagggactccagacattccttccagtggcctactatcaggccaggctcaggagaacccaggttatccatattctgatagttcttctattcttggtgagaacccccacataggtatagacatgattgacaacgaccaaggatcaagtagtcccagtaatgatgaggcagcaatggctgtcatcatgagcctcttggaagcagatgctggactgggtggccctgttgactttagtgacttgccatggccgctgtaaacactacatgttgctttggcaacagctatagtatcaaagtgcattactggtggagttttacagtctgtgaagcttactggataaggagagaatagcttttatgtactgacttcataaaagccatctcagagccattgatacaagtcaatcttactatatgtaacttcagacaaagtggaactaagcctgctccagtgtttcctcatcattgattattgggctagctgtggatagcttgcattaattgtatattttggattctgtttgtgttgaattttttaatcattgtgcacagaagcatcattggtagcttttatatgcaaatggtcatttcagatgtatggtgtttttacactacaaagaagtcccccatgtggatatttcttatactaattgtatcataaagccgtttattcttccttgtaagaatcctttactataaatatgggttaaagtataatgtactagacagttaaatatttttaataaatgtttcccttgttct

SEQ ID NO: 10857 - DNA, 2854 bp, Homo sapiens
acggaggtgcctgtttacccgcgccggactcaccgccgccgccgccgcgggatccgagtgcgggcgcgggcgcgggcgctcccggcgagccacggtggtgctggctagagtgtatacgtttggacccaagcttaacttttccaatgtggaatcctgggccttcattgactatgtgaaagaatacacagtgccctgagagcctggcctgggaatcagaaacttagattccagcttcggttctgctggtaactcctcagtcattatgggttccgatgtcataggaatctacgctagagggcttcctgtgtgccgggcactgtggtttttggaagaagctgaccgcctgaaaagaaattataaaacatgaaaatcgctttgaggtgaccaagtccagaggcccctaactcctcccaagctggatctggggtgtaagaactgtgacttcagatcatccaatggcagaccagagaatggacatttcttcaaccatcagtgatttcatgtccccgggccccaccgacctgctttccagctctcttggtaccagtggtgtggattgcaaccgcaaacggaaaggcagctccactgactaccaagaaagcatggacacagacaaagatgaccctcatggaaggttagaatatacagaacaccaaggaaggataaaaaatgcaagggaagctcacagtcagattgaaaagcggcgtcgggataaaatgaacagttttatagatgaattggcttctttggtaccaacatgcaacgcaatgtccaggaaattagataaacttactgtgctaaggatggctgttcagcacatgaaaacattaagaggtgccaccaatccatacacagaagcaaactacaaaccaacttttctatcagacgatgaattgaaacacctcattctcagggcagcagatggatttttgtttgtcgtaggatgtgaccgagggaagatactctttgtctcagagtctgtcttcaagatcctcaactacagccagaatgatctgattggtcagagtttgtttgactacctgcatcctaaagatattgccaaagtcaaggagcagctctcctcctctgacaccgcaccccgggagcggctcatagatgcaaaaactggacttccagttaaaacagatataacccctgggccatctcgattatgttctggagcacgacgttctttcttctgtaggatgaagtgtaacaggccttcagtaaaggttgaagacaaggacttcccctctacctgctcaaagaaaaaagatcgaaaaagcttctgcacaatccacagcacaggctatttgaaaagctggccacccacaaagatggggctggatgaagacaacgaaccagacaatgaggggtgtaacctcagctgcctcgtcgcaattggacgactgcattctcatgtagttccacaaccagtgaacggggaaatcagggtgaaatctatggaatatgtttctcggcacgcgatagatggaaagtttgtttttgtagaccagagggcaacagctattttggcatatttaccacaagaacttctaggcacatcgtgttatgaatattttcaccaagatgacataggacatcttgcagaatgtcataggcaagttttacagacgagagaaaaaattacaactaattgctataaatttaaaatcaaagatggttcttttatcacactacggagtcgatggttcagtttcatgaacccttggaccaaggaagtagaatatattgtctcaactaacactgttgttttagccaacgtcctggaaggcggggacccaaccttcccacagctcacagcatccccccacagcatggacagcatgctgccctctggagaagattcctttgttgtaggtggcccaaagaggacccaccccactgttccagggattccagggggaacccgggctggggcaggaaaaataggccgaatgattgctgaggaaatcatggaaatccacaggataagagggtcatcgccttctagctgtggctccagcccattgaacatcacgagtacgcctccccctgatgcctcttctccaggaggcaagaagattttaaatggagggactccagacattccttccagtggcctactatcaggccaggctcaggagaacccaggttatccatattctgatagttcttctattcttggtgagaacccccacataggtatagacatgattgacaacgaccaaggatcaagtagtcccagtaatgatgaggcagcaatggctgtcatcatgagcctcttggaagcagatgctggactgggtggccctgttgactttagtgacttgccatggccgctgtaaacactacatgttgctttggcaacagctatagtatcaaagtgcattactggtggagttttacagtctgtgaagcttactggataaggagagaatagcttttatgtactgacttcataaaagccatctcagagccattgatacaagtcaatcttactatatgtaacttcagacaaagtggaactaagcctgctccagtgtttcctcatcattgattattgggctagctgtggatagcttgcattaattgtatattttggattctgtttgtgttgaattttttaatcattgtgcacagaagcatcattggtagcttttatatgcaaatggtcatttcagatgtatggtgtttttacactacaaagaagtcccccatgtggatatttcttatactaattgtatcataaagccgtttattcttccttgtaagaatcctttactataaatatgggttaaagtataatgtactagacagttaaatatttttaataaatgtttcccttgttcta

SEQ ID NO: 10858 - DNA, 2786 bp, Homo sapiens
gacggaggtgcctgtttacccgcgccggactcaccgccgccgccgccgcgggatccgagtgcgggcgcgggcgcgggcgctcccggcgagccacggtggtgctggctagagtgtatacgtttggacccaagcttaacttttccaatgtggaatcctgggccttcattggttccgatgtcataggaatctacgctagagggcttcctgtgtgccgggcactgtggtttttggaagaagctgaccgcctgaaaagaaattataaaacatgaaaatcgctttgaggtgaccaagtccagaggcccctaactcctcccaagctggatctggggtgtaagaactgtgacttcagatcatccaatggcagaccagagaatggacatttcttcaaccatcagtgatttcatgtccccgggccccaccgacctgctttccagctctcttggtaccagtggtgtggattgcaaccgcaaacggaaaggcagctccactgactaccaggaaaatctccgaggaggtataccccctacagcagatgtcctttctgctgaagttcacaggtcgaatttggggagcacaatggctggaggtcagatgcccactaggagatgctatgattaatatagaaagcatggacacagacaaagatgaccctcatggaaggttagaatatacagaacaccaaggaaggataaaaaatgcaagggaagctcacagtcagattgaaaagcggcgtcgggataaaatgaacagttttatagatgaattggcttctttggtaccaacatgcaacgcaatgtccaggaaattagataaacttactgtgctaaggatggctgttcagcacatgaaaacattaagaggtgccaccaatccatacacagaagcaaactacaaaccaacttttctatcagacgatgaattgaaacacctcattctcagggcagcagatggatttttgtttgtcgtaggatgtgaccgagggaagatactctttgtctcagagtctgtcttcaagatcctcaactacagccagaatgatctgattggtcagagtttgtttgactacctgcatcctaaagatattgccaaagtcaaggagcagctctcctcctctgacaccgcaccccgggagcggctcatagatgcaaaaactggacttccagttaaaacagatataacccctgggccatctcgattatgttctggagcacgacgttctttcttctgtaggatgaagtgtaacaggccttcagtaaaggttgaagacaaggacttcccctctacctgctcaaagaaaaaagcagatcgaaaaagcttctgcacaatccacagcacaggctatttgaaaagctggccacccacaaagatggggctggatgaagacaacgaaccagacaatgaggggtgtaacctcagctgcctcgtcgcaattggacgactgcattctcatgtagttccacaaccagtgaacggggaaatcagggtgaaatctatggaatatgtttctcggcacgcgatagatggaaagtttgtttttgtagaccagagggcaacagctattttggcatatttaccacaagaacttctaggcacatcgtgttatgaatattttcaccaagatgacataggacatcttgcagaatgtcataggcaagttttacagacgagagaaaaaattacaactaattgctataaatttaaaatcaaagatggttcttttatcacactacggagtcgatggttcagtttcatgaacccttggaccaaggaagtagaatatattgtctcaactaacactgttgttttagccaacgtcctggaaggcggggacccaaccttcccacagctcacagcatccccccacagcatggacagcatgctgccctctggagaaggtggcccaaagaggacccaccccactgttccagggattccagggggaacccgggctggggcaggaaaaataggccgaatgattgctgaggaaatcatggaaatccacaggataagagggtcatcgccttctagctgtggctccagcccattgaacatcacgagtacgcctccccctgatgcctcttctccaggaggcaagaagattttaaatggagggactccagacattccttccagtggcctactatcaggccaggctcaggagaacccaggttatccatattctgatagttcttctattcttggtgagaacccccacataggtatagacatgattgacaacgaccaaggatcaagtagtcccagtaatgatgaggcagcaatggctgtcatcatgagcctcttggaagcagatgctggactgggtggccctgttgactttagtgacttgccatggccgctgtaaacactacatgttgctttggcaacagctatagtatcaaagtgcattactggtggagttttacagtctgtgaagcttactggataaggagagaatagcttttatgtactgacttcataaaagccatctcagagccattgatacaagtcaatcttactatatgtaacttcagacaaagtggaactaagcctgctccagtgtttcctcatcattgattattgggctagctgtggatagcttgcattaattgtatattttggattctgtttgtgttgaattttttaatcattgtgcacagaagcatcattggtagcttttatatgcaaatggtcatttcagatgtatggtgtttttacactacaaagaagtcccccatgtggatatttcttatactaattgtatcataaagccgtttattcttccttgt

SEQ ID NO: 10859 - DNA, 1752 bp, Homo sapiens
atgattaatatagaaagcatggacacagacaaagatgaccctcatggaaggttagaatatacagaacaccaaggaaggataaaaaatgcaagggaagctcacagtcagattgaaaagcggcgtcgggataaaatgaacagttttatagatgaattggcttctttggtaccaacatgcaacgcaatgtccaggaaattagataaacttactgtgctaaggatggctgttcagcacatgaaaacattaagaggtgccaccaatccatacacagaagcaaactacaaaccaacttttctatcagacgatgaattgaaacacctcattctcagggcagcagatggatttttgtttgtcgtaggatgtgaccgagggaagatactctttgtctcagagtctgtcttcaagatcctcaactacagccagaatgatctgattggtcagagtttgtttgactacctgcatcctaaagatattgccaaagtcaaggagcagctctcctcctctgacaccgcaccccgggagcggctcatagatgcaaaaactggacttccagttaaaacagatataacccctgggccatctcgattatgttctggagcacgacgttctttcttctgtaggatgaagtgtaacaggccttcagtaaaggttgaagacaaggacttcccctctacctgctcaaagaaaaaagcagatcgaaaaagcttctgcacaatccacagcacaggctatttgaaaagctggccacccacaaagatggggctggatgaagacaacgaaccagacaatgaggggtgtaacctcagctgcctcgtcgcaattggacgactgcattctcatgtagttccacaaccagtgaacggggaaatcagggtgaaatctatggaatatgtttctcggcacgcgatagatggaaagtttgtttttgtagaccagagggcaacagctattttggcatatttaccacaagaacttctaggcacatcgtgttatgaatattttcaccaagatgacataggacatcttgcagaatgtcataggcaagttttacagacgagagaaaaaattacaactaattgctataaatttaaaatcaaagatggttcttttatcacactacggagtcgatggttcagtttcatgaacccttggaccaaggaagtagaatatattgtctcaactaacactgttgttttagccaacgtcctggaaggcggggacccaaccttcccacagctcacagcatccccccacagcatggacagcatgctgccctctggagaaggtggcccaaagaggacccaccccactgttccagggattccagggggaacccgggctggggcaggaaaaataggccgaatgattgctgaggaaatcatggaaatccacaggataagagggtcatcgccttctagctgtggctccagcccattgaacatcacgagtacgcctccccctgatgcctcttctccaggaggcaagaagattttaaatggagggactccagacattccttccagtggcctactatcaggccaggctcaggagaacccaggttatccatattctgatagttcttctattcttggtgagaacccccacataggtatagacatgattgacaacgaccaaggatcaagtagtcccagtaatgatgaggcagcaatggctgtcatcatgagcctcttggaagcagatgctggactgggtggccctgttgactttagtgacttgccatggccgctgtaa

SEQ ID NO: 10860 - DNA, 26914 bp, Homo sapiens
ccaccaatccatacacagaagcaaactacaaaccaacttttctatcagacgatgaattgaaacacctcattctcagggtatgttcaattatgggattgttttacaacgtttgtttttataaattttcaagtaagtaccagcatgtgggaatttgatgtttcaacactgagcttttttttttaggcctgcttcctctctcaggtccctccctttatcttattgtttggacaggcttcacatttcttccacaaaaccattctcctcctcttttaacctcgtctagacaaaaatggaaggtctatgccaccgcaatttaaaatcagaagagtcaggatttgttaaaaataagggggatttgagaatcacatttctgcatgaagattttaggaagggactgaaaccaacaacaattgagaatttctcttcacctgatttaaccactagcacaaaaaagtccacctaaatctttacaccaaaatctcatcaaaataacaaaactgtggctcacgcctataatcccagcactttgagaggccaagacgggcagatcacctgaggtcgagtttgagaccagcatggccaacatgttgaaaccctgtctctattaaatatataaaaattagctgggtgtggtggcagatgccttcttgggaggctgagacatgagaattgcttgaacctgggaggtggaggttgcagtaagctgagatcactccactgcactccagcttgggcaacagagtgagactctgtctcaaaaaacaaacaaacttacaaagactagtggtccaaaaaagaaaaataaatgcaagagatatatgctttcacctgcttgacttgagtgctctctctgtcttgctaaatctctgctgggagatggttgaggtggcactatgggaacctgttgtcttccatgaagaattaggtcggcacaaagctctaagttgtgttactaggtaaagtgagattaacttgggaattgaagggaaagaaactggattcagaaacgtgttcttgtagattgtaaacagatgaatagaaaaacgtaactaaaaggaaggatacccgcttccacctcccacaaagtcagggctgaccttacctgcacagccaacagaatcttcctacccatctttgagcagaagtttgcaaagctctagagtagagggtagtccatctggaattttgcatcatcactatccattttcagctctctataagcctggcctgtctgctcactccagcattctctatttatctcctcatgacgtgctatctcaaattggaaagcattcacctgcaaggaccagaagacctgatgaataaatagagtttaatttctcaagtataactggtctggagtaggttatgttgggttgctgcagtggttcaatgaggtcaataggaaccaggttctttgtctttgcactcagccacaccaagctagcatgctagcttgtttccttaatgtagccaggtacctttgccaggtctaagtagccagacccactgtaaaaacaggggtaaatgaagctctagtctggctgtcctttttatcaagaaaggatacaccttcctgaaaactcaacagtggacttcagcttattcaaaagtgtgtcacttggtcacgcctagctgcagggcagggtgcagaaacaagtgtttatagattttccagcctccctggtggagacaggcaagagagaaggggcctgggaatggtgttgggaattggcttccccaacagtgtttgccacacacactttccagagccacatgcatttgctcgattccttccagaagtgactcccacaacccaatatagtgcttcaactgtggtctgattggcctgaggttgaatgggactagtgccttccttgccaaaaaagccatctgattagtactgtatcatttggggcagctgcagtactgcctcctcccccttctctcctgaatatgaattattgttaggtcaggttttttacatcttgtataggtgcttttttgaacttaagataggacttctctttcatttctgtcaaaacctgtttgttgaatggccccacagtccagcttgtcattagtgacccttggaatctttgtgtgacttgtagatccaatacatgcctctgtgcctttcatccttgtttattcataaattcaacaaacatttttgtttacttactagatgcatggcattgttctaggaacatccaaatcaatgataaacactttagggtgggaccaggctcccgatcaagtgagtgatagtcttttggctaccactctcaggacacagttattcaaacacccaactttgcccacctctccatccttttcgtaaagatgtccgtgttctcagagaggatttgctgaggttaaaatatgaccgatgcctgtagcatctcgagagctgccgtcggtgccagcttcatgggcatgtgacctctgcagtttcacaaggccccatgcttggtttaatgccctgtcaccatcttgaaaacgtaatttttgaacaaggatccctgcattttcattttgtactgggccccacaaattatgtaactggtcctgattcccatactggtaacagatctgcagctgtagatgtgataggcctgcctctatgcctttcattcttgcgtattcatgaattcaacaaacccttttgtgtacttactagaggcttggcattgttctaggaacatccaaatcaatgacattttgggctggggtacaggcttgattattttaagaaaaagaatctatgtctttatttcatatatatatatatatatatatatatatatatatatatatgtaaaataattatcaagcagagtcctgtggatggacaaatttaaaaataaataaaacaagctccttttgcagtggcacgtgcttaatcgttttcttgttgctgcttttcttaataattttctatcagatacccatacttaccagggtatggaacaaggattatcatgctatctcagctaaatacttcatgttgggcttgtctcttctactcccttgtttatgcagcactcaagagtgatctctcttgcccgatgaaggttttgtcacctctctagcacgtgtcagtggctgtgaaatactgtccagtcccttatcacttccagggtcccagttccagggacttgcttccacagaaagccaggtctactcagatgatgttcagacagtttggccgcaggagctggacttctgcttttcctcagcaatgcaaaatggacaaactgctttctttactaagtgctttcaaaatatctttaataaagtgtatgtcagggatcagtcaactgtatcagtttacaatgtctacgttagtctacttccccatgttttgaaaactaggcagaccgtaccaaggcctctgtgtcttttattaaccagcaccatcttcccaagagtgaccctgccactggctggcccctgtggctctgtggtgctggtagtgttctcacagcttctgctccttagctgtccttcgggcccggctccttcacagatggtctgctggccagggtgctatggagttggaatgtccagagcctcccctcgctgatgcattcactgctttggaacctgctggctttcctctggagtactgaaatagctttacctgtgttgtcggttcaggcctgaccctgcccagcattacctccagggtgtcacagttcccttctgtccaggtacctttcaagccacattgccacatcaatgaaaagcctcaaaaacacttccatgagatacaagattatctgcaaggcaaacgaggaagtttttaataccctatttgttgacagaatgaggcttccagcagatggtgcttggaaagttacttccccctcactgtcatcccttgcccctgggccagcttagggacctaacttaggaaaggatcctccccagcttccttctggctgagtagcctgccagggtcttaagcaacagtgattctgttcccctctcactcatttcttctgtcccagcacaagtacatgcaccattcttttaccttctggcacattaattcatttcctagttctttgaattaaaccacatcatgaaggcccttttgtggaaaaagagaacagtttctctgtatttttccaaagagcagattaaggaccagtgaataaggtgagaaactagtccactgtgtattagaacgagggagggctgagtcataagagcaagggcatgacagagtggggcacaccctccttgtcaccggaagaccccagcaggagttgagtggttgtatgtctggaaggcagtgggtgggattcacacagcccaagctctcaggcactatagcttgggtatttacctgcttcagtctctttaccaaatgttgtcctatcttaatggctggctttattggaacatttagattttttcctgtatttaaactgaagaaggggtaagaagaatctaagcggggagttttgcttttctgaatgcaaatagtccggccctggatggagggataacatttgagagtagtagttctcagccctatgtacattagaatcacattaacgtggaagtgggatgggtttaaaaataccccagtgatcagccccatgccagaccatcagcataaaaacaaaaacaaaaaacactgctccgaatgttgagaaccactgttttagagagctccctgtacgtggaggttttcaagttgaaggcagatgatggctgagatgttggagaggggattcttgaagagtccttccaaatctcagattctctgactctccatagagttgttattattagagcaatgaaatatgattctctggaccatgataccttcaaaagaacacgtgcaagctgaattctgctttgaaatataacttactttaattggactttcttcctataataattagatgatatgcagaaacacacacacacacacacacacacacacacacacacacaatcttacagttcttcagagacgtttgttttcagcatcctgcactcaggatatcactgaaactgttagtgttcctgtgctttggatgcttagaaagcacatcctctatttgttatcagggtgattacaaattatgtttcctacagtatgagaaattgattatccatttctcctgattaggcagcagatggatttttgtttgtcgtaggatgtgaccgagggaagatactctttgtctcagagtctgtcttcaagatcctcaactacagccaggtattgttcatgctcctgttgatggtgggcagcctcacagcagtcagaagtgtcactcaattttgtcagaataattatagtatacaagtcacatgtgaacttcttccagaaaattcttaacttcttaacagataaattaatttagacttagaacaatcttgtaatatgttccgtattccccccattgaaagatctgactctgatctgatcgatagcattatggctttcttctattgctgcaaaataaatatcccacaatatgtggcaaggacagagggtaagaggctatctgacaagggagaaaggtaggcaggttaacacaataccagagaatacgtcacttggaaatccactccatactgtgtttgcagtgctgtgtcacttcttagctctattgaacctcagtttactctaaaaattaatgataacttataggatcaaataagagtaacatttataaacgcttctagaacagaacttttcacctattatgtcccccagagtttttattcatttattcattcactcacacactggtatttgcatggaagcttggtaggcagaagacttgaagaatcaaaatgacatttatgtaaattagaattaatgtaaatttaatttttccaaagatttctgctctttttagtctcagagcaaagttatggaggaagttgctgttatctctgttaatagacaaggtgactgaagcatatgatatgcgtgacttgcttgagaacagagaggctgaacagcagagctggaatcagagcccacccctatcttctgccttctgaggtcttacaggggaattccaagattgttgccttagaagagcataaactgtttatataattgagggttttcccgtcatgttatcaaaaccaacctccagatgcctccttcctggtgtcaggcaaagtggttggacatatgtacaggttcacataggaaaagtttgaggtctcatgcacaaaaacacaaaggcaacatgcagactgtgcatgcttacttgttgcataattgattttctgcatgcaattgacttgtcatgtttaacatttcatctccccagaatgatctgattggtcagagtttgtttgactacctgcatcctaaagatattgccaaagtcaaggagcagctctcctcctctgacaccgcaccccgggagcggctcatagatgcaaaaagtgagtaccagagaggcctcgcatttcctcagcagcccactcacaggcagccaaccctgagtgagcagagggcgggtgtgtgtgatgggctcagcctttccagtcctacttctctgtcctctttctggggcaccagagctatctttggctaaatggaattatttatgttctttggtcttttacataaaaagaagaaaaaaatctcaatgtccaaatttattgaaaagaagagctatttagactggattctttctgatttttagacttttcttttttctttcagaatctagaaaatcccagttgtatgctcctgagtttaaagggctaagtttgatttgttctcccagaacaaatgggctctatttacctgaattgcacacaggcagcctcataaaagtaagaaaacgtcaactataaatatggtgtttcttcaaccaaagtgttcctccttaggttggctcccccacctggctttcttcttttgcagtagtggaaccaccatccacatcgctccctctgcccccagcttcctgctactgcacacacttctgtgcaaggccccagtagctgtcatctactttagtcctgtgggaggctgtacactcctacagttaagaatgagagaatgaggactctggctgggcgcagtggctcacatctgtaatcccagcacttcgggaggctgaggcaggtggatctcttgaggtcaggggtttgcaaccaacctggccaacatggcaaaaccccgtctctactaataatacaaaaattagacaggtgtggtggtgcgtgcctgtaatccaagctacttgggaggctgaggcaggagagtttcttgaatccaggaggtgggggttgcagtaagctgagattgtaccactgactgcactccagcctgggtaacagagcaagactctgtctcagaaaaaaaaaaaaaaaaaaaaagaatgagaacacaagggagattactgggctcattccggctccaccattcactagctgtgtgaccttgagcaagttacttaacctctctctgtctcagttttctcatttatggaagagtacctatttctttgggttgttgtgaggattgaaagtgttaatgtatataaagcaggcagaacagttcctagcacatagtaagaacagtatcagtgtggcctaatgtcttgctcccaagctgtccacgttaatccctggaaaaaaataccaccagataatctccttcaagtcatctctttcattacagcacaccgcttgttcctaaaagtaaaatgcagactttggtatctgttgttctttatagtctagccttggcttttttaagtgaccttaggagaaaaatatgaatggcatttgggccttgcctttgaggctcttagcatatagtcagagaaatgagacagacagcaccctgcatagtaataggtacagccatagaaatagtgccaggcatagagaacggatgattaattctcatgtgggcgcaaggacaggcatcactgagtagatgacaaccgaggtgggtttgaaaagatgaattaatgtttgccaggtaatgaagggaggaacaaagaggaaacaatctgtgcacaggtgcaggggtgtggagccacatggcttgcttggtgctattggacaaaacgtgcacggaggggaagggctgaaccatgaagaccatttgttctgtggggacacagtgaagagctctgagttgggtggggcaggctcggattggcattctaggggagatcgcagagctggcaatgtgggaggtagatgggatgggaggaagcccagaaggagccctgggcagtggccattcctcggcacacttgctcgtgtgatggccatgggtgtgttttccctcggcttctgtactgacacctagccagtgtttggtaaggaggtgtgctcctcagaatcacctgggagcttttcaacatagtcatgctccacccccagagattctaatttggtttttccagacagcacagtccaataaaaacataatgcaaaccacaaacatgagccacatatataatttcatattttctggtagccagactttaaaaaataaaaataaatgtaaaattaactccaaaatatttcagcatgtaataattataaacaactaataagttcgttcacattcttttatttttctatactgtctttgaaatcctgtgtgtatttaacacttacagcacatttcaattcagaaaagccacatttcaagtgctcagtacctgcatgcagctagtggctaatgcattggacagcacagatctagaatggggtccaggaatctgtaggttgatcatgcatccagggtattctggcctacaagccaggttgagaacttaaggcagtccggctcccaccttgccttcccaatatccatatcctacccatccttcagtgccagcccaagttccttctcctctgggaagcacaggttgtctttgccatttatttggcactaatcatacatcaccctgtcctattattaatcttttcttggtgcacctccatttgccctttgttagccataagcgtctattgggcaagaaccccatactatatttcttttcatccccagagtacctaatccatttatttagtagcacactctgtgatttataaacatttccagactgacaacacacctgtccatgctgcatctgttaaagcctaaacttgggagatatttatctcatgtcatcattataaaacagtgaggcaggcaagaaaaggctttgctcaaggtcacactccccctcctgacagacaacactgctctcagtttatcacattttgtgtattgatttgcagctggacttccagttaaaacagatataacccctgggccatctcgattatgttctggagcacgacgttctttcttctgtaggatgaagtgtaacaggccttcagtaaaggttgaagacaaggacttcccctctacctgctcaaagaaaaaaggtaacaatttaacagtccattaaaaccctgtgacaggtgaagcatgctttctgcagcggagctctcagctgggcgttggttccatggtttctggctggccagagtggcaggtcccaggactgcagacaggaccctgcagtcctccctatgtgtagggcagttgggagcagaggagagagctgaaaagcctgatggcagagatttgtggagaggcctcctctgtttaaattgtgtttcttttaacatgattgaggaagaatactctcagccacaatcctaactgccttatgaacagccaccagtccaccaaaattactctgagctcaccagtgaccttgatgttgttaaatgcgatgaacatttttcctttgtcttccttcttgaagtgttctcttctcctggattccatgaaaccacattcttcttcctcctccccgaccccctgctgctacaggctctcttgctggcccctttgctggctgcccctctctgtcctgggctgcatctctgtctgcagtctctctctgttggtcatgtcatctactccctcagctttaaatgccaacaacttccacattcatatttccagcctagacttgtcttttgaactccagattcataaatatactgcttactaaatcaacctgctttggatatctcaggggagtctccaacaggatacgtgccgaagtaatcacctgagcctctcctccagcataaatggcactgccattcagctggctgctcatgctagaagccggggaggtgccctcacttctgcttcaccaccccactcttcaatcccgttagttatgaagtcctgccacaatgagtcccatctgcaaaagttctctgaaatgtttgtccctttccatgctgcctactttcactcagctccaggctgcccccaactctcaccaggtctcataaagtgtagacccacatgctccccacccccaacacagcagccaggatgatctttttatcagtccccttttaaaaacccttcagtgttccctattgttcttgaagaaaagctcaaaatatttaacgtgaccatgcagcccccgaccctgccactaagcacatgtgagccatgttgacttcctttgatgcctcaagccccttctgggcaatgcttctgcacatgctgtcgcttcctggttggaatttcttccctctccccatgaactcccttcacatggctctctccaacctcagactgccttatgtcttatagcaccctactggtttgctttctagtgctttcttatacttgctgttatatagttatttgtgcgattatttgtttaaagtctgtctcccccactaggctgtaaactccacaagggcatgtctgatttgtttttcactctattccagtaaccagcacagactccacgcttggcagacactccatagtggtttgcttgttggtgaagtctataggtgctccacatttaatgtgtcccaaatcgaactatcttttttctctctctctcttctagtctgttttctttcttctctgagtcagtgaatgacaccagcaaccacccaatccagaaaagttagagtcatcttcatttgtttctttcccttaagcctgatattcacagcaaatcccaacagtttgatctcagaaatttctcctgctttctttctctgctccctctcatcttcactgcactgccatagttcagtcctcctaatctcttgctgtattatagccactggcccctgaatcagccttcctacttctgttttctactgtcttccagttcatacgtcactctgctcctacagcatccaaaccacaatttgattttgctgtttctgcacttaaatacctgtagatgctctccatttcctgccttaaaaagacagaccaacattggttagaaagtaatccaaggcccttttaatcttcctccaacctgcctttccaatttgcccctcactcccagtacctccaatttcacttcaaccacacagagctcttggccagttcctatataggctgtgcctctgtgcctgtgtacgtcatcagcctttatacattctagtccctcagccactgctcatccttcttgatccacctcctctactggttttttgggggagccttcctctccctaggaagagttagatattccttccttggtgtatgtaatgaatgtccatggtataactggccctacttaagcattctgacactggatgacagtttgtttctctttccgtctgcccctttcattagatgcttacttctggagagtgaagccttgatttttttttattttttgactccctacctacatcccatcccaccatcggccgtgtacacctccatggcccaaacctagtgctgacactaaccacgaactttgctttctagcagatcgaaaaagcttctgcacaatccacagcacaggctatttgaaaagctggccacccacaaagatggggctggatgaagacaacgaaccagacaatgaggggtgtaacctcagctgcctcgtcgcaattggacgactgcattctcatgtagttccacaaccagtgaacggggaaatcagggtgaaatctatggaatatgtttctcggcacgcgatagatggaaagtttgtttttgtagaccagaggtaagagtctacatactacccttgagcaatgatggtagaggattttcaaccctgatctaaaaagcagagaagactgggccatcagctggcttttctaagaatgaagaaagaaagaaaaagctgggtgcagtggctcacacctcaaatcccagcactttttgaggccaaggtgggtggatcacttgagcccaggagtttgagactagcctgggcaacgtggcaaaaccctgtctcaactaaaaatacaaaaattagccaggcatggtgacacatacctgtagtcccatctactctggaggctgaagcaggaggatcagctgagcctcgggaggtcaaggctgcagtgagctgtgattgcaccactgcacttccgcctgggcaacagagtgagaccctgtttcaaaaaaaaagagacaaatgatgagagtctctgttaaaaaatgagattcaataggatatcatcataaatacagagatttttctgtcattctttggcatatagagacaattaagtggggtgccttgatgtccatggctaaaagaaaaacagtagggatagcatgctgtctgaatctatggaatgttccagaaccattattgtgattgaaattcttttgaatctaggacttggaagcaattatttagtcctgagctgtccaataaaatactcgttggccatggtagcctcccatgtggctaacggcacagacatagaacatttccatcatcacagaaagtcttgttggacagcgttgatctaatccaacctccttattttatggatgaagaacagaggccagcctggggactggtctcctgtaggattcacaattaattggtaatagacctggaccaaggacccaggtgtcccaaatttactgctgcctactgctttccctcagaatatgcacaggctaataatttttctggctactagagacagccacaacatgctggaaaaagagacagcctcagctgtcttgtggcctcagctgctgcagcttctggcatttggttgtcctgataaaaaggaggcagcaaaaactagaagccttgcactgaggtttagatttataccacattttaatctaattaatgtggttccttttttaaagacagatctcagtctgtcacccaggctagatctagtgcagtggcgagatcttggcttactgtagccttgacctcccgggctcaagcagtcctcccacctcagcctcccaggtagctgtgaccataggcatgtgccaccatacccagctcattgttctgtgtttttggtaaagacagggtttcaccatgttgcccaagctaatcttgaattcctgagctcagacaatctgcccaactcggcctcccaaagtgctgggatgacaggcatgaaccaccatgcccgactggttgcaatttttaaagccccctcagatttgatttcttgtgataatagtccctttacaaaggctttgctctgtttccctctatttttatagccttgattaaattcagatgcctgaaaaaaagagagaaagatccacacagtgagccctctgaaaatccatccagctcttttgcctgcagctttgaccttgctctcataggctgtagcagggtttatccattgcaaagttgcaattaatcatctgaatggctttttcttctttaaatattcctttattcccttttagggcaacagctattttggcatatttaccacaagaacttctaggcacatcgtgttatgaatattttcaccaagatgacataggacatcttgcagaatgtcataggcaaggtaagctaggatgtatgaaagatcttaagttgaaagtgtccccttgcttctagactagtcaacatgaccttccagggaaatctgtccactgaggatgtagagtcagccagcctaggactcttcaggtcagaacatctgtgtgaagaggaagctgatacctgcaggcactgtttatcccccttgtagttgccctgtgctgactgcatggcagtttctgaaagacatctcttgttcagagggttttcccagaccctgtaaagatttagtatggcccagactgatctgattctcttttccattcaagcctgcactacctcctgtgttttctgtcttgactaatgctgtggcttcatgtgcaggctcctgagagagaccaacattgaccccttctttcactgtgtctccaccagatcctgttcattcacctcagacatgcatttccaaaagtctactttttaccacctctgccatcaccctggttcaggccctcgtgcctacttagagacctgtgatagacttctcagggtttctctgatccctctcacccccagttcatcttccatagttatcctatttatccccagatagattgagcctggtaacatcagcctgcttaaaaacctcctgctttagactcaagcccaaatgcttttgacaggcaatcaaatgtgagaccttccaccttctggccccagcccacctcctcagtttcagtccccatccctgcctgcagaggcctgtgctccaggcacactgacctcactggcctctccccaaccagaccctgctgctcctcaggcactgctgggttcttccctccctccttctcttggcaaactcgtgttcatccctcaaggctctgatctcttctccctgtatagccttccctcactactcttcttgagggcaggagtcatagcctgtctcctcttgtatctccagtgcctggcacatgagaagggctcattacatgttacatgaaagaatgaggttgaataggtgagtagcctctgttgatttggatgttcttagaaatgagataagttctatattgcccttgggctttgtgattgagataaagcatgacattttggacagtgccttctcatttgctggtggtcatgttagagctgattccagttagatgtataacatgcagtcagtaattccctagagcctcaattttacagactatggaaaatcatgacagcttcacaaatgaattgaaaggctctgagttagaccctcagaaacaacctatttcctgagtgttgaccactgcagtttccttggcttactaaagagcgatgtcgttggagctcaagtacctttaatattttgtattggatgtcctgtttaatactttggtctgagaaaacaacaatgtccatgttttctttacattttcagttttacagacgagagaaaaaattacaactaattgctataaatttaaaatcaaagatggttcttttatcacactacggagtcgatggttcagtttcatgaacccttggaccaaggaagtagaatatattgtctcaactaacactgttgttttgtaagtacttttcctatatctgaagctccccttgcttcaaacagatgcctagggttcctcatctgggaaatggggtgcaggcaacatccagtatcacatcctttaatgccatcttgctaatacctgtgaagcctcaggactggcagaagctagaaaggattgttaacaaagggacaagcttcaggacttgtaccatgcaggccctggcttatgaaactgctccaggaaatagcaacatttccttccagataaagcagctaacctttgaattccacaggccctgcaccctaggcatccacttgtgctgctgtggaggaaggggttggcaatctatgaaaggctcattcaggcactagctcacactggccttggctgaggatggggaggtctccatacctgtcaggcagggggcccaagcactggcagctggaatgccatctcaaaaggctgctacctgctagatgagcagagggaggtgaaggagcctctctttggccaggcctgctccccacttttccttccccatagtgtccaaaaccccacctatggtaagagctgtgtgaggggccggggctaggtgcactgcaggctggcaggaggaggtgctgtaatgatggcagtaggttactgcagccaccacctctgctgaactgtgtcccacacatattaggaaggcctaggcaggcagtggggccaaaggccaggatgctatccattatattatcaaacagtgagacctgtttacccactcagacagacacttcattttctggcctgtccaggtccagagtggacaccggacaccttggccaagttgaatggtgcacagttctgagcaggcctgactcacgtttccttattgctgggatgttcacagagccaacgtcctggaaggcggggacccaaccttcccacagctcacagcatccccccacagcatggacagcatgctgccctctggagaaggtaactatgtgctgctggggccctggggcttgcccgtgggaaggtgcttgtggtcaaatatcctcccctaaagtattcagggtcccctccattcatattctgtggaacaagggaggcctcgaggggatgatgtgcggatttccccatgaatgcagaggacactgtcatgtcactttctctgttgagccggaatactaggagctcactgctgcacttcccaaagctgctggcccctggaagcccttgagctcgcaaactccctactccccttgtgctttcctcctgtgttggctagtggccatgatgtgaagtgctctttcgtgactgtcactaactcctgtggttggcaggcaggtgtctttcggcaccagggtgtgtaccatacccactgggctcccttctcaggctcagccttggccctgcccctgctgtccacgctggactcatccttcctgggaccatccccacatgcatggctgcagcccccatcgatgactcccacatccacatctcctggcccagtctctctcccgagctccagatctgtctctccaaatgcctcatagacagaaccacctggagtctcagaggcacctgaaattcagaatatcccaagctgattttctgcactcccctacctgattggttgtttaagccagaaacctggctgttgtctctcccccattatatctaaacacggagtcctgaaccttctatctcttaaacttcgtcaccactattgctatttcaccctcctcatctgctgcctggattattgcaaatcacttcgcaactctagtccccctctccccaccccatcctccattgtagttcattctccctgccgtggactttctaataacccagttctcatttgtgccttttctgtgtatcgtcctttggtactcctcattcccttgtggaaactgtccaaattcgttagtacggcatccaagaggcccctcatgatcggattggtacctgctgccccagtttcatctatcatgctctcatcatcatttatgatgaattccttggaggagtctcccaagttttaacctgcctcagtgctcctgcacgtgttggttgctgtgcctggaatgctttctcctccttacctctctgccaagctaattcatattcatctctcaagactcagctcggggttaacttgctccagaagctgcacctggccccagatgagttggttgcctcgtgcttgcctgtcaaacttacaacattttgctttagccattgttcatcttgttggttttcctgttaaactgtgagctccttgagggcagggacttgtctctgtaaccctggcacatacagtggtcttcaataaacgttttttttcagtgcatgaagggaaagaattagatgctgtatgaagggaaaaaactggcctcagatcctagaaggaaacttgagcctttccctgctggaatgccttttcctgacaagctgtagccctaaagtccctcaaggcacaactctgatgttgaactgcaaatggatcatgggataaactggttttactttaatacataatagtatttcttcctcagttttcccctttcctactctcagattcctttgttgtaggtggcccaaagaggacccaccccactgttccagggattccagggggaacccgggctggggcaggaaaaataggccgaatgattgctgaggaaatcatggaaatccacaggcaagtaacaccttctagttcctctgttaaaccagtggttctcaacccagggaaattttttcccccaggcaatattttgcaatgtcaggagacatttttggtcttcacaactgggtgggaggttgctacttaaacatcctgtggatagagaccagggatgctgcttgttaaacatcctacagtaaacaggacagttccctcctccccacccaacaaagaattatccaatccaaaatgttagtagtgcctagattaagaaatcctgccttaaataaagaagctaaaccaaaatagcccagcgctaaagagaattcttgagaagacttaactttcttatggctcaaggagcttctcagtgcggatagatgtacctttactttacaggaatgcaggagtagagctgtgaactatcagagtgatctggaccttaacaaaacattcactttttttcaatcaaagagctgcccaggattagtactagaaaccaagcagatcagctagttattactagctgtcttgggagagacttcctttccatatgaaagagaaggagcttagaagcagtccacctgggtctgagtcctgggcctgtctctctacctggctatgctgagacttacttaacctcttgctctctgttgatttaaaccataaaaagaaagcactatttcccaagaattgtgttaggattgtgagggcactcaggaaagttccaggaacacagcctgacatatagtgagtgcttaaaaattaattaaatctgtctttaagagcagtcgagagggaagcagttatcataagtctgtccaaatttggggaatagagaaggtggtaaccagattcttcagaacgaaacttaatgtaacataagaaaaggaagaaaacactgctgccgctggattctctcaggagaattagaggctggcctgttttccaattggccataaaggggctgttatccccctataggtaacacagctcttttccaaccccacaggattagtgggtgtgacttctgcatcaggaaggagacatgagggtagtgtgcagtgtaatcaggttcaaaccctatactttgcatttgcataccctgtattttgcttgagaccatccaagaacagtatcaaacagtccttgacctcaagaattttaaaatcttttataagtctattttctttatgataacaggaaaaagggagggtgcatgggccaaagcaagcaaaagaggaaagatttgaacttggccttagccagggtttgcaataagagtggatgttccctctagaaaagccagggctattcttgagtgggcatgtgagtggcaaattcagggtcaagaaacaagctacctaactgggcaggctttgtgtaggaaggagacacagagctatgataggcgattaagaaacacaagaaatgatactgtgcagtttggaagaaacctgtaagaccccatttgttgtaggatgctgaacaagcatccaaagtcttgtgttacgctttgtggaagttgcattggaatagggagagatgaaggtgggcatgtttgacaactcaggaatgaggccttatcctacagagatgacactgccaaaagagaaatcaatcatctaaggtctagcgtttgaagatgaaatcaggaatgatgaaacagcaattccaagatgagaaacctgggaaaatagtggtttcatagacataagtagagaaaggtgggggacactcagcaatttttccgtaagcaattagcagccgtttgtgcatgctgagaatacatgatatgtagttgtaaactgccgttaagaagcttctaatccagaaagaaaacttgttcactcataaatctagagaactaggcagtacaagaaccaaaagacttctgggtggtggaggagtggtctctgggtcacccaaaagctacattcatccatgtaggagctgagagtcctgtggttacacaactgccatcacactctccctaaactgtagctgcaatgccaagtgatggattctttcctgaggtccttcagcctgacaagtatttaggtggatttacagttctaagtcttcccttctataaatcttctgagagatatgctagataagaaaggcctggacccatttttcatcaaccactgccttcgaaggctgcttttcctgtcactactactaggctaccttttagaccctggtgccgtccatgtcctaagagtattcactagctaaacagtgtttgtggagaaggggacaaattgttttctgtggatcaaagatggaggttgatcttagaagttctcctccaattcacctggattctgtgaggaaataaaactggccacttacttgaaattcaccaactgaatgcaaactccaatccaagggctttgtcagtgagatgcttgactctagggactgcattctagatcaggtgcctgtagaacaaatccagcttgtcatctgtttttgtaaataaagttttattggaacacagccacaccgattcgtatctgtggctgctttcaagctgcagaggcagagttgagcatttgtgacaagacaccatatggcctagagagcctactatctggccccttacagaaaaagcttgccaaaccctaatctagatcttcatcccctttctcacctttaccccttaacaaagcacatacactccactgaaaaaagaaaaggcagtgtaattctcttttctgacaggataagagggtcatcgccttctagctgtggctccagcccattgaacatcacgagtacgcctccccctgatgcctcttctccaggaggcaagaaggtaagactgatgattcttagcctaagctagagaacctcttgcccaagatctgaaatgttgggggtgggagtatggaattgcaactgcgattgctgaaacaatttggactacttcctccttgaagtaaatgcatctgtgtgaggctggatacaaagcatactggtagggctagggaggcttgctgacatcctcagaggctttcttccatgtgagtggaagaagggagaaagaataaggaatggggaactgtcagttcatttaattgagggagcaattcaagagttcccatgagggaaagattattgagtacctcacatagaaaagtttctcattttctgccaggaattttcaagggagaaaatattagtgtctagggcaggcaatggaaacagcaatgccaccagcagtgctttggaaatcaagccatgctttatagctgcagaatacttggggatctgctgcctgggggttccattggtgtgacagcattggatccaagcagtggatcaatcaccagccctcatgaagagcttgctataagactacactataaataggtttaggaaccagtcatttgttttcatctttgctggagaacttataagcctaggcccatcttaatcgtaaattataaatctgtttatattgcctgatgccagtagagcttaggacagtttaaaggccatcattttggacacaatggcttcctttccccatctcctaaaacagagagagagaatatcaggaatttccataggcaggactcctagggcacaaaccatcaaaagcagggcaaggattttcaaaactgagctcctcggaggtttgttcaggttaccaagagctgtggtgttaccaggtgggatgggcgtggggatagttgctaaggagagagggtaagagtagaaatcctgcttctacaagggcagcaatacttcttttttatacaggaatcttctgcaaacatttctatttgaaaaagcgttttgctccccccaaaaaaggttgaaagttaacaaattaatgggtaagactacaaagtaagacctgggttcgaagcttggccttgccatgtgctagttatgtgaacttgtacaactttcaagccctagttttctttataatggagctaataatggttagggtagccagcatctttgcacgaggtcctactgtgagataatatatgtgaaagtgcttggcccaaaataccactgacagatgaagtctgagcttggtgtcccgtgacccccgcccccctgcccacaacacacacactgcttgccagctgtcttcttagctgttcttctgttatacctccaggtccttcctgcatattggatccaccatcttcttagggtggtcttccagtctctgcttcttaagttaacttttaggcacttgacttgactcctggtattaccaaggattctacttcttggttttgaaaggttatcagtccagtataggcttaaatattactcaaagaactttcatatacattgtctcatctcaccttcacaacattatagtgacaagatccaggctcctcagcgttcgttttataagtatggcccccaggctacaatcctgggctcatggcttccaattcttttcacatcaacaactaccagaaatcaaaagctgtgctctgcatcataaagccccagctatttttgaggcacttatgaaaattctcccttttctttgagaagaatggattataaaatggatctgtgagaagaaatttggatgtgttctcacgagatgagtcctgggcagcaggacttataagaaaagcagcttaaacaagacagttaaaactgacagcagtattaaatggtgcaccatacccagccctttccagtcactttcaaatttggaaggtccaaaaatgaaccatttagcctgcagttgtttgtcaggatcaagctaaaaaggaagcctaagtgagcctccataggtcgcaagagagtacagacatccagaagcactaaggaaaattcagataaagcagcagttctacaaatgtcatctgcagtctttttccagaaagagagggggcacaagatccttttaagggtctgcaaggttaaagctattttcttaataacattaaaacgttaattttttccctgtattgataatgtgcactattcatactaaaagcacggttgggtaaaattgctggcattttacaaaaatcagacaagtggcaccaaactatactagtagtcattgtattcttcaccaccacacactcacagtaaaaaaatagtttaaagccagtttcatttaagattgtccatcatggctaggtgcagtggctcacccctgtaatctcagcactctgggaagctgaggcaggcaaactgcttgagtccagcagttccaggcaagtctgggcaacatagagaaatcccatctctactaaaaaatacaaaaaaaattatccaggtgtggtggtgtacctgtaatcccagctactccggggactgaggtgggagaatcacctgagcccaggaggttgaggctgcagtgagctgagattgtgccactgtactccagcctgggcaaccagagtgagaccctatcaaggagggaaggaggaaaggaaggaagggagtgagggagggagggaaaatgtccatcattacttttataaaattctcaagcacacatctttttaatgctctgtgacaaaatgagaagtacacagaacttgtgctgcataccaaagtatgatgtttgtctcaaaaactacttgtgtgattaagttgtgagttgaactagctactattttcattggacaccatttttattgtatatggtcattcggttttgggtatttagaatactttttttttggaaatgaatgaagtgaacctgtcactttaaggaaaatgactgacatttgttgccaatgataaaatctgagctttcaagcaaaaattggaatttttagaaaacttgtctctgctactttgaccttgagatcttcctaaaacttaaaaaatgttgttgatgagatagggagtattaataatagtgatattttgatgctctataatgaaatgtgtcaatatatagaagatctgcataactcagtgaaccaatattttgtaactaaacaatgcaaggtatttcaaaatcatgtaagggtaaaagatccatcctaagtgccaagatataaagagtacaaaacattcattgatatggtttcagattccacattgcaactcacctttaagaaacttctacgtgtcaagttttgaagtggtatcaaaaaagaatacaattatttgaaaagtctattaaaatatgcctcccttttccaactacttatctgtgggaggttggatttccttcatatacttgaatcacaagacgtatctaaatagactgaatggaaaaacatatatgagaatccagttgaaaattattaagccagacattagatttgcaaaaatgtaagataatactctgcctggtaattttttgttactgttttagaaaatagttatttttcattaaaatactattcattatttatgttaacatgtagcgggtttattacatttaagaaatctattagttttaatttcaaatacagtaaatattgataaatacagcctacataagcaaaagttctttggagtcctcaatgatttttttaagagtgtaaaagggtccctagaccaaaacgttgctgtggaaataaagtaagttataatgccacctgctggcaaagcctgaaatcattgctgctcctgaaagcagcagctaccaaactgtttcctcacgtatatccagataggtctcaaagaatgctcttctttgagactcagccaggggaaggcagctggggtgagtgggggagattttgagacagagttctcttactgagtagtagtaataatcctccccagtagcctgtcttaacttaaaccacaggttactgaagttggcacctgtagtataagagatttacttctgttttcttcatttgactccttgagctgtgtctcttcacagcttgttaactccactttttcttcttcagaaatatctgtcactataagatgttttattcccttataggggaaacgtctagctgggctcattgaagtttaggcattggtcctaaagaaatatgtgggcatcatgattccaggcagttgaatgctcttgggattttattcagcctttaagttgcctctgtgggctcactaaaatggagagaaaagaatagttcgggggagaggttttttcttactctgaccatgtctgtctaacagttccttgtttgaaatcatccaatagaaaactgaagccatttgaagcttctccccaccccaccccatgcttcattttccttttggcattgctcataatactgattcaaacttcacacttccctccttttgtttgtagattttaaatggagggactccagacattccttccagtggcctactatcaggccaggctcaggagaacccaggttatccatattctgatagttcttctattcttggtaagtggcatcattattcgtttccattgcaatgagcttgcaaaacatcttacataaagtcaattttaagaactgaactgtgtgaaacaagctaatcctagataaatttgataggaacagaataaaagtttaaaatttgtttaaatctctaaaaagttgaccagtatttgagttttggtggaggtccaagtttgtgcctggaactcaagaggaggctacagctacctagacataggctttctcccatgtggggcataatctcttcagagagagaaggctaatgaaggttcagagataatgcctagaagggtgattagtaagcatatcagaaggtattaaaagtcattaagtgaaaagagtttgcttttcccatcacatccatctttttctcccctgggctttctagatctgtttttttcctaaactctcccttcctatttgcctttctttttgtaactcctcttaactggttacatcagattattaaaataagcttgactcaaatatttttaacatttactaaattttaagcgctttgtacttatttctaaaatgatcatttgattccttagagctgtctcttcacaacgtaaccccacttatttcttacgtatttttaaaaaattggttctttcctctaaaaaacagcgatataaaaaaagatagccatgcagcccaaaaagcagcatctcaccctaccattaaatgtaactttcttattaaaaatgtgcttaggaattgcttacttaatctgaagatgctttaaaaaagaaatcactgaccagtctttatctcctcccacaggtgagaacccccacataggtatagacatgattgacaacgaccaaggatcaagtagtcccagtaatgatgaggcagcaatggctgtcatcatgagcctcttggaagcagatgctggactgggtggccctgttgactttagtgacttgccatggccgctgtaaacactacatgttgctttggcaacagctatagtatcaaagtgcattactggtggagttttacagtctgtgaagcttactggataaggagagaatagcttttatgtactgacttcataaaagccatctcagagccattgatacaagtcaatcttactatatgtaacttcagacaaagtggaactaagcctgctccagtgtttcctcatcattgattattgggctagctgtggatagcttgcattaattgtatattttggattctgtttgtgttgaattttttaatcattgtgcacagaagcatcattggtagcttttatatgcaaatggtcatttcagatgtatggtgtttttacactacaaagaagtcccccatgtggatatttcttatactaattgtatcataaagccgtttattcttccttgtaagaatcctttactataaatatgggttaaagtataatgtactagacagttaaatatttttaataaatgtttcccttgttct

SEQ ID NO: 10861 - DNA, 1976 bp, Homo sapiens
ccaccaatccatacacagaagcaaactacaaaccaacttttctatcagacgatgaattgaaacacctcattctcagggatgtgaccgagggaagatactctttgtctcagagtctgtcttcaagatcctcaactacagccagaatgatctgattggtcagagtttgtttgactacctgcatcctaaagatattgccaaagtcaaggagcagctctcctcctctgacaccgcaccccgggagcggctcatagatgcaaaaactggacttccagttaaaacagatataacccctgggccatctcgattatgttctggagcacgacgttctttcttctgtaggatgaagtgtaacaggccttcagtaaaggttgaagacaaggacttcccctctacctgctcaaagaaaaaagcagatcgaaaaagcttctgcacaatccacagcacaggctatttgaaaagctggccacccacaaagatggggctggatgaagacaacgaaccagacaatgaggggtgtaacctcagctgcctcgtcgcaattggacgactgcattctcatgtagttccacaaccagtgaacggggaaatcagggtgaaatctatggaatatgtttctcggcacgcgatagatggaaagtttgtttttgtagaccagagggcaacagctattttggcatatttaccacaagaacttctaggcacatcgtgttatgaatattttcaccaagatgacataggacatcttgcagaatgtcataggcaagttttacagacgagagaaaaaattacaactaattgctataaatttaaaatcaaagatggttcttttatcacactacggagtcgatggttcagtttcatgaacccttggaccaaggaagtagaatatattgtctcaactaacactgttgttttagccaacgtcctggaaggcggggacccaaccttcccacagctcacagcatccccccacagcatggacagcatgctgccctctggagaaggtggcccaaagaggacccaccccactgttccagggattccagggggaacccgggctggggcaggaaaaataggccgaatgattgctgaggaaatcatggaaatccacaggataagagggtcatcgccttctagctgtggctccagcccattgaacatcacgagtacgcctccccctgatgcctcttctccaggaggcaagaagattttaaatggagggactccagacattccttccagtggcctactatcaggccaggctcaggagaacccaggttatccatattctgatagttcttctattcttggtgagaacccccacataggtatagacatgattgacaacgaccaaggatcaagtagtcccagtaatgatgaggcagcaatggctgtcatcatgagcctcttggaagcagatgctggactgggtggccctgttgactttagtgacttgccatggccgctgtaaacactacatgttgctttggcaacagctatagtatcaaagtgcattactggtggagttttacagtctgtgaagcttactggataaggagagaatagcttttatgtactgacttcataaaagccatctcagagccattgatacaagtcaatcttactatatgtaacttcagacaaagtggaactaagcctgctccagtgtttcctcatcattgattattgggctagctgtggatagcttgcattaattgtatattttggattctgtttgtgttgaattttttaatcattgtgcacagaagcatcattggtagcttttatatgcaaatggtcatttcagatgtatggtgtttttacactacaaagaagtcccccatgtggatatttcttatactaattgtatcataaagccgtttattcttccttgtaagaatcctttactataaatatgggttaaagtataatgtactagacagttaaatatttttaataaatgtttcccttgttct

SEQ ID NO: 10862 - DNA, 2766 bp, Homo sapiens
gggatccgagtgcgggcgcgggcgcgggcgctcccggcgagccacggtggtgctggctagagtgtatacgtttggacccaagcttaacttttccaatgtggaatcctgggccttcattggttccgatgtcataggaatctacgctagagggcttcctgtgtgccgggcactgtggtttttggaagaagctgaccgcctgaaaagaaattataaaacatgaaaatcgctttgaggtgaccaagtccagaggcccctaactcctcccaagctggatctggggtgtaagaactgtgacttcagatcatccaatggcagaccagagaatggacatttcttcaaccatcagtgatttcatgtccccgggccccaccgacctgctttccagctctcttggtaccagtggtgtggattgcaaccgcaaacggaaaggcagctccactgactaccattcacaggtcgaatttggggagcacaatggctggaggtcagatgcccactaggagatgctatgattaatatagaaagcatggacacagacaaagatgaccctcatggaaggttagaatatacagaacaccaaggaaggataaaaaatgcaagggaagctcacagtcagattgaaaagcggcgtcgggataaaatgaacagttttatagatgaattggcttctttggtaccaacatgcaacgcaatgtccaggaaattagataaacttactgtgctaaggatggctgttcagcacatgaaaacattaagaggtgccaccaatccatacacagaagcaaactacaaaccaacttttctatcagacgatgaattgaaacacctcattctcagggcagcagatggatttttgtttgtcgtaggatgtgaccgagggaagatactctttgtctcagagtctgtcttcaagatcctcaactacagccagaatgatctgattggtcagagtttgtttgactacctgcatcctaaagatattgccaaagtcaaggagcagctctcctcctctgacaccgcaccccgggagcggctcatagatgcaaaaactggacttccagttaaaacagatataacccctgggccatctcgattatgttctggagcacgacgttctttcttctgtaggatgaagtgtaacaggccttcagtaaaggttgaagacaaggacttcccctctacctgctcaaagaaaaaagcagatcgaaaaagcttctgcacaatccacagcacaggctatttgaaaagctggccacccacaaagatggggctggatgaagacaacgaaccagacaatgaggggtgtaacctcagctgcctcgtcgcaattggacgactgcattctcatgtagttccacaaccagtgaacggggaaatcagggtgaaatctatggaatatgtttctcggcacgcgatagatggaaagtttgtttttgtagaccagagggcaacagctattttggcatatttaccacaagaacttctaggcacatcgtgttatgaatattttcaccaagatgacataggacatcttgcagaatgtcataggcaagttttacagacgagagaaaaaattacaactaattgctataaatttaaaatcaaagatggttcttttatcacactacggagtcgatggttcagtttcatgaacccttggaccaaggaagtagaatatattgtctcaactaacactgttgttttagccaacgtcctggaaggcggggacccaaccttcccacagctcacagcatccccccacagcatggacagcatgctgccctctggagaaggtggcccaaagaggacccaccccactgttccagggattccagggggaacccgggctggggcaggaaaaataggccgaatgattgctgaggaaatcatggaaatccacaggataagagggtcatcgccttctagctgtggctccagcccattgaacatcacgagtacgcctccccctgatgcctcttctccaggaggcaagaagattttaaatggagggactccagacattccttccagtggcctactatcaggccaggctcaggagaacccaggttatccatattctgatagttcttctattcttggtgagaacccccacataggtatagacatgattgacaacgaccaaggatcaagtagtcccagtaatgatgaggcagcaatggctgtcatcatgagcctcttggaagcagatgctggactgggtggccctgttgactttagtgacttgccatggccgctgtaaacactacatgttgctttggcaacagctatagtatcaaagtgcattactggtggagttttacagtctgtgaagcttactggataaggagagaatagcttttatgtactgacttcataaaagccatctcagagccattgatacaagtcaatcttactatatgtaacttcagacaaagtggaactaagcctgctccagtgtttcctcatcattgattattgggctagctgtggatagcttgcattaattgtatattttggattctgtttgtgttgaattttttaatcattgtgcacagaagcatcattggtagcttttatatgcaaatggtcatttcagatgtatggtgtttttacactacaaagaagtcccccatgtggatatttcttatactaattgtatcataaagccgtttattcttccttgtaagaatcctttactataaatatgggttaaagtataatgtactagacagttaaatatttttaataaatgtttcccttgttcta

SEQ ID NO: 10863 - DNA, 2745 bp, Homo sapiens
gtttacccgcgccggactcaccgccgccgccgccgcgggatccgagtgcgggcgcgggcgcgggcgctcccggcgagccacggtggtgctggctagagtgtatacgtttggacccaagcttaacttttccaatgtggaatcctgggccttcattggtttttggaagaagctgaccgcctgaaaagaaattataaaacatgaaaatcgctttgaggtgaccaagtccagaggcccctaactcctcccaagctggatctggggtgtaagaactgtgacttcagatcatccaatggcagaccagagaatggacatttcttcaaccatcagtgatttcatgtccccgggccccaccgacctgctttccagctctcttggtaccagtggtgtggattgcaaccgcaaacggaaaggcagctccactgactaccattcacaggtcgaatttggggagcacaatggctggaggtcagatgcccactaggagatgctatgattaatatagaaagcatggacacagacaaagatgaccctcatggaaggttagaatatacagaacaccaaggaaggataaaaaatgcaagggaagctcacagtcagattgaaaagcggcgtcgggataaaatgaacagttttatagatgaattggcttctttggtaccaacatgcaacgcaatgtccaggaaattagataaacttactgtgctaaggatggctgttcagcacatgaaaacattaagaggtgccaccaatccatacacagaagcaaactacaaaccaacttttctatcagacgatgaattgaaacacctcattctcagggcagcagatggatttttgtttgtcgtaggatgtgaccgagggaagatactctttgtctcagagtctgtcttcaagatcctcaactacagccagaatgatctgattggtcagagtttgtttgactacctgcatcctaaagatattgccaaagtcaaggagcagctctcctcctctgacaccgcaccccgggagcggctcatagatgcaaaaactggacttccagttaaaacagatataacccctgggccatctcgattatgttctggagcacgacgttctttcttctgtaggatgaagtgtaacaggccttcagtaaaggttgaagacaaggacttcccctctacctgctcaaagaaaaaagatcgaaaaagcttctgcacaatccacagcacaggctatttgaaaagctggccacccacaaagatggggctggatgaagacaacgaaccagacaatgaggggtgtaacctcagctgcctcgtcgcaattggacgactgcattctcatgtagttccacaaccagtgaacggggaaatcagggtgaaatctatggaatatgtttctcggcacgcgatagatggaaagtttgtttttgtagaccagagggcaacagctattttggcatatttaccacaagaacttctaggcacatcgtgttatgaatattttcaccaagatgacataggacatcttgcagaatgtcataggcaagttttacagacgagagaaaaaattacaactaattgctataaatttaaaatcaaagatggttcttttatcacactacggagtcgatggttcagtttcatgaacccttggaccaaggaagtagaatatattgtctcaactaacactgttgttttagccaacgtcctggaaggcggggacccaaccttcccacagctcacagcatccccccacagcatggacagcatgctgccctctggagaaggtggcccaaagaggacccaccccactgttccagggattccagggggaacccgggctggggcaggaaaaataggccgaatgattgctgaggaaatcatggaaatccacaggataagagggtcatcgccttctagctgtggctccagcccattgaacatcacgagtacgcctccccctgatgcctcttctccaggaggcaagaagattttaaatggagggactccagacattccttccagtggcctactatcaggccaggctcaggagaacccaggttatccatattctgatagttcttctattcttggtgagaacccccacataggtatagacatgattgacaacgaccaaggatcaagtagtcccagtaatgatgaggcagcaatggctgtcatcatgagcctcttggaagcagatgctggactgggtggccctgttgactttagtgacttgccatggccgctgtaaacactacatgttgctttggcaacagctatagtatcaaagtgcattactggtggagttttacagtctgtgaagcttactggataaggagagaatagcttttatgtactgacttcataaaagccatctcagagccattgatacaagtcaatcttactatatgtaacttcagacaaagtggaactaagcctgctccagtgtttcctcatcattgattattgggctagctgtggatagcttgcattaattgtatattttggattctgtttgtgttgaattttttaatcattgtgcacagaagcatcattggtagcttttatatgcaaatggtcatttcagatgtatggtgtttttacactacaaagaagtcccccatgtggatatttcttatactaattgtatcataaagccgtttattcttccttgtaagaatcctttactataaatatgggttaaagtataatgtactagacagttaaatatttttaataaatgtttcccttgttctat

SEQ ID NO: 10864 - DNA, 2788 bp, Homo sapiens
gacatttagggaaggcagaaagtaggtcagggacggaggtgcctgtttacccgcgccggactcaccgccgccgccgccgcgggatccgagtgcgggcgcgggcgcgggcgctcccggcgagccacggtggtgctggctagagtgtatacgtttggacccaagcttaacttttccaatgtggaatcctgggccttcattggtttttggaagaagctgaccgcctgaaaagaaattataaaacatgaaaatcgctttgaggtgaccaagtccagaggcccctaactcctcccaagctggatctggggtgtaagaactgtgacttcagatcatccaatggcagaccagagaatggacatttcttcaaccatcagtgatttcatgtccccgggccccaccgacctgctttccagctctcttggtaccagtggtgtggattgcaaccgcaaacggaaaggcagctccactgactaccagtcgaatttggggagcacaatggctggaggtcagatgcccactaggagatgctatgattaatatagaaagcatggacacagacaaagatgaccctcatggaaggttagaatatacagaacaccaaggaaggataaaaaatgcaagggaagctcacagtcagattgaaaagcggcgtcgggataaaatgaacagttttatagatgaattggcttctttggtaccaacatgcaacgcaatgtccaggaaattagataaacttactgtgctaaggatggctgttcagcacatgaaaacattaagaggtgccaccaatccatacacagaagcaaactacaaaccaacttttctatcagacgatgaattgaaacacctcattctcagggcagcagatggatttttgtttgtcgtaggatgtgaccgagggaagatactctttgtctcagagtctgtcttcaagatcctcaactacagccagaatgatctgattggtcagagtttgtttgactacctgcatcctaaagatattgccaaagtcaaggagcagctctcctcctctgacaccgcaccccgggagcggctcatagatgcaaaaactggacttccagttaaaacagatataacccctgggccatctcgattatgttctggagcacgacgttctttcttctgtaggatgaagtgtaacaggccttcagtaaaggttgaagacaaggacttcccctctacctgctcaaagaaaaaagcagatcgaaaaagcttctgcacaatccacagcacaggctatttgaaaagctggccacccacaaagatggggctggatgaagacaacgaaccagacaatgaggggtgtaacctcagctgcctcgtcgcaattggacgactgcattctcatgtagttccacaaccagtgaacggggaaatcagggtgaaatctatggaatatgtttctcggcacgcgatagatggaaagtttgtttttgtagaccagagggcaacagctattttggcatatttaccacaagaacttctaggcacatcgtgttatgaatattttcaccaagatgacataggacatcttgcagaatgtcataggcaagttttacagacgagagaaaaaattacaactaattgctataaatttaaaatcaaagatggttcttttatcacactacggagtcgatggttcagtttcatgaacccttggaccaaggaagtagaatatattgtctcaactaacactgttgttttagccaacgtcctggaaggcggggacccaaccttcccacagctcacagcatccccccacagcatggacagcatgctgccctctggagaaggtggcccaaagaggacccaccccactgttccagggattccagggggaacccgggctggggcaggaaaaataggccgaatgattgctgaggaaatcatggaaatccacaggataagagggtcatcgccttctagctgtggctccagcccattgaacatcacgagtacgcctccccctgatgcctcttctccaggaggcaagaagattttaaatggagggactccagacattccttccagtggcctactatcaggccaggctcaggagaacccaggttatccatattctgatagttcttctattcttggtgagaacccccacataggtatagacatgattgacaacgaccaaggatcaagtagtcccagtaatgatgaggcagcaatggctgtcatcatgagcctcttggaagcagatgctggactgggtggccctgttgactttagtgacttgccatggccgctgtaaacactacatgttgctttggcaacagctatagtatcaaagtgcattactggtggagttttacagtctgtgaagcttactggataaggagagaatagcttttatgtactgacttcataaaagccatctcagagccattgatacaagtcaatcttactatatgtaacttcagacaaagtggaactaagcctgctccagtgtttcctcatcattgattattgggctagctgtggatagcttgcattaattgtatattttggattctgtttgtgttgaattttttaatcattgtgcacagaagcatcattggtagcttttatatgcaaatggtcatttcagatgtatggtgtttttacactacaaagaagtcccccatgtggatatttcttatactaattgtatcataaagccgtttattcttccttgtaagaatcctttactataaatatgggttaaagtataatgtactagacagttaaatatttttaataaatgtttcccttgttctataaa

SEQ ID NO: 10865 - DNA, 4051 bp, Homo sapiens
agtgccccccgcgccccgctccggcagctccacgctcgcgcccgccatgccggagcagttcagcgtcgccgagttcctggccgtcaccgcggaggacctcagctccccggctggggccgccgccttcgccgccaagatgccccggtaccgaggggcggcgctggcgcgggaggagatcttggaaggagaccaagccatcctgcagagaataaagaaggctgtgcgggcaatccatagctccggccttggccatgtggagaatgaagagcagtaccgagaggccgtggaatccttaggcaacagccacctgtcccagaacagccatgagctgtccacaggcttcctaaacttggccgtgttcacccgcgaggttgctgcgctcttcaagaacctgattcagaacttgaacaacattgtctctttccccctggacagtctgatgaaggggcagctgagggacggtcgacaggattccaaaaaacagctggagaaggcatggaaggactatgaagccaaaatggccaagctggagaaggagcgcgatcgggccagggtgacaggagggatccctggggaggtggcccaggacatgcagagagagcggcgcatcttccagctgcacatgtgtgagtatctgctcaaagccggggagagccagatgaagcaaggtcctgacttccttcagagcctcatcaagttcttccacgcccagcacaactttttccaagatggctggaaggctgcccagagcctgttccccttcatcgagaagctggcggcctcagtacatgcactccatcaggcccaggaggacgagctacagaagctgacccagctccgggactccctccgagggacactgcagcttgagagcagagaggaacacctgagccggaagaactcaggatgtggctatagcatccaccagcaccaaggcaacaagcagtttgggacggagaaagtgggctttctatacaagaaaagtgacggaattcgaagagtctggcagaaaaggaagtgtggagtcaagtatggctgcctgaccatctcacacagcacgataaaccggcccccggtgaagctgaccctgctgacgtgccaagtgaggccaaaccctgaggagaaaaagtgcttcgacctggtgacccacaaccggacgtaccactttcaggcagaggacgagcacgagtgtgaggcgtgggtgtcagtgttgcagaacagcaaggacgaagccctgagcagcgccttcctcggggagcccagcgctggcccggggtcctgggggtccgccggccatgatggggagccgcacgacctcacaaagctgctcatcgcggaggtgaagagcaggcctgggaatagccagtgctgcgactgcggggctgcagaccccacgtggctcagcaccaacctgggcgtgctcacctgcatccagtgctcgggcgtccaccgcgaactgggcgtgcgcttttcgcgcatgcagtcactcaccttggacctgctgggcccctccgagttgttgctggccttgaacatgggaaacacgagcttcaatgaggtcatggaggcccagctaccctcacacggcggccctaaaccctcagctgagagtgacatgggcacccgcagggactacattatggccaagtatgtggagcataggtttgcacgccggtgcacacctgagcctcagcgactctggacagccatttgcaacagggacctcctgtcggtactggaggcctttgccaatgggcaggactttggacagccgctgccagggcctgatgcacaggcacctgaagaactcgtcttgcatttggctgtcaaagtcgccaaccaggcttccctgcctctggtggatttcatcatccagaacggtggtcacctggatgccaaggctgctgacgggaacacggctctgcactacgcagcactctacaaccagcccgactgcctcaagctgctgctgaaggggagagctttggttggcacagtaaatgaagcaggcgagacagctctggacatagccaggaagaagcaccacaaggagtgtgaggagctgctggagcaggcccaggcggggacctttgccttccctctacatgtggactactcctgggtaatttccacagagcctggctctgacagtgaggaggatgaggaagagaagcgctgcttgctgaagctcccggcccaggctcactgggccagtgggaggctggacatcagcaacaagacctatgagactgtcgccagcctgggagcagccacccctcagggcgagagtgaggactgtcccccgcccttgccagtcaaaaactcttctcggactttggtccaagggtgtgcaagacatgccagtggagatcgttctgaagtctccagcctgagttcagaggcccctgagacccctgagagcctgggcagtccagcctcctcctccagtctgatgagccccttggaacctggggatcccagccaagccccacccaactctgaagagggcctccgagagcccccaggcacctccagacccagcctgacatccgggaccaccccttcggagatgtacctccccgtcagattcagctccgagagcactcgctcctatcggcggggggcgcggagccctgaagatggtccctcagccaggcagcctctgcccagaaggaacgtgccggttggcatcactgaaggagatggctcaaggactgggagtctcccagcaagttctgtgcaacttttgcaagactagctccttgctggcccccacatgccccatgctaggccccaatgttcagagctgggacttgagctcacaaaactggggagctgagacatttgttctcttggatctcactctctctgtcccttgtgcctctgtagctggccttcttcctgccacaggccatgcctctaccaaggacacatggcctttccctgttaggactgatggcggttctttcctatctcattacccgctaggggcctgggagccctgtggctggatctgagtgctcctgagctggcttcagctgcagaactctcagtccctcatcagatcgagactctatttcccccgtcagtctgggggcttcacaagggcaggagagccctccatcactgacttccagatcagggaccctgccaagtagggactgtcttctcagccagccatttattagtctaatattccttcactaaattccaactctatgtctggacctgtgttaggcacttcagataccacacgagtaagacaagggccctgcaggggtggtcctttggtggaaagctggtcttaagggttgggcttgggaataggcagggtcagattccagggcatggctctggactcagctggtttatacctatatgaccattacaattgtctacagatcacatccattctggctggtcaacatgcatgctgtactggctgttaaataaaaatattctgaatgtcactccttttgagggacagcacagccttccctaggcattctcctatattccccagccaaattgtagagtcagatgcacccacatttgcctgtgtccttgatttagcaggaaggaaaggaatagtcagggttgatggatgcccacttctcttctctttctcttggtcaactcaggagccttttagtctgagggaatggagaggcaaagaaagaagggagagtaatagaattgggagggcagagacttaagggttctgcttcccagccctagaaattctatcattgctcagccccaatgagaaagcagatacacctaagccatcatcaaccactaacatctcaacttgccagttgctgggtgctgggccctggcaggaatgggccaagccaagcaggggagactagagagcaccaatggccaacacagctgcctggctggggaggctgtgctgtttcccctggagacctgactggtctgtggttcccacaggaacagggttgtcttttgagcccccagtgtctggtttcattcatctcagacttgttatttcactcatctctaataaaggattggggggtcagtt

SEQ ID NO: 10866 - DNA, 2865 bp, Homo sapiens
agtgccccccgcgccccgctccggcagctccacgctcgcgcccgccatgccggagcagttcagcgtcgccgagttcctggccgtcaccgcggaggacctcagctccccggctggggccgccgccttcgccgccaagatgccccggtaccgaggggcggcgctggcgcgggaggagatcttggaaggagaccaagccatcctgcagagaataaagaaggctgtgcgggcaatccatagctccggccttggccatgtggagaatgaagagcagtaccgagaggccgtggaatccttaggcaacagccacctgtcccagaacagccatgagctgtccacaggcttcctaaacttggccgtgttcacccgcgaggttgctgcgctcttcaagaacctgattcagaacttgaacaacattgtctctttccccctggacagtctgatgaaggggcagctgagggacggtcgacaggcttctctttccttggggtctagggccaagctggagaaggagcgcgatcgggccagggtgacaggagggatccctggggaggtggcccaggacatgcagagagagcggcgcatcttccagctgcacatgtgtgagtatctgctcaaagccggggagagccagatgaagcaaggtcctgacttccttcagagcctcatcaagttcttccacgcccagcacaactttttccaagatggctggaaggctgcccagagcctgttccccttcatcgagaagctggcggcctcagtacatgcactccatcaggcccaggaggacgagctacagaagctgacccagctccgggactccctccgagggacactgcagcttgagagcagagaggaacacctgagccggaagaactcaggatgtggctatagcatccaccagcaccaaggcaacaagcagtttgggacggagaaagtgggctttctatacaagaaaagtgacggaattcgaagagtctggcagaaaaggaagtgtggagtcaagtatggctgcctgaccatctcacacagcacgataaaccggcccccggtgaagctgaccctgctgacgtgccaagtgaggccaaaccctgaggagaaaaagtgcttcgacctggtgacccacaaccggacgtaccactttcaggcagaggacgagcacgagtgtgaggcgtgggtgtcagtgttgcagaacagcaaggacgaagccctgagcagcgccttcctcggggagcccagcgctggcccggggtcctgggggtccgccggccatgatggggagccgcacgacctcacaaagctgctcatcgcggaggtgaagagcaggcctgggaatagccagtgctgcgactgcggggctgcagaccccacgtggctcagcaccaacctgggcgtgctcacctgcatccagtgctcgggcgtccaccgcgaactgggcgtgcgcttttcgcgcatgcagtcactcaccttggacctgctgggcccctccgagttgttgctggccttgaacatgggaaacacgagcttcaatgaggtcatggaggcccagctaccctcacacggcggccctaaaccctcagctgagagtgacatgggcacccgcagggactacattatggccaagtatgtggagcataggtttgcacgccggtgcacacctgagcctcagcgactctggacagccatttgcaacagggacctcctgtcggtactggaggcctttgccaatgggcaggactttggacagccgctgccagggcctgatgcacaggcacctgaagaactcgtcttgcatttggctgtcaaagtcgccaaccaggcttccctgcctctggtggatttcatcatccagaacggtggtcacctggatgccaaggctgctgacgggaacacggctctgcactacgcagcactctacaaccagcccgactgcctcaagctgctgctgaaggggagagctttggttggcacagtaaatgaagcaggcgagacagctctggacatagccaggaagaagcaccacaaggagtgtgaggagctgctggagcaggcccaggcggggacctttgccttccctctacatgtggactactcctgggtaatttccacagagcctggctctgacagtgaggaggatgaggaagagaagcgctgcttgctgaagctcccggcccaggctcactgggccagtgggaggctggacatcagcaacaagacctatgagactgtcgccagcctgggagcagccacccctcagggcgagagtgaggactgtcccccgcccttgccagtcaaaaactcttctcggactttggtccaagggtgtgcaagacatgccagtggagatcgttctgaagtctccagcctgagttcagaggcccctgagacccctgagagcctgggcagtccagcctcctcctccagtctgatgagccccttggaacctggggatcccagccaagccccacccaactctgaagagggcctccgagagcccccaggcacctccagacccagcctgacatccgggaccaccccttcggagatgtacctccccgtcagattcagctccgagagcactcgctcctatcggcggggggcgcggagccctgaagatggtccctcagccaggcagcctctgcccagaaggaacgtgccggttggcatcactgaaggagatggctcaaggactgggagtctcccagcaagttctgtgcaacttttgcaagactagctccttgctggcccccacatgccccatgctaggccccaatgttcagagctgggacttgagctcacaaaactggggagctgagacatttgttctcttggatctcactctctctgtcccttgtgcctctgtagctg

SEQ ID NO: 10867 - DNA, 24189 bp, Homo sapiens
attattattttattttttgagacagggtctcactctgtcacccaggctagagtacagtggcacaatcatggctcaccacagcctcaacctcctgggctcaggtgattttcccacctcagcctcctgagtagctaggattactggcgccggcttaatttttgtattttttgtagggttggggtttcactatgttgcccggctggtcttgaactcctgggctcaagtgatctgcccacctcagcctccaaaaatgttaggattacaggcgtgagccactatgctcggccagggcataatttgtaataagtaatttaaaacataacagaaaaggcctatgaacaactatctcaatccctgtattctccccagaggtaattgctatggaaatgtacatgcttcccaatgtatctcctcatggaaaatatattatcagtgggggaatgggagtggctgggggaatgtttacctaaattggtatcaggtcttataatgcacagtttaaattgttttggagttacatttttcttttcctttgtgacttttgcttttttgaatcttgttttagaaaggatttccttcttaatttttaatattcttgtgaattttacagtttgctttgtaaaatgtattttagtgtaaaaattgtgtaatcttagagattgtttgcaagaaacataaaccctgtcaagcttgtttctgttggagggaaatttgtttgtttgttttttgatcgtcagagaagaatattgagggaaattggctttaaagaattagaggtgcctcatgagactgaagagccggaggtaaaagtacacctctccagggcctggaactggaggctgggaagttgtcaggaactaaggcagctgcttcgtcattcttgttctctcctgcctctgcttccctctgcacatctgatcagtgctttcgctcattcatcatcacataggccccaaagcacagcccccatgctcacatgacctcactgggccagtgtctaaaggtaaccggacactagattgagccagtctcatgtcccacttccaagttcctggcagaggttgacagcccggcccagtttctggattgggtccagtggctgggtctccacccctggtttcatcagcagaggtcatggagggaaagtgaccggcagggtaaacatggccattgagacctatggtgtgggagggggcgcttctcagagaagaggggcagggcctggaaaatcccctcagaagtatctatggcgattcctctttatttcacacagtccaggttccagggagaggtgctgtgtccatcctgttctgtacctccctggtttagatcatttatgcatactctcaggtatagaagaacccctttagaaaactcaggtataggagttttttcattttttattttttattttttttttgagacagagtctcactctgtcatgcaggctggagtgcagtggcacgatctcagctcactgtgacctccacctcccaggttcacgccattcttctgcctcaacttcccgagtagctgggactacaggtgcccaccaccacgcccggataattttttgtatttctagtagagacagggtttcaccgtgttagccaggatggtcttgttctcctgacctcgtgatccacccgcctcgtcctctcaaagtgctggcattacaggcatgagccactgcacctggctggagtttttttttaagatagagtttcactcttgtcacccaggctggagtgcaacggcacgatctgggctcactgcaacctccacttcccaggttcaagcgattctcctgcctcagcctcccgagtagctgggattacaggcgcccgccaccatgcctggctaatttttgtattttcagtagagatggggttttgccatgttggccaggcttgtctcaaactcctgacctcaggtgatccacccacctcggcttcccaaagtgctgggattacaggcgtgagccactgtgcccagcagtttaaaagatttaaaagatgagattagaatgctaagggggtgcagcaagacttggagggttttgaatgccaattgagcattctgactttttgttgggcggtgtggaccagtggacccaatcatgttgctcaaggaatggatggggttggccctgccagcatagtgcctgggggactgctccatgccaggccctgtatgaggcactgggcagatgcatcgctcagttagagatgcagtccctgccctgtggaccttacagtcttctggcaaagcccaacagtaagcaggtaaacaaataagtcacagccgggtgcagtggcttatgcctgaatgccagcactttgggaggccgaggtgagaggatcacttgagcccaggagattgaggctgcagtgaactccgatggtgccactgcatgctagcctaggtgatagagcaagaccctgtctccaaaacaaaacaaaacaaacagaaagaacaaataagtcagaagttgctcattgtactaagtggcacgaagactcatcctcctcgtcaaggccttctttgaggtttgttctgggtcctcatctcttcagggaatcttgtccacacgtgtggccttagttacctcccatctccaggtgactcacacatttgtacctgtagcctagatcctcatgtcccagtgcatacttgaccacactcctaacttccctcaggctcccttccagagctgttttcacaatgagtggtgcgacctctcacctccacgtgtgcccctcatcaccaaggaacatcttcttttttttttttttttttttttgagatggagtctcactctgttgctcaggctggagtgcagtggcgtgatctcggctcactgcaacctctgtctcctgggttcaagtgattctcctgcctcagcctccccaaggcagatggatcactggaggtcaggagttcgagaccagcctggccaacgtggcgaaaccctgtctctcctaaaaatacaaaaattagctgggtatggtggcacgtgcctgtaatcccagctacttgggaggctgaggcacgagaattgcttgaacccgggaggtggaggttgcagtgagcccaggtcacgccattgtactccagcctgggcgacagagcaagactctgtcccccgacaaaatattattttattaagatctaatttgtcaatagattttgacttctatgagaatagaaactaatctcactgttgtgtccctagtatttaccatagaaccatagtgtgttttcagaaaatgttggttgaataacaaataaatgaaagaaaaaaaaaaactaaaaaggagcattcatagagaataatggtatgggggtgctccagatggaggggacctcttaggcaaaggtcctgaggcagtaaagaagctgaaatatatgtgaccctgaaagggggcccaaggggcaaaagcactgagatgggcaaagggaagagtggcacctgctgagtttgggtggtggtggcaaggccatattcaagtttgatggccctggtagtgagtttaagttttatttagtacacaggcaagcagcataatccagtttgtattttagaaagatcatatcagttgctgtatggaaactagattggaagggccaggagaggacccaaggaggccattctgttatttagggaagagatgatggtggtgtggatcgggttgtggttggtggaggaggagagaagtgcacagattgtagaagtgttttataagcagtcaagatttgtcgatggagtacatgtgggcagtgctcaagattgtgtcccacatttctttttttcttttttttttttgtttgattgggatggagtctcactgtattgcccaggctggagttcagtggcaccatctcggcttactgcaacctccacctcccgggttcaagcgattctcctgcctcagcctcccaagtacctggggctacaggcgcccgctaccacacccagctaatttttgtatttttaatagacatgaggtttcaccatgttggccaggctgttctcaaactcctgacctcaaatgatctgcccgcctcagcctcccaaagtgctgagattacaagtgtgagccactgtgcccggccttaaatttctgatggaagggtgccatataccgagaaggggaaatctggcaggggaacaggtttggggagaaatcaagaattctatttttttttttaattttttgttttttagagacagggtctccttcttttgcccaggctggaatgcagtggtgcagtcatagctcaccacagccttgaattcctgggcttaagcaatcctcgtgcttccacaggcacatgccaccacatccatgctaatttgtttcttctcttggtaaagatgaggtctcgctgtgttgcctaggctggtttcaaactcttgggcttaagtgatcctcttgccttggcctcccaaaatgttagggttacaagcatgagccacttgtgcctggccaagaattctatctgtatatctttataggtcttgagacatccaagtggagatgtcaagaaggcagtatgtgagtttggaattcaaaggagcgggctggagatacacatttgagagctgttagcatcgagaccgtgggtttcaaacctgcatctgtgtcagaatcacttggcgtcattcccagagagtatgattcagtggtggtatcttaggctttttatggcaagcaagagaaaccatcctgagctgatttaagcagaaaagggctgcactgaaagggaatgttcagtagttcacagaatttctgggaagttggaaaactggggctgggcagcaggcaggatctcagccaaaatcatgccaccgagccagtttggcaggacactgctgccacacactaaatgccatcgctgtgtcactgttccctgaacactagacaccattgctgtggttgccaccagcattggaatggatcttccactgtgctcctgattcaaagtctgtagtgagggcttctgattggttgagcttaggtgtaagggaggctggaaaagcaagaatttgttgttttcagctttcacaggaggtgaactctgccaagacctgtgcagtgaggaagtccccagacataggaaggaggtcagatgccagactggcacacaatgacagatgtacttgacagcaagtttgccagcttgtgggattgtctgggaatctgcatttaaaccagcaccctggaaattcccatgcaggtgctgcctgaaccacatttgcatccattgcttgaactggtacttaaagctgtgggggctgggcgcggtggcccacacccgtaatcccagcactttgggaggctgaggcagggggaccacttgaggtcaggagtttgagaccagcctggccaacatggcgaaaccccgtctcactaaaaatgcaaaaaattagccgggcgtggtggcacgcacctgtagtcccagctattcggaggctgaggcaggagaatcgcttgaacccgggaggtggaggttgcagtgagccgagattgcgccactgcactccagcctgggtgaaagggcaagactatgtctcaaaaaaataaaaataaataaataaataaagctgtggaatggacaagatcacctagagagaggaacgaagaaggcccagacccaagccctggggaccctcggtatcaagagattgggataggaagaggaattaataaaggagaccaagaacgggctgtcagtggggaaggaaggaaataagacagtgttgtgcctcagaagccaggagagaagtgttccgaggagaaggggtgctcggctctgttagatgctgcccagatgcccagaggtaaaataagacaatgacagagacacagcctctggctttggcaacacggaggtcattgggaaccttaagagcagatttatggctcacgcctgtaatcccagcagtttgggggactaaggcgggtggatcacctgaggtcaggagttcgagaccagcctggccaacatggcaaaaccccatctctactaaaaatacaaaaattagccagccatggtggcaggcacctgtaatcccagctactcaggaggctgaggcaggagaattgcttgaacccgggaggtggatgtttcagtgagccgagattgtgccactgcagacacagcaaggctccatctcaaaaaaaaaaaaaaaaaaaaaaaagagcagatttaatgccattttcgcctccacaccatcctggactgatttgaggagggggcagatgagaagttctccctagaaggggagcagagacatagggtgtggctagggccctgggatcagcagggttttctaggatggactggggacccaactccactgaaccagcctcctccctaccaacagcctctgcacagggggccgagggtcttcccagagttgtcaaccttgagcctgtctctcaaagtctccttctctccccaaatttgtctttttttgtgctcacttccttgcctagtgttcagctgtttctggccactgaggtacaaggagacagatgactcaggcagatttggaggcagaaactgtaactttaggtcagagcagaaggaacatgctttccctgaaggcaatttgatcatatcattctcagacaagatgctgctagaaggtcccttcgatgggcctagaacttgggcccagggcagatgagggagtgagacccacaggggaacagtgagtggcttctgtgactctaggtcagggccctggaaaaactgattccacctcaccaacgtcacaggaggtgctttggagggcatgggaggctgagctgggaacagctgctgaaggttctctaacttgactggttttagaccttgaaagagcttttaagaatctcagctgctgcgggctacacccagacccactgaatcagaatctcccaggggcgaggcctgggcaagtgtgcagttcagaagttcccaggtaactgatgagcagttggggtgaaaactattgtggtaagctattgcatgcccactgaaggttagtaatccattaagccatatttactgaatgcctgtggtgtacaaaggcaggctctgagggcacggagagaactagacaaggtctccttctgggtgggaggactctgccagtgaaaagttgattgacaacctgtagcatacagggatgtggctgaggtctgtggcgagagtccagtaactaaagtcagacagacttgggtttgaattcctattggctgtgtgactttgggcaaatgacttaacctttctgaatctcagttttctgatctgtgaattagggatgaagataattgtcttatgggtttgtttgaggggataacacatagaaaatctagcaagcatgaacctagcacgtaacaggtacttagtaattttttaaaattccctcttactgtaaacacaagtacacctgcacatagggtagttaaaaagatcaggaaacatacagagaaaagaggaaagtaattgcaatagggatgaggtaattaccatgagtgagtgttgagattatctgtgcggtcctggcaccagagcaaaaagagaaaccttatgtaccttggaggttttggggaatgaacagctaagcctgattttggacaaggcagggtcttccctcagctctgccctttgctctctgcctcctgttcatttctttgtcaaacatttgctgaggccagtgtggtggctcatacccgtaatcccagcactgtgggacgccaaggtgggaggatcacttgaagccaggagtttgagaccaccctggtctcaaacaacaaagcaagaccctgtctctacgaaaacaaaacaaaacatttgctgagaggctacctagcagttctcagtcctggctgcaccctacaatcccttaggttgcttttaggtagatttcctctcattcaggtaaaattcacataacataaaactcaccattttaaaatgtacaattcagtggccttaagtatattcacagtgttgtgtagtcatcaccactatgtaattccagaacatttccatcatcccaaaaagaaaccctgtattgattagtagttactctccactccttttccccggcccccgacaactttccatctctatggctttacctattctggacagttcatgtgaatgaaatcctactatatgtggccttttttgtctgatctctttcagttgcacagtgttttcaaggttcatccgtgttgtctgggttgtgttaaaaagcaataaaaataggaaaaacaaacacaccaggcagtgttgtaagcacttttcagatattagcacatcataacacagggcctgtccagttatttggatacagagaaggtgtctgctgggcaggaatagctaccatgaagccctttctgtgtgtattatgctgggccacgtgcttaaatgcctgactgagttcagtctgattagatagatgctgttattatgccatttgacagatggggaacatctatcagagaagctgtgtcacttgcctcaggtcacacagctaagaggactggaaccagaatttggactttaggacagtatgacttgaaagccggagtccttaacccttgctgtcttttctatattgccactgggccttgctagtatgtattcatacatttaatcattcattcattccacacatgcttattaacacccacatcctgagttttgtgttgagtgctgcagatacaaaggtaaatgagccattccctgcctttctggagttttcagccccgtagagatcagacatgtatggcaaataagggccaggatactctaatgaaagcctgtagtgggcataggatggaataaaggtaggcaggatcagttctgttgtggtggggagggggtgacctgtaagttgagtcgggaaagatgaagtgtttactagacagaatggggcaagggccctccaggcagagggagcagcatgagcaaaggtctgatggctggaaacagtttggcatatttaggaaattgccaagagttcaatagggatggttttaagggaccagtgatggatagcaagcccaagtggggggcagggagggattcatcctggccaacaagggaacccagaaggtgggaagtactgtttgctgctctgtccaagagggcaggccaggttcttccccaggattgggtggaattcagggcttgaggccaggggtcgggtaggaggaaccttccgcggttagtccagcaaagttcttgttctcttagctcatcaccgccaagcaatctcctgaggaaaatcccagccaggaaacttggggtttgcagaggcctcagcatacatcgagggtgtggctcccttcttgcaacccctcttcctccctgcttcccaccaccccacaagggacagccggtaaggctgagctggtgaggctggacaagtgcccaggctgggaagacgtctgcagaggcctgaccaaggggcgcacggccagtcacaggccccagcagtgcaggaaggaaaacagcaagaggccaggggatcctgaaataataaatgtcagagcatacaggagccttccctgtcaccacccaaacccttcattccagaagaggagtcagaggctcagggtgggaaggagactggccaggtcacaccgcgagacaggggcagggctggggctggccctgggtcctggctcccaggccttgcagtgtagccaccgtaggggctgtggggtggcaagcagggccaagggccaccttggtatggatgaggcagaggggtagctgggaagagcactgccctcctctggcacccccttctgccccagcctggactctcaggtgctgggggtgggggctgatccagaggaaaaccatttggagtctttggctcactcttgctggtggctgaggttggagcagccttgtagggtatgactaacctcaactgtgtcctagcgctttggcctggaaggggatttagagctcgtgtctgttagctcaaaattggacagatgaggaaactgaggcatagaaggaggaaggaactcgctcagaggcacactgagggcttaatggcagagacagccctaaaattcagcactttccagttcagggctcttggtctcatggccttgttctatatgcagtagaaggccattctctcagaatgtttctgcagcacctctgaagatgcctggcttccaccattagaaaaaacattacctcaatttcttttcacagcaatccttacagagataactggggctcagagagagaagatttagctcgtagtttgctttagtgtgatagcaagaaagggctctggaggcagaggtctctgcgtttcttagaacttcctacatgaccttgagcaaactgcctaacctaccccagcctcagtttcttcatctgtaagatggggaggataataactacctcacagagttgttgggaggaataggccaggtaacaaacataaaatgcctgccccaaagtgagcagtcagttagtggggcgataggtagttgaattcatgctaataatagactcaagctgggagcttggaatgggagtccttcctgttgggtgatctgctccgggccagggcctggctgtgttcctatcaccctgtcatgcctgggggacaaggctgaaccctctttgtcccgcttgaacatggatctgcagcccagccctggagttaaactttctatgttgagaattaccaagtaactgccctgttcagaacccttcaggagcaccccatcacttatagaataaaacctagaggtttggttaaaagcatggactctggagcccaactgcctgggtttgagtttattttatttattattattgttattattatttttgagatagggtctcgctctgttgctcaggctggagtgcagtggtgcaatcagagctcactgcagccttggactcctgggctcaagtgataccctaccttagcttcccaagtggctgggactacaggtgtgtgccaccatgcctggaaaattgttttgtattttttgtagagacagggtttcgccatgttgcccaggctggtctcaaacttctgggctcaagcaatccacccacttgggcctcccaaagtgctgggattacaggcaggagccacaacacctgacctgcattttctgtaaattggtaattggatctagaagtgagaagccctgggttttttttgtttttttttttgtactttatcattttgttaaatattttaagtgtaacttggtttgctcattcaggtattgtactttttttttttttttttttttgagatggagtctcactctgtcacccaggctggagtgcagtggtgtgatctcggctcactacaacccccacctcctggattcaagtgattcgcctcagcctcccaagtagctgggactacaaaaattagccaccacacccggctaatttttgtatttttagtagagatagggtttcaccctatctcaactaaaggatggtctcaaactcctgacctcgtgatcctcccacctcagcctcccaaagtgctgggattacaggcgtgagccaccgcaccctgccaaacgttgtatttttagcatcatgtttaatatgtagtacatataatttaatcatctttgtggacactggcgtcagagaccaaagagccaggattcagccatcccacaggaaaactcctttttagcgttggagtttcattgatcttcccacatcacgtatactgttagtattgattgattgaaaaatatgggaaagaacaaatgaattcaagaatgcttttaaagggttctgtgtcttattgatcatagagttgcacatatttggaatgtggtcagactaatttgtgaaacatttttatactcgtcagtagtgctcatgatgagtgtggcttcacagtgtcctgctagtaacaccatggaccttcagggtctgggtccattgcctggaaatgaacaagggagttagagtcttaacggtttagttcccaggtccacattttggctgtgtgagctcaggcaatgatcttcactgttctgtgcctcgctgactcatcagccagatgggaacaaaaatgatgactgccccattaagatgctgtgtgtctgaaatggtgggtgtcaaactcccttacaaactgtaaagctctatacaagttttaggttgtattttttttttctttttctttttttttttttttttgagacggagtctcactctgtcacccaggctagagtgcagtggcgtgatctcggctcactgcaacctctgcctcccgggttcaagcagttctctgcctcagcctcctgagtagccgggactacaggcacctgccaccacacccagctaattttttttgtatttttagtagagacggagtttcaccctcttgaccagggtggtcttgaactcctgacctcgtgatccacctccctctgcctcccaaagtgctgggattacaggcgtgagccaccacgccgacctagtttgtatttgtttcttagtttgtttgcatttccagtgaaacctggggcaagaaactcacctgagcctttattttgcagtctgtaaaatgaggaggtaatgttagataatctctaatattctgtgacttcgtctcttaaggaacaacaccatagtccaaagcaaagatagaaaatgtttttcatctcctctgccaactctagtttaattggtagaggctaccatcatatcttaacagaatgatgaaccaaatccacagtcagtggggaaaacactgtgatcgattaataatggctataatgggccaggcgtggtggctcacgcctgtagtcccagctacttgggaggctgaggcaggagaatggcatgaacccaggaggtggagcttgcagtgagccgagatcacgccactgcacttcagcacttcagcctaggcaacagagcaagactccatttcaaaaatagtaataataataataataataataataataatggctgtaatgggccgggtgaggtggctcacgcctgtagtcctagcactttgggaggctgaggcgggcggattacctgaggtcaggagttcaagaccagcctggccaacatggtgaaacccctgtctctactacagaaaattagccaggtgcagtggcgcatgcctgtaatcccagctactctggaggctgaggcaggataattgcttgaacctgggaggcggaggttgcggtgaactgagatcacaccactgcactccagcctgggctacagagcgagatttcatctcaaaataataataataataataatggctgtaatggtcatgggatgacacagaagtgataactatgtactatattataatggtccaaaggaatgaatgtctaatggtgaaatgtaatctgtatctcccaaggccttagctctagcagctctgcccccttggcttgagttgccttggtaaccacagctggctctgagaaaccatgggaatgaagaatgggtcctattgatgaatcctgacccagaagggggcatgcagaaggcccttctaggcagggcagctgggcatggcctagtgctgccatctgtggtcttttgcctgcagagaacacaaaccagagagccagagcatggtgtgtgtgtatgttgggatcagggtaggggacacaaagggcagtgccagcagctggaatttaggccttgtttagggccagccagggtaggctgcccaaaggactccagtgggctttccaagctcagacgtgtctcttacactaagatgtgtttcagccacctttgcccagtgcctgccaggctcttgcatggatccattgactcttagctttgaatgaaatctaaatagctgtccattctaatccaaaatccagtgtctgaatcactctctagcacctaaagtatttgaatacttcaagtgacagggagctcactgccttcaggggtggcctgttcttccttagaaatgtcccctgtttgagctgaagtctgtttctgcctccctaacttccacctctcagtcctgggaatcctctctgaggccagcctgaacaaatccgttttcttttcagtaggacatcctttacagtgtttgtattcggggcctcaccattgctgtcaaccttgttttccttggacagatctccctctgtgccctgccttctccctttcctaagcctgaggggatggtgagggaatatggtagaggtggtagaattgggatttaggtttggaggcagatccagtcccaagatcaaataagctgtgccccctaactttgtggggcagcttagagatggggaaagaacattggccctggatttggctagtcctggatttaaattgtaactctgggccaggtgcagtggctcatgtctgtaatcccagcactttgggaggccgaggtgggcagatcatctgaggtcgggagttcgagaccagcctggtcaagatggcgaaaccctgtctctactaaaaatacaaaaattagctgggcatggtggcacacgcctgtaaacccagctactcaggaggctgaggcaggaggatcgcttgaacccaggaggcagaggtggcagtgagctgagattgtgtgtctgcactctagcctgggcgagagtgagagtctatcccccccccaaaaaaaaagaaagaaaaaaaagaaaaaaagttacagctctgccactgttcatcactgtgtgacttggacatgttcctcctcctgacagcttcatctttaaaatgggaatggcaatgccttcctcaaagagtggccaggatagtgacaagtaatgaggctgcacagagcaggcacttgggacatgctgcttgcactctccctgcccggcggcagaggtctgctgtggtccctctccacctgtgcttccccacagcttgctgacgaggatcaacatggagttgggggtgtggggagatatgtttaattaattcaatgaaagttgagaaattcctaaaccaaattcaatttaattttgaagtagataacatttttagttatcaaatagtggacagtattctaagcactttacctatagaatttacttaatctccccagtaaccttatgtggtacgcaatattatcatcttcattttatgaatggggaaattgagggactgagagatcacatcaggtacctggtggagctggaattcaaatccaggtagtttggggacagccccatacttttagcaatgatgatgtactgcatctctgaagagaattagaacagtaattcccaaactttagcatgcattagaatcacctggagggcttgttaaaccacagattgctggacctcacccccagattttctgattcagctggagaatttgcttttctaacaagttcctggatgatgcctgctgctggttgagggcccccaccttgagaatctctgactatcagggattaaatgggcccacctgaacccagaagctgatttttttttttttttttttttttttttttttttttaagacagtgtctcattctgtcactcaggctggagtgcagtggcatgattatagcttactgcaacctcgaactcctgggctcaagggctcctctcatcccagcctcccaaatagctgggactacaggtgtgtgtcacagcacttggctaacttttttaaaaaattttttgtaatggtcgggtgcagtgcctcatgcctgtaatcccagcactttgggaggccaagacaggaggatcagttgaggtcaggagtttgaaaccagcttggccaacatggcgaaaccccatctctactaaaaatacaaaaattagccgggcatggtggcgggcacctgtagtcccaactacttaggagcctgaggcaggagaatcgattgaacctgggaagtggaggttgcagtgagccgagatcacaccactgcactccaacctgggcaacagagagagactgtgtctcaaaaaaaaaaattttttttttttttggtatagatcggggtgggggtctcactttgttgccgaggctggtcttgaactcctgggctcaagcgatcctctcaccttggcctcccaaagtgctgggatgataggagggagccgccacacctggcttttccttcatctatccagtttcatgggaaacgagggctgatctcacacagaggcagaaaacaaaccacagtaagaaccatactcatgttttccaaatgcctcaagccttgccatgtttgtgatctcattaagcctcacagtaattctgtgagttaagcagagaatggatttttctgcctgtaatcccagcactttgggaggccgaggcaggcggatcacgaggtcaggagtttgagaccagcctggccaacatggtgaaaccccgtctctactaaagataaaaattagccaggcatggtggcgggcacctgtaatcctagctactcgggaggctgaggcaggagaatcatttgaacctgggagacggaggttgcagtgagccgagattgtgccattgcactccaggctgggcaacagggcgagattccatctcaaaaataaaaaaataaaaaaataaaaatctattttaaaggagaggaagtttagaaaactagctgggctagtatcacccaaggagataattttggagatgctggggctagaatcttagttactgactcatcatagcactctggaaacctctgcctttcctcaaaataccttcctttccccaggctactatcagaatcgtctccttaaaactaaatttttttatgagtgtgtggatgagtggattaaaaaaaaaaacctgcatttctttagcttaaatctttgagccctattataccacaggataggtgttatcaaccagtgtaaatgattttcagatattttcttgagaaaggagtaattagaacttttcccttttcatgctccctatgggcacttgcatgttcttaagtctgtggttctcttgaaggaaggggccatgtcttatgtgtccccaccatctggcaccatgcctggctgaaacagtcaccaagaaatgcttgttgaaatgaatgaatgaatggaggaactatgttcctgtccttgtccattcttcccagagcacgcctcccttcctggcagtcctaccattttttaccaagcattccctcccctctacctcatagtgtagtctctttagtctcttttctgcctgtccaggggccagagttaagcaacacagcttaagggacgccttccccattccttcaaagcagacatggctctgttttccctggactcccaggaaccttccatcatagccctcatcacattgcatgataagtgtctgcttataatggctttttcttcccttcaatgatgatgtccttgagagctgagattgtgtcttttttgtttgttttttgagacggagtctcacactgccctcctggctggggtgcaatggcgtgatctcagctcactgcagcctccgcctcccaggttcaagcgattctcctgcctccgcctccctagtagctgggactacaggcacatgccaccatgcccggctaattttttgtatttttagtagagacgtgttagccaggatggtctcgatcttgacttcgtgatctgccagcctcagcctcccaaagtgctgggattacaggtgtgagccactgtgcccggctgagattgtgtcttttttacacagggtgtagtgggcactcaataactaattgaatgaataaacagccatgtgaacttggctgccaagagcagtagggacgggaatggtatctggctgggaagctgtttcctgatagatgtctgacaagggcatcgaaaaacagtttgtggccgggcgcggtggctcacgcctgtaatcccagcactttgggaggccgaggcaggcggatcatgaggtcaggagatcgagaccatcctggctaacacggtgaaaccccgtctctactaaaaaatacaaaaaattagccgggcgtggtggcgggcgcctatagtcccagctactcgggaggctgagtcaggagaatggcgtgaacccgggaggcagagcttgcagtgagccgagattgtgccactgcactccagcctgggctacaaagcgagactccatctcaaaaaaaaaaaaagaaaagaaaaacagtctgtgagtgattcgggtgacttgtctccctttaccagttagagctagtttcagccacaagtggcagaatacccagtataacagtggctcaaataagagatttctctttcatattaaagaattccacagataagtagactggggctgctagggtagtttcctaatcactagggacaaggctgatatcttgttgctccgccatccataacaaatggcttctacttcatggtccaggattgctgcctgagctctagacatcgccagcacattgtagccagaagaaaggggtgacagagggtacccttgcattccccttttttcttttgttttttttttttgtgggggggtgcgtttgagacagggtcttgctctgttgcccaggctggagtgcagtggcacgatcacagctcactatagcctcaactccctggggtcaaacagtcctcccacctcagcctcctgagtagctggaattataggcccatgccccatgcctggtttttaattttttgtagagacagactctcactatgttgcccaggctggcctcgaactaggctcaagcaatcctcccgccccagcttcccaaagtgtgagattacagccgtgagccaccccaccccaggccctttttttctaaattaaaaaaaatcgactttattttttagagcagttttaggttcacagcaaaattgggcaggaagtacatagagttaccatatacacacagcctccccctctgtcaacagctcttaccagagtggtacatttgtttcaatgaccatacattgacacatcatcaccaaaagtccatagtttacattagggttcactcttagtgttgtacattctgtgggattggacaagtgtataattccatgtatccaccattatagcatcatacagaaatgtttccctgccctaaaaaccctctgtgcttcacctgttcctcctcactacccccatccctggccaccactgatctttttactgtctccatagttttgccttttccagaatatcgtatagttgaaatcatgtagtagccttttcaaattggcttctttcacttagtgatgtgcatgtaactttcctctgcatcttttcatggtttgatagctcatttcttttcagtgatgaataatatttcactctctggatgcatgacaatttctttatccattcacctactgaaggacatcttggttgtttccaaattttggtaattatgaataaagctgatgtaaacatccgtgtgcaggtatgtatacgttttcaactcattgagaaaatatgaaggagtatgattgctgactcatttggcaagagtacgtttagttaagaaactgtcaaactgtcttccgaagtggctgtaccattttgcattcccaccaacaatgggagtttctgttgctccacatctttgtcagtatttgtgttttggggttatttatttatttatttgtgtgtgtgtgtgtttttgtttggttttttttttttttttttttgagatggagtctcactctgtcacctgggctggagtgcagtggcactgtctcagctcactgcaacctccgcctcctaggttcaaatgattctcctgccttagcctcccgagtagctgggactacagcggtgtgccaccacgcctggctaatttttgtatttttagtagagacagggtttcaccatgtttgccaggctggtcttgaactcctggcctcaagtgatccaccagcctcagcctcccaaagtgctgggattataggcgtgaaccaccgtgcccggcctccctttgccagtatttggtgttgtcagtgttttggattttggccattctaacaggtgtgtagtccctcccttcctttttatttttcaattttttaaagccactttattgaggtaggattgacatgtaaaaagctatacatagtcagtgtatacaacttgatgagtttgggggttatctcccttctttgtaagatactttttggaagttaacaattaaaatattatattccatggccaggacttagtcccatgaccacagttagctgcaaggtaggaaatgtagtctttattctaggtcgccaagtggccatctgaaaagtcaggtttcttgtgaaggaagaagagagaatggacactgggagccacccagtgatctctgccacactgcagggaagggaaatcttctcaaacttgcttaaaggaacttcgttgggtggattcaggggtatttcatggaatttcaccaaagacataatgtgtggaggttgcctctgaagaggtagcatctggaaagttgccagaaaccagcaccactcttcctcttctgccttgctgtggcggtgtggggcttgttcatgtctttctacacatctgctctgttcttttctctctgcatgtggcaggaaggacatcccagctttagcatttcagtcagtcaactagctttccagagcccaattccaaagtccttggagagagaatctgattggtccagcttgggtcaggtgggagagagaatctgattggtttagcttgaaccaggtgtctgtcgactctggctagaacaaacaaggctgcaggggcccacctccagaggaagggagggcagttttcagaaaatgggtgtcatgggatgggaagactcctcagaatgtatctagagcatgaacatactcctctcaggtccatgtcccaggactttgcaaaccatcattcatttaggtaaacatttattgggcaccttctgtgtgctaggtacatggatctgccctctagggattttggaaatttttttggaaattgttcatatcttttttttttttttttttttttgagatggagtctcgctcccattgtgcaggctggagtgcagtggtaccatctcagctcactgcaacctccacctctcgggttcaagagattctccttcctcagcctcctgagtagctgggattacaggtgtgcaccaccacgcccagctaatttttgtatttttagtagagacagtgtttcgccatgttggtcaggctggtcttgaactcctgacctcaggtgatccactgccttggcctcccagagtgctaggattacaggcgtgagccactgtgctggcccagttgttcatatctttaacctgaattgtcttttagagcgaaatcatagctccttaaattactcaccttttagctttccaggtttcaagatggggatcaagggatttggtaaacacatgcttctgtttccccatctggattttggggaaccatagaagtggccatgttcttgcctctttttttttttctttttctgttggccagtttagaaagaaacgttctcccctccacctctttgtctctttagtaagaaacattttggttgttttttgtttgtttgctttgctttttgagacagggctctctctgtcacccatgctggagtgcagtggcgcaatcagggctcactgcagttttgacctccccaggctcaggtgatcctcccacctcagcctcccaagtagctgggactataggtgcatgccaccacatggagatggggtttcgccaagctgtccaggctggtcttgaactccttggctcaagtgatcctcctgctttggcctccccaagtgctggaattacaggtgcaccccaccacacccagctaatttatttattttttcttttcggtagagacaaggtctcactatattgcctaggctggtcttgaactcctggcctcaagtgatcctcctgtttctgcctcccaaagtgctgggattataggcatgagccaccatgcccagcctcatgttttaaccaactcaaatatgatgccgtctccttaatcttcctgattcttttgttttctttcttcagccctgggatgggcctccacggatctcaaatatgaaagtgtctcaagttcacacccgaggaggagaatgttagatttctagcccctgtaggaaaagcacctggaacttggcagaccttcctagcatcagcagcagctgatgataacgatcacaggtgctgttcattttgaacatactccatgcctagcaccaagctaaatcctgtatttgcatcctctcatacatatagccctcataccaaccctgagaggtaggcatcgatttccccattttacacatggctaatcaggaagctcagaaagaataggcaacttgtgcccgggcacggtggctcatgcctgtaatcgcagcaccttgggaggccgaagcgggtggatcacttgaggtcaggagtttgagaccaacctggccaacacaatgaaaccccgtctctactaaaaatacaaaaaattagccaggtggtgggcacctgtaatcccagctagtcagaaggctgaggcaggagaattgcttgaacctggcaggcagaggttgcagtgagccaagattgtgcaactgcactccagcctgagcaacaagagcaaaacttggtctcaaaaaaaataggcaacttgttcaaggtcacatagcccccgagtagtggagctgagcttcgtaactagaccccccttcctccagaggcttcccacatgccaccggcctctgagaacactccacattgcctctgagttctgccctatgcatgttctcctgtgggtatcattttgaatctttggcagtaccatttccaatgtgtttactaactcttgtcatgtaactctggaaatcagactctgatcccattttatttttgtcactgggaagaacagctgggctggggtcagggtggggctgtggtacatggatggaacactgttctgttgcacccgggaagtccagctctgtggcttccccaccatgtgtctctcggtaagggcctcccatctcttggcttcagttttctcatctgtgggccccttccagctcgacattctgtgttttccaagttaactgtgcatttcgcaaggatttcatgaggttgtcaacttccatgccccactgaaagggggagtgtttcccatctaggctgagcctgcttggggcatgtgagacttgcttcttgccatcacatctctggcctttcccacattctgatgtttgttctgcagcctctgggctttggggttatctggtgttgtctctccagttctccccagtggtgatggagtgtgctcccgccaccctctgccatctccccagactcaggtaactgaatgcctccaacccctctctgctcacccatagcatcctggcctcttcctccttgtcctgacataactgtttattgagcctggggtttggtgaacaagtgtaccctgctttgtatcttaagggaagatagagatgtgtgtgttctcccctctggccttttgctcagcattttgtacatatttacaaatcattcatcttctcagcaactccacaagtcccctagtatcatccccattttgtagacaaggcactcaaggctcagagaagttaacagatttgtctaacggacacaccagctactgccagaggcaagattcaaacccaggcctggcacaccctgtcatgccacgtacctttgactcactacatttacgctgcattggattcagggagaaaagtctgtggtcttcttggagtggtgtgactggtctgtggtttctgtgtggttttttgtttggtggggtaaacaggaagaccctagggataagttccagaggacagcaaaactcaatgtatttgtttggagggcggttggggggtggaaatcatagatacagcgttcctgaaggaagcaccctattccagcttggcatccctgaacctctgtccacatttgcttccagatcttggaaggagaccaagccatcctgcagagaataaagaaggctgtgcgggcaatccatagctccggccttggtaagtgagcctcctgggtgccccgcctggtcaggaagcccctctcccagccccagcctggagctaactccaagctcccgtctgtacctccacaggccatgtggagaatgaagagcagtaccgagaggccg

SEQ ID NO: 10868 - DNA, 480 bp, Homo sapiens
attattattttattttttgagacagggtctcactctgtcacccaggctagagtacagtggcacaatcatggctcaccacagcctcaacctcctgggctcaggtgattttcccacctcagcctcctgagtagctaggattactggcgccggcttaatttttgtattttttgtagggttggggtttcactatgttgcccggctggtcttgaactcctgggctcaagtgatctgcccacctcagcctccaaaaatgttaggattacaggcgtgagccactatgctcggccagggcataatttgtaataagtaatttaaaacataacagaaaaggcctatgaacaactatctcaatccctgtattctccccagagatcttggaaggagaccaagccatcctgcagagaataaagaaggctgtgcgggcaatccatagctccggccttggccatgtggagaatgaagagcagtaccgagaggccg

SEQ ID NO: 10869 - DNA, 4001 bp, Homo sapiens
ctggagcaggcccaggcggggacctttgccttccctctacatgtggactactcctgggtaatttccacagagcctggctctgacagtgaggaggatgaggaagagaaggtgggtcccagccctgtccctcaggcctctggatggcagaaggaaagagccagattgggcctggtgtgtgttggcgggggcggtgaggcggggggacagggctacaccggaggaaccaggctgtcctcatcctcaatcttttgctctggcagcgctgcttgctgaagctcccggcccaggctcactgggccagtgggaggctggacatcagcaacaagacctatgagactgtcgccagcctgggagcagccacccctcagggcgagagtgaggactgtcccccgcccttgccagtcaaaaactcttctcggactttggtccaagggtgtgcaagacatgccagtggaggtacagttggatgcccagataaatgctcaccatgccattcacagaggacctgtatatgctggggcactgagctgagtgcatatgttagtccgtactatccttatgatgacctcccaggaaggggttctcatcttccccttacagataaaagaacagaggtgttaagtcacatgtttaagatcccacagctaataagtctctgatgtaggattcaaatctcagcccatcttattccaaattcctcaatgctccacttaacaagagagaaacgagtttattgagcatccccttcatcctgagtcctttgagggctaccaagacacagtctagtaggggagataaaaactggaatgcaattcattataatacaaggcacaatgtgatatagaatgtaaatcccaaaaggacaaggactttgagtgtttcattgaatactatttgtccagtgcctagcgcagagcctggctgttctcaagaactatttgtcgaatgaaggaacagacttgttgtgggaggttggggcagttggagagggagcatgtcctgctgggattgggggttggtttaagaaggcttcctggtgaggatagcatatgagtgaacctgagggatgagcaggagaatccaaactgggacagggtatgagcacaagcaaaaaagtgagtcagcatggccctggccaccgcgaacaaaggcttcatcagttgaaggagaatactggacaggtagatggggaatggactattggcagagaaccagaagagatcctaggccagatgtggtggctcgtgcctgtaatctctgcactttgggaggccgaagcaggcggatcaccccaggtaaggattttgagaccagcccagccaacatggtgaaaccccatctctactaaaaatgcaaaaattagccaggtgtggtggcatgcacctgtaatcccagctactctggaggctgaggcaggagaatctcttgaacctgggaggcggaggttgcaatgagccgagattgcaccactgcactccagcctgggtgacagagtgagactctgtctcaaaaaaaaaaaaaaaaaaaatcctagaggccagagactgctttgaggttgggcacagagcaagtgataaagaaaagctttatcatttctgatgtttctgattccagatcgttctgaagtctccagcctgagttcagaggcccctgagacccctgagagcctgggcagtccagcctcctcctccagtctgatgagccccttggaacctggggatcccagccaagccccacccaactctgaagagggcctccgagagcccccaggcacctccagacccagcctgacatccgggaccaccccttcggagatgtacctccccgtcagattcaggttggtgagggcccagctgtgcaaccagggcaaatcccctgacttctctgagcatccattgatttccacacctctaaatagtacctgcctaaagactgggtcacacgccatctctgggcccatcacttatgcagaaatgctgaaccctgggaccccttcccccttcacacacttgctcccaaatcctgcatggagagctgaggaggagccagggatcctccctgctgatgttggagtaaagtaggcttagccccctgtgtggcttattctagaggctctcagtggggtcttcactctgtccccacctccaacccaggatccagtcttctcccttccatacaaacccattcagtctggagtttggggagaagtagacctgcagatatccacagagtcttctggaggtcagttccagccttcttgggcctgtgatggacctggcctgggggccttgtggactctacccacccatcctaagcccccagactggctctgttcctgagccctttctccccactctgaggggctctctggacatgagggtcatgttggcctttccctgccttccagctccgagagcactcgctcctatcggcggggggcgcggagccctgaagatggtccctcagccaggcagcctctgcccagaaggaacgtgccggtaggaactctgggaccatggtttgaggggcggtggcagggtgcctgggaggcagagttagtcaagagtaggcgtattggggtgggagacctccccatggttggggtacagatgggcccaggcagccacagtttggacagtccctgtcctggtgcccaggtgggcacggtttggccagtccctgtcctggtgcccaggtggccacggtttggccagtccctgtcctggtgcccaggtggctgcagtttggccagtccctgtcctggtgctcctctttccatgctccagcccagggctgggtgaagctgaggagagcccaggccttgagggatggcagtgatcatgaggcccaagctctggcttctccccaggggaggatgaggaaagttgtgttagccaggccagtcgctcagagaaggcatcacttccctgcagaagaggcaggattaggtggccgtgtaccagcccttgtttgcctaactctccccttgttcatgagtctcctggaatccacagggactttcagatcccaggcatagagggatgtgacagggacagggcaagagctgtcatccttaatccagcttctccctgctgaatcaccaagtctccaacaatggcatatattagttgaacctaggagtgggcacagatcagagccagttgtgttgggaaagaagcctcttctgtcccttgttcctctgggaattcctcagaatggcattggttgtgttgggagtcaggatggcaggggcaaaagctggttctgtctggggaatcgtcatctttagtccaccagagttagtcagcagacacaaatctatgtccatattctggttccactattgccctgaaaaccaagtatccatcagatggcatttaattgatgcctgtgattgtggtgtgtatgatagcaagagcttgggctttagagtaaggagactttggataagtggcttcacttcctcaagcctcagtttctttgtctgtaaaatgagaataatttaatttatctacaataggacagatgtgaaactgagtgagatgaacacctggtatgttacaggtgctttgaaaatgtcagtttcatccttctttctgcaggttggcatcactgaaggagatggctcaaggactgggagtctcccagcaagttctgtgcaacttttgcaagactagctccttgctggcccccacatgccccatgctaggccccaatgttcagagctgggacttgagctcacaaaactggggagctgagacatttgttctcttggatctcactctctctgtcccttgtgcctctgtagctggccttcttcctgccacaggccatgcctctaccaaggacacatggcctttccctgttaggactgatggcggttctttcctatctcattacccgctaggggcctgggagccctgtggctggatctgagtgctcctgagctggcttcagctgcagaactctcagtccctcatcagatcgagactctatttccc

SEQ ID NO: 10870 - DNA, 936 bp, Homo sapiens
ctggagcaggcccaggcggggacctttgccttccctctacatgtggactactcctgggtaatttccacagagcctggctctgacagtgaggaggatgaggaagagaagcgctgcttgctgaagctcccggcccaggctcactgggccagtgggaggctggacatcagcaacaagacctatgagactgtcgccagcctgggagcagccacccctcagggcgagaatcgttctgaagtctccagcctgagttcagaggcccctgagacccctgagagcctgggcagtccagcctcctcctccagtctgatgagccccttggaacctggggatcccagccaagccccacccaactctgaagagggcctccgagagcccccaggcacctccagacccagcctgacatccgggaccaccccttcggagatgtacctccccgtcagattcagctccgagagcactcgctcctatcggcggggggcgcggagccctgaagatggtccctcagccaggcagcctctgcccagaaggaacgtgccggttggcatcactgaaggagatggctcaaggactgggagtctcccagcaagttctgtgcaacttttgcaagactagctccttgctggcccccacatgccccatgctaggccccaatgttcagagctgggacttgagctcacaaaactggggagctgagacatttgttctcttggatctcactctctctgtcccttgtgcctctgtagctggccttcttcctgccacaggccatgcctctaccaaggacacatggcctttccctgttaggactgatggcggttctttcctatctcattacccgctaggggcctgggagccctgtggctggatctgagtgctcctgagctggcttcagctgcagaactctcagtccctcatcagatcgagactctatttccc

SEQ ID NO: 10871 - DNA, 5345 bp, Homo sapiens
tatctgctcaaagccggggagagccagatgaagcaaggtcctgacttccttcagagcctcatcaagttcttccacgcccagcacaagtaggtatcttcccgcgtccctgccactaacccttccagtgtcacagaacaaggcccctctcaaggtgtgatagacctgagagtctctttggaggcctgcatctttttggcagaactttcatagttcctcattgagtgctcaccgggtgtcaggcatgagtactttacaaacatcaattcgctcaattccccaacacttctgggagcaggtactctattatccccattttatagatgagaaaactgaggcttattttccaagattacatagctagtaagtgggatttgaacctagtcaagagagactcttgtctatggagtgtctgttcttgaccgtcagactacaattccctgaggtgccctgtgatccttacggcagcttctcccacacttctggcttcatctctcatttccatctttatctggacccttgtttggcctctgacacctcttagctttttccaagatggctggaaggctgcccagagcctgttccccttcatcgagaagctggcggcctcagtacatgcagtaagttgggtctcacccttgggcacgtgatcaagccccctgtccttccaggaaaatctgtgggtgtggaagagctggcttctgcccacagagtgaggctactgctctgctcttctgggtctgggctctgtgcctgacatatttgttggctggtgatgggatcccatcctctgtcccatagctccatcaggcccaggaggacgagctacagaagctgacccagctccgggactccctccgagggacactgcagcttgagagcagagaggtcagcccctgaactatcccaaaaggaatgccctcccccaaggcccaccgtggagggagggagagaaggaagacccacagggtcccctggagaagtctccctgagtgagcccccgcagaatggggctcttcccactgagatgccctgaggtctcctttgcatgtccgagggacaggaacacctgagccggaagaactcaggatgtggctatagcatccaccagcaccaaggcaacaagcagtttgggacggagaaagtgggctttctatacaagaaaagtgacgggtaagtgattcagagcttacataatttgcccaatgtcacactgcaagtaaatgacagggttggggaagctgcccaaaggaactgttctaatcatttgtgtagacaccgagggttgcaatgtaaaatcctcaattcctgggttgtccaggacacctgggcatgtgaacttctgctaaaggtgactggttattttaagttaaagaagaagaatagcagtagctaacacttttttttttttttttttttgagatagagtctcactctgtcgcccaggctggagtgcagtgccatgatctcggctcactgtaagctccgccttccgggtcatgtcattctcctgcctcagcctcccgagtagctgggactacaggcactcgccaccacactcggctaatttttttgtatttttagtagagacggggtttcactatgttagccaggatggtctcgatctcctgaccttgtgatccgcccgcctcagcctcccaaagtgctgggattacaggcatgagccaccgcgcccggctggcagtagctaacacttattgcaacacttactatgccctcattcttttttttttttttttttttttttttttttgagatggagtctccctccgtcacccaggctggagtgcagtgacgtgatctcagctcactgcaacctccgcctcctgggttcaagcgattctcctgcctcagcctcccgagtagctgggactacaggtgcccgccactacgcccagctaattttttgtatttttagtagagacggggtttcaccgtgttagccaggatggtctcaatcttctgaccttgtgatctgccagcctcagcctcccaaagtgctgggattacaggcgtgagccactgcgcccagcctatgccctaattaatctctgcaatatactgaatatgcctagaaatgaaagtattggctgtgccttgcttcctagtgtaaaaaaaaaaaaaaaaatcagtctgtgggccaggtgcagtggctcacacctgtaatcccagcactttgggaggccaaggcaggcagatcacttgaggccaggagttcaagaccagcccagccaacatagtgaaaccccatctctactaaaaatacaaaaaattagctgggtatggtggcgtgagcctgtagtcccagctgcttgggaggctgaggcatgagaattgcttgaacctgggaggcagggattgcaatgagccgagatcgtgccactgtattccagcctgggtgacagagaaagatcctgtctcaaaacaaaacaaaacaaaaaaacaaaactgctgtgaaatgcaaaggcccttgtgggatatattcatgtttctacctaccaatcagtttaatcggagaagaataactttgaagaagaaaccaatgaatatttacctgttacaggagaagtgttacggagttttggatcatggacttgctaattttattttggggatattaatattgatcttgcttagttgaaccacaatttatttgttgttgtcaagagcctgtgcctctcagactaggagctccctaatgatataagctatgtctcccccatcagactgggagctctcagagggccaaagtcacatcatccccttagaataaggattcccagggagtgaggctgtgtttctccatcagactggcatcttcctaagagcagaactgtgtctcctccatcagaagggagccccagagagtcaggggtcaggggtgggggtgtagggttaggagaagaaagaggtaaagggatgtggctagagatcatacaggtgggggcaaatttctgttctctgacacctgcgaactaggtgtgagccttgggtcactgtccttctatccctctgggctttagaattcgaagagtctggcagaaaaggaagtgtggagtcaagtatggctgcctgaccatctcacacagcacggtgaggcctagaggtggtgggagtctcagggcacgatggaccctcttcttctggtgttctgagcaaataatgtcaagccctccctctaagactggcccccaaacctaggtccagggagctggagacccgtttgggaggacagatgggacctgaaggccccaatctagtcttagtctacacttcacatccttgaggtgctgctgggtgaggagaaacacaaatggaacaggatgattatgcccatttaacagagtgggaaatggaggcctaaagaatgtggagggccagaggtaatgcatacatcctccgcccctaaattcccacagataaaccggcccccggtgaagctgaccctgctgacgtgccaagtgaggccaaaccctgaggagaaaaagtgcttcgacctggtgacccgtgagtggtccctgtgcctctcccccacccacagctgctcagggcttctctaagacacctgtcagctcccggggggcttcagtgaggggtctgtgtccagttccacacatggtgtcgaattgctgctactgcagacataagaatccttaggtctaggatacccacatcacattaaatgtcaaaatgcacccactttacataataaatgtggctatttatacagagcatatttgagtggatttgggtcatctgggttttgaaattatttctttttttaaaattttacctttttttcccaaatacccagacttgaaggagatgaaattattgtttctttacattttctacttttcgttcttcagagcctttggtgcaggctttgtgtgagagcagacacaggctgagaaagacctagatcttgtcctcaggaaactctctggcaggggtgtggggtgggtacccaggactgtaagatgagggggctgtccagaagatgggtgcagatatagccccatagaagattagggagcaggaaggcctgcactgctgtggggaatcaggaaaggctcctggaggagacagtatttgagtttagccttgaaggacatgtagaatgaagagtttgtggggtgggggcttttgaggagacaggattagcatgatgaaaggcatggaagcaggagagtgggtctggccggtttggccagagtggagggttcatgtagcagagtgagagatgaggcctggaaatccctcttaaaagtttggaccttatttcctggcaatagagagccatgggagatcttggggcagggcagtggtgtaattagagcagagccttgggcacaacagttgggagctggtacaggctaggggaaaggggaaatgggaagcagggagaccagacaggaggcctggtcgcccaggaggagaccaggaagggcccagtggggtggtgacagttggttcagaggatgccctgcctcagagctgggttctctggggttccaagccctttgagacctcgtctgagcctggaaccagggcttcacgcagagggagctttgttgggatcctacttcggaggccagttctgagaaactgcccctggtgctggccactgtcattccactcccttcccactcctagcttgagagtccgacttgtcagggacacatctccatgtggccccagcggctttggtgggggctccctgggctccgggaaggccagcagcatttctgtgggtcagaagcccccttctctcccgacagacaaccggacgtaccactttcaggcagaggacgagcacgagtgtgaggcgtgagtgccccctcggccagcccggccagccttgtgggtgggggccggcggccctatctcttcccacttgacatccccatcccaccccgttcaatctccgcaggtgggtgtcagtgttgcagaacagcaaggacgaagccctgagcagcgccttcctcggggagcccagcgctggcccggggtcctgggggtccgccggccatgatggggagccgcacgacctcacaaagctgctcatcgcggaggtgaagagcaggcctgggaatagccagtgctgcgactgcggggctgcaggtcggtccccggggccggggcaggagggaggcttaagtggaggggaggggctgcacctccaggctccagctgctttcctctgcagaccccacgtggctcagcaccaacctgggcgtgctcacctgcatccagtgctcgggcgtccaccgcgaactgggcgtgcgcttttcgcgcatgcagtcactcaccttggacctgctggg

SEQ ID NO: 10872 - DNA, 805 bp, Homo sapiens
tatctgctcaaagccggggagagccagatgaagcaaggtcctgacttccttcagagcctcatcaagttcttccacgcccagcacaactttttccaagatggctggaaggctgcccagagcctgttccccttcatcgagaagctggcggcctcagtacatgcactccatcaggcccaggaggacgagctacagaagctgacccagctccgggactccctccgagggacactgcagcttgagagcagagaggaacacctgagccggaagaactcaggatgtggctatagcatccaccagcaccaaggcaacaagcagtttgggacggagaaagtgggctttctatacaagaaaagtgacggataaaccggcccccggtgaagctgaccctgctgacgtgccaagtgaggccaaaccctgaggagaaaaagtgcttcgacctggtgacccacaaccggacgtaccactttcaggcagaggacgagcacgagtgtgaggcgtgggtgtcagtgttgcagaacagcaaggacgaagccctgagcagcgccttcctcggggagcccagcgctggcccggggtcctgggggtccgccggccatgatggggagccgcacgacctcacaaagctgctcatcgcggaggtgaagagcaggcctgggaatagccagtgctgcgactgcggggctgcagaccccacgtggctcagcaccaacctgggcgtgctcacctgcatccagtgctcgggcgtccaccgcgaactgggcgtgcgcttttcgcgcatgcagtcactcaccttggacctgctggg

SEQ ID NO: 10873 - DNA, 888 bp, Homo sapiens
cgcggagcagctcagtgccccccgcgccccgctccggcagctccacgctcgcgcccgccatgccggagcagttcagcgtcgccgagttcctggccgtcaccgcggaggacctcagctccccggctggggccgccgccttcgccgccaagatgccccgatcttggaaggagaccaagccatcctgcagagaataaagaaggctgtgcgggcaatccatagctccggccttggccatgtggagaatgaagagcagtaccgagaggccgtggaatccttaggcaacagccacctgtcccagaacagccatgagctgtccacaggcttcctaaacttggccgtgttcacccgcgaggttgctgcgctcttcaagaacctgattcagaacttgaacaacattgtctctttccccctggacagtctgatgaaggggcagctgagggacggtcgacaggattccaaaaaacagctggagaaggcatggaaggactatgaagccaaaatggccaagctggagaaggagcgcgatcgggccagggtgacaggagggatccctggggaggtggcccaggacatgcagagagagcggcgcatcttccagctgcacatgtgtgagtatctgctcaaagccggggagagccagatgaagcaaggtcctgacttccttcagagcctcatcaagttcttccacgcccagcacaaatggctggaaggctgcccagagcctgttccccttcatcgagaagctggcggcctcagtacatgcactccatcaggcccaggaggacgagctacagaagctgacccagctccgggactccctccgagggacactgcagcttgagagcagagaggtcagcccctgaactatcccaaaaggaatgccctccc

SEQ ID NO: 10874 - DNA, 3766 bp, Homo sapiens
gcgcttttcgcgcatgcagtcactcaccttggacctgctgggcccctccgagttgttggtgagggcggggcggggcctggaaggggccagaagcggagttaggggtgtagtttcatccgggggcggggcttgcaggttgtgggtgggacctggccgaggtgggctgggacaagccaggtagcgggtggtcaggggcggggcctgaaccgggagggcggccgaggggcgggactctgggggcttggagctccaccctatgcaggcttaaccgcccggtcttactccgccccacgtctattttcctacgactccagctggccttgaacatgggaaacacgagcttcaatgaggtcatggaggcccagctaccctcacacggcggccctaaaccctcagctgagagtgacatgtaaggggattctcagagagaggggcaccctgcctaggggattctgcctccgcagtgtccagggtcgtagaaaagtcttggatcagaagtctggggaggctgggcgcagtggctcacgcctgtaatcccagcactttgggaggccaaggcgggcggatcacttgaggtcaggaatttgagaccagcccggctaagatggcaaaaccccgcctgtactcaaaatacaagaattagctgggcgtggtggcacacgcctgtaattccagctactcaggaggttgaggcactagaattgcttgaaccctggaagcagaggttgtagtgaaacgagattgcgccactgcactccctcctgggcaatagagtgagactgtctaaaaaaaaagcctggggagaggggagcctcagatctagacgtcttcaggacatggttctggagaaaaagagagctgtatctcctgtgggagggccccagggatcagctgggcagacacggtccatgctctgagatcctgtggttgtttttggtaggggcacccgcagggactacattatggccaagtatgtggagcataggtttgcacgccggtgcacacctgagcctcagcgactctggacagccatttgcaacagggacctcctgtcggtactggaggcctttgccaatgggcaggactttggacagccgctgccagggcctgatgcacaggtgagaacccctccaagggccacttataacccacctgtctaacatattccccagttcttctccaggaccagctgttactcccctccaccccacctctgacatctgctcagatctcacccatcagagtggtaagtgggaaagagcacagcttcagtcaggcagacctgggtgggaatcctggctctgttttttcctagctgtgtgatctagggcaggttacttctctgagtctcatttcctcatctataaaaggggttaataatagcacccacggtgatgaagtgagaagtcatgtatataaagggcttagtgtacaatgggcatgcaataaacgttaatatctttttctttcacctaaatagccctgaaatataagggcatgtcagtttagagccaggaaggccacattgctttggctattccaagaacaaacacatgagcatggagaaaggatatcagagacatttgaaaaagtaaatcaacaggagttgctgactgattcgacatcaaaaattggatgttggctgggtgtggtggctcacgcctgtaatcccaacactttgggaggccaaagtgaaaggatcacttgagcccaggagttcagaatcagcttgggcaaaataaggaaacccccatctctacaacaacaactaaaattagctgggtatggtggcacacacctgtggtcccagctactcagaaggctgaggtgggagggtggcttgagcccaggaggttgaggctacagagagctgtgattgcgccactgctctccagcttgggtgacaaagcgagaccctgtctcagaaaaactaaaaacgggtatctttgaactgtctgtctgatatcttggtgggctatccaatgggcagtgcagcacttaggtgaggtaagaatttggaacagcctgcacatgtgtgatagttgaaaatgtgaggttgctgaggtcttggtggggaagtgcgatcagggagaggagccgagagctgagaaagaagtttgggaaacacttgttgggggcagaggaggaagagccgtgaatgggaacaatgggagaatggcccttcaccttcctcccagacatgaggctctgcccttgcagtctcatctctccagggttctggcagcttcctatggggggataaggggttagcaagagttcaagagggaaatactgggttggaggcaggtgcactggggggggaatctcagaggtgtggatgtgttttcaggcacctgaagaactcgtcttgcatttggctgtcaaagtcgccaaccaggcttccctgcctctggtggatttcatcatccagaacgggtgagagcctccctgcctgtctgtctggctcctcacactccctctcctttccttcctcttctcccattctcttccctcctttcccctcccactttttcccctgactttgatcccctcattgatctgttccccttcctttctccctgaaccctcctctccccagtggtcacctggatgccaaggctgctgacgggaacacggctctgcactacgcagcactctacaaccagcccgactgcctcaagctgctgctgaaggggagagctttggttggcacaggtggggcttgaatacctcctccgtcagactcctattcctgactaccccttatgtggacttccgatggtctcgggctctaatcctggcttgcttctgaccacctctgtgatcttaggggtttgtcattcagctcttgaatttcagcttcctcatctgtaaaatgggaataataccactgacctagcaggactgctaaagaaaaaagaaaataatatttctgggagtacttaggcaaataaatattagctagatctgaatgataatgattgtaatagctaatatgtattgtttaacatatgcctggcaatgggacaagtgctttttgtatgttaattaattgaatcctcacaaccacttcatcaggtagttccaagtattatactcatttcataaacaattttgtcccaaaaggttatataacttgcctatggtcacatagccagaaaatggcagagccaggattcaaacccatacattctgattccagaggcccgtcttaatctctaagctgtaatgtttctttgactatgaccatgaaccctgactttccccgctcacagtaaatgaagcaggcgagacagctctggacatagccaggaagaagcaccacaaggagtgtgaggagctggtgaggactcggggaggcaaggggcccctgactctttctctctccctgctgagcccccaaccctctgaaccaccaagcctttgtttttggcagctggagcaggcccaggcggggacctttgccttccctctacatgtggactactcctgggtaatttccacagagcctggctctgacagtgaggaggatgaggaagagaaggtgggtcccagccctgtccctcaggcctctggatggcagaaggaaagagccagattgggcctggtgtgtgttggcgggggcggtgaggcggggggacagggctacaccggaggaaccaggctgtcctcatcctcaatcttttgctctggcagcgctgcttgctgaagctcccggcccaggctcactgggccagtgggaggctggacatcagcaacaagacct

SEQ ID NO: 10875 - DNA, 907 bp, Homo sapiens
gcgcttttcgcgcatgcagtcactcaccttggacctgctgggcccctccgagttgttgctggccttgaacatgggaaacacgagcttcaatgaggtcatggaggcccagctaccctcacacggcggccctaaaccctcagctgagagtgacatgggcacccgcagggactacattatggccaagtatgtggagcataggtttgcacgccggtgcacacctgagcctcagcgactctggacagccatttgcaacagggacctcctgtcggtactggaggcctttgccaatgggcaggactttggacagccgctgccagggcctgatgcacaggtgagaacccctccaagggccacttataacccacctgtctaacatattccccagttcttctccaggaccagctgttactcccctccaccccacctctgacatctgctcagatctcacccatcagagtggcacctgaagaactcgtcttgcatttggctgtcaaagtcgccaaccaggcttccctgcctctggtggatttcatcatccagaacggtggtcacctggatgccaaggctgctgacgggaacacggctctgcactacgcagcactctacaaccagcccgactgcctcaagctgctgctgaaggggagagctttggttggcacagtaaatgaagcaggcgagacagctctggacatagccaggaagaagcaccacaaggagtgtgaggagctgctggagcaggcccaggcggggacctttgccttccctctacatgtggactactcctgggtaatttccacagagcctggctctgacagtgaggaggatgaggaagagaagcgctgcttgctgaagctcccggcccaggctcactgggccagtgggaggctggacatcagcaacaagacct

SEQ ID NO: 10876 - DNA, 3024 bp, Homo sapiens
agctcagtgccccccgcgccccgctccggcagctccacgctcgcgcccgccatgccggagcagttcagcgtcgccgagttcctggccgtcaccgcggaggacctcagctccccggctggggccgccgccttcgccgccaagatgccccgatcttggaaggagaccaagccatcctgcagagaataaagaaggctgtgcgggcaatccatagctccggccttggccatgtggagaatgaagagcagtaccgagaggccgtggaatccttaggcaacagccacctgtcccagaacagccatgagctgtccacaggcttcctaaacttggccgtgttcacccgcgaggttgctgcgctcttcaagaacctgattcagaacttgaacaacattgtctctttccccctggacagtctgatgaaggggcagctgagggacggtcgacaggattccaaaaaacagctggagaaggcatggaaggactatgaagccaaaatggccaagctggagaaggagcgcgatcgggccagggtgacaggagggatccctggggaggtggcccaggacatgcagagagagcggcgcatcttccagctgcacatgtgtgagtatctgctcaaagccggggagagccagatgaagcaaggtcctgacttccttcagagcctcatcaagttcttccacgcccagcacaactttttccaagatggctggaaggctgcccagagcctgttccccttcatcgagaagctggcggcctcagtacatgcactccatcaggcccaggaggacgagctacagaagctgacccagctccgggactccctccgagggacactgcagcttgagagcagagaggaacacctgagccggaagaactcaggatgtggctatagcatccaccagcaccaaggcaacaagcagtttgggacggagaaagtgggctttctatacaagaaaagtgacggaattcgaagagtctggcagaaaaggaagtgtggagtcaagtatggctgcctgaccatctcacacagcacgataaaccggcccccggtgaagctgaccctgctgacgtgccaagtgaggccaaaccctgaggagaaaaagtgcttcgacctggtgacccacaaccggacgtaccactttcaggcagaggacgagcacgagtgtgaggcgtgggtgtcagtgttgcagaacagcaaggacgaagccctgagcagcgccttcctcggggagcccagcgctggcccggggtcctgggggtccgccggccatgatggggagccgcacgacctcacaaagctgctcatcgcggaggtgaagagcaggcctgggaatagccagtgctgcgactgcggggctgcagaccccacgtggctcagcaccaacctgggcgtgctcacctgcatccagtgctcgggcgtccaccgcgaactgggcgtgcgcttttcgcgcatgcagtcactcaccttggacctgctgggcccctccgagttgttgctggccttgaacatgggaaacacgagcttcaatgaggtcatggaggcccagctaccctcacacggcggccctaaaccctcagctgagagtgacatgggcacccgcagggactacattatggccaagtatgtggagcataggtttgcacgccggtgcacacctgagcctcagcgactctggacagccatttgcaacagggacctcctgtcggtactggaggcctttgccaatgggcaggactttggacagccgctgccagggcctgatgcacaggcacctgaagaactcgtcttgcatttggctgtcaaagtcgccaaccaggcttccctgcctctggtggatttcatcatccagaacggtggtcacctggatgccaaggctgctgacgggaacacggctctgcactacgcagcactctacaaccagcccgactgcctcaagctgctgctgaaggggagagctttggttggcacagtaaatgaagcaggcgagacagctctggacatagccaggaagaagcaccacaaggagtgtgaggagctgctggagcaggcccaggcggggacctttgccttccctctacatgtggactactcctgggtaatttccacagagcctggctctgacagtgaggaggatgaggaagagaaggtgggtcccagccctgtccctcaggcctctggatggcagaaggaaagagccagattgggcctgcgctgcttgctgaagctcccggcccaggctcactgggccagtgggaggctggacatcagcaacaagacctatgagactgtcgccagcctgggagcagccacccctcagggcgagagtgaggactgtcccccgcccttgccagtcaaaaactcttctcggactttggtccaagggtgtgcaagacatgccagtggagatcgttctgaagtctccagcctgagttcagaggcccctgagacccctgagagcctgggcagtccagcctcctcctccagtctgatgagccccttggaacctggggatcccagccaagccccacccaactctgaagagggcctccgagagcccccaggcacctccagacccagcctgacatccgggaccaccccttcggagatgtacctccccgtcagattcagctccgagagcactcgctcctatcggcggggggcgcggagccctgaagatggtccctcagccaggcagcctctgcccagaaggaacgtgccggttggcatcactgaaggagatggctcaaggactgggagtctcccagcaagttctgtgcaacttttgcaagactagctccttgctggcccccacatgccccatgctaggccccaatgttcagagctgggacttgagctcacaaaactggggagctgagacatttgttctcttggatctcactctctctgtcccttgtgcctctgtagctggccttcttcctgccacaggccatgcctctaccaaggacacatggcctttccctgttaggactgatggcggttctttcctatctcattacccgcta

SEQ ID NO: 10877 - DNA, 8115 bp, Homo sapiens
cgtctattttcctacgactccagctggccttgaacatgggaaacacgagcttcaatgaggtcatggaggcccagctaccctcacacggcggccctaaaccctcagctgagagtgacatgtaaggggattctcagagagaggggcaccctgcctaggggattctgcctccgcagtgtccagggtcgtagaaaagtcttggatcagaagtctggggaggctgggcgcagtggctcacgcctgtaatcccagcactttgggaggccaaggcgggcggatcacttgaggtcaggaatttgagaccagcccggctaagatggcaaaaccccgcctgtactcaaaatacaagaattagctgggcgtggtggcacacgcctgtaattccagctactcaggaggttgaggcactagaattgcttgaaccctggaagcagaggttgtagtgaaacgagattgcgccactgcactccctcctgggcaatagagtgagactgtctaaaaaaaaagcctggggagaggggagcctcagatctagacgtcttcaggacatggttctggagaaaaagagagctgtatctcctgtgggagggccccagggatcagctgggcagacacggtccatgctctgagatcctgtggttgtttttggtaggggcacccgcagggactacattatggccaagtatgtggagcataggtttgcacgccggtgcacacctgagcctcagcgactctggacagccatttgcaacagggacctcctgtcggtactggaggcctttgccaatgggcaggactttggacagccgctgccagggcctgatgcacaggtgagaacccctccaagggccacttataacccacctgtctaacatattccccagttcttctccaggaccagctgttactcccctccaccccacctctgacatctgctcagatctcacccatcagagtggtaagtgggaaagagcacagcttcagtcaggcagacctgggtgggaatcctggctctgttttttcctagctgtgtgatctagggcaggttacttctctgagtctcatttcctcatctataaaaggggttaataatagcacccacggtgatgaagtgagaagtcatgtatataaagggcttagtgtacaatgggcatgcaataaacgttaatatctttttctttcacctaaatagccctgaaatataagggcatgtcagtttagagccaggaaggccacattgctttggctattccaagaacaaacacatgagcatggagaaaggatatcagagacatttgaaaaagtaaatcaacaggagttgctgactgattcgacatcaaaaattggatgttggctgggtgtggtggctcacgcctgtaatcccaacactttgggaggccaaagtgaaaggatcacttgagcccaggagttcagaatcagcttgggcaaaataaggaaacccccatctctacaacaacaactaaaattagctgggtatggtggcacacacctgtggtcccagctactcagaaggctgaggtgggagggtggcttgagcccaggaggttgaggctacagagagctgtgattgcgccactgctctccagcttgggtgacaaagcgagaccctgtctcagaaaaactaaaaacgggtatctttgaactgtctgtctgatatcttggtgggctatccaatgggcagtgcagcacttaggtgaggtaagaatttggaacagcctgcacatgtgtgatagttgaaaatgtgaggttgctgaggtcttggtggggaagtgcgatcagggagaggagccgagagctgagaaagaagtttgggaaacacttgttgggggcagaggaggaagagccgtgaatgggaacaatgggagaatggcccttcaccttcctcccagacatgaggctctgcccttgcagtctcatctctccagggttctggcagcttcctatggggggataaggggttagcaagagttcaagagggaaatactgggttggaggcaggtgcactggggggggaatctcagaggtgtggatgtgttttcaggcacctgaagaactcgtcttgcatttggctgtcaaagtcgccaaccaggcttccctgcctctggtggatttcatcatccagaacgggtgagagcctccctgcctgtctgtctggctcctcacactccctctcctttccttcctcttctcccattctcttccctcctttcccctcccactttttcccctgactttgatcccctcattgatctgttccccttcctttctccctgaaccctcctctccccagtggtcacctggatgccaaggctgctgacgggaacacggctctgcactacgcagcactctacaaccagcccgactgcctcaagctgctgctgaaggggagagctttggttggcacaggtggggcttgaatacctcctccgtcagactcctattcctgactaccccttatgtggacttccgatggtctcgggctctaatcctggcttgcttctgaccacctctgtgatcttaggggtttgtcattcagctcttgaatttcagcttcctcatctgtaaaatgggaataataccactgacctagcaggactgctaaagaaaaaagaaaataatatttctgggagtacttaggcaaataaatattagctagatctgaatgataatgattgtaatagctaatatgtattgtttaacatatgcctggcaatgggacaagtgctttttgtatgttaattaattgaatcctcacaaccacttcatcaggtagttccaagtattatactcatttcataaacaattttgtcccaaaaggttatataacttgcctatggtcacatagccagaaaatggcagagccaggattcaaacccatacattctgattccagaggcccgtcttaatctctaagctgtaatgtttctttgactatgaccatgaaccctgactttccccgctcacagtaaatgaagcaggcgagacagctctggacatagccaggaagaagcaccacaaggagtgtgaggagctggtgaggactcggggaggcaaggggcccctgactctttctctctccctgctgagcccccaaccctctgaaccaccaagcctttgtttttggcagctggagcaggcccaggcggggacctttgccttccctctacatgtggactactcctgggtaatttccacagagcctggctctgacagtgaggaggatgaggaagagaaggtgggtcccagccctgtccctcaggcctctggatggcagaaggaaagagccagattgggcctggtgtgtgttggcgggggcggtgaggcggggggacagggctacaccggaggaaccaggctgtcctcatcctcaatcttttgctctggcagcgctgcttgctgaagctcccggcccaggctcactgggccagtgggaggctggacatcagcaacaagacctatgagactgtcgccagcctgggagcagccacccctcagggcgagagtgaggactgtcccccgcccttgccagtcaaaaactcttctcggactttggtccaagggtgtgcaagacatgccagtggaggtacagttggatgcccagataaatgctcaccatgccattcacagaggacctgtatatgctggggcactgagctgagtgcatatgttagtccgtactatccttatgatgacctcccaggaaggggttctcatcttccccttacagataaaagaacagaggtgttaagtcacatgtttaagatcccacagctaataagtctctgatgtaggattcaaatctcagcccatcttattccaaattcctcaatgctccacttaacaagagagaaacgagtttattgagcatccccttcatcctgagtcctttgagggctaccaagacacagtctagtaggggagataaaaactggaatgcaattcattataatacaaggcacaatgtgatatagaatgtaaatcccaaaaggacaaggactttgagtgtttcattgaatactatttgtccagtgcctagcgcagagcctggctgttctcaagaactatttgtcgaatgaaggaacagacttgttgtgggaggttggggcagttggagagggagcatgtcctgctgggattgggggttggtttaagaaggcttcctggtgaggatagcatatgagtgaacctgagggatgagcaggagaatccaaactgggacagggtatgagcacaagcaaaaaagtgagtcagcatggccctggccaccgcgaacaaaggcttcatcagttgaaggagaatactggacaggtagatggggaatggactattggcagagaaccagaagagatcctaggccagatgtggtggctcgtgcctgtaatctctgcactttgggaggccgaagcaggcggatcaccccaggtaaggattttgagaccagcccagccaacatggtgaaaccccatctctactaaaaatgcaaaaattagccaggtgtggtggcatgcacctgtaatcccagctactctggaggctgaggcaggagaatctcttgaacctgggaggcggaggttgcaatgagccgagattgcaccactgcactccagcctgggtgacagagtgagactctgtctcaaaaaaaaaaaaaaaaaaaatcctagaggccagagactgctttgaggttgggcacagagcaagtgataaagaaaagctttatcatttctgatgtttctgattccagatcgttctgaagtctccagcctgagttcagaggcccctgagacccctgagagcctgggcagtccagcctcctcctccagtctgatgagccccttggaacctggggatcccagccaagccccacccaactctgaagagggcctccgagagcccccaggcacctccagacccagcctgacatccgggaccaccccttcggagatgtacctccccgtcagattcaggttggtgagggcccagctgtgcaaccagggcaaatcccctgacttctctgagcatccattgatttccacacctctaaatagtacctgcctaaagactgggtcacacgccatctctgggcccatcacttatgcagaaatgctgaaccctgggaccccttcccccttcacacacttgctcccaaatcctgcatggagagctgaggaggagccagggatcctccctgctgatgttggagtaaagtaggcttagccccctgtgtggcttattctagaggctctcagtggggtcttcactctgtccccacctccaacccaggatccagtcttctcccttccatacaaacccattcagtctggagtttggggagaagtagacctgcagatatccacagagtcttctggaggtcagttccagccttcttgggcctgtgatggacctggcctgggggccttgtggactctacccacccatcctaagcccccagactggctctgttcctgagccctttctccccactctgaggggctctctggacatgagggtcatgttggcctttccctgccttccagctccgagagcactcgctcctatcggcggggggcgcggagccctgaagatggtccctcagccaggcagcctctgcccagaaggaacgtgccggtaggaactctgggaccatggtttgaggggcggtggcagggtgcctgggaggcagagttagtcaagagtaggcgtattggggtgggagacctccccatggttggggtacagatgggcccaggcagccacagtttggacagtccctgtcctggtgcccaggtgggcacggtttggccagtccctgtcctggtgcccaggtggccacggtttggccagtccctgtcctggtgcccaggtggctgcagtttggccagtccctgtcctggtgctcctctttccatgctccagcccagggctgggtgaagctgaggagagcccaggccttgagggatggcagtgatcatgaggcccaagctctggcttctccccaggggaggatgaggaaagttgtgttagccaggccagtcgctcagagaaggcatcacttccctgcagaagaggcaggattaggtggccgtgtaccagcccttgtttgcctaactctccccttgttcatgagtctcctggaatccacagggactttcagatcccaggcatagagggatgtgacagggacagggcaagagctgtcatccttaatccagcttctccctgctgaatcaccaagtctccaacaatggcatatattagttgaacctaggagtgggcacagatcagagccagttgtgttgggaaagaagcctcttctgtcccttgttcctctgggaattcctcagaatggcattggttgtgttgggagtcaggatggcaggggcaaaagctggttctgtctggggaatcgtcatctttagtccaccagagttagtcagcagacacaaatctatgtccatattctggttccactattgccctgaaaaccaagtatccatcagatggcatttaattgatgcctgtgattgtggtgtgtatgatagcaagagcttgggctttagagtaaggagactttggataagtggcttcacttcctcaagcctcagtttctttgtctgtaaaatgagaataatttaatttatctacaataggacagatgtgaaactgagtgagatgaacacctggtatgttacaggtgctttgaaaatgtcagtttcatccttctttctgcaggttggcatcactgaaggagatggctcaaggactgggagtctcccagcaagttctgtgcaacttttgcaagactagctccttgctggcccccacatgccccatgctaggccccaatgttcagagctgggacttgagctcacaaaactggggagctgagacatttgttctcttggatctcactctctctgtcccttgtgcctctgtagctggccttcttcctgccacaggccatgcctctaccaaggacacatggcctttccctgttaggactgatggcggttctttcctatctcattacccgctaggggcctgggagccctgtggctggatctgagtgctcctgagctggcttcagctgcagaactctcagtccctcatcagatcgagactctatttcccccgtcagtctgggggcttcacaagggcaggagagccctccatcactgacttccagatcagggaccctgccaagtagggactgtcttctcagccagccatttattagtctaatattccttcactaaattccaactctatgtctggacctgtgttaggcacttcagataccacacgagtaagacaagggccctgcaggggtggtcctttggtggaaagctggtcttaagggttgggcttgggaataggcagggtcagattccagggcatggctctggactcagctggtttatacctatatgaccattacaattgtctacagatcacatccattctggctggtcaacatgcatgctgtactggctgttaaataaaaatattctgaatgtcactccttttgagggacagcacagccttccctaggcattctcctatattccccagccaaattgtagagtcagatgcacccacatttgcctgtgtccttgatttagcaggaaggaaaggaatagtcagggttgatggatgcccacttctcttctctttctcttggtcaactcaggagccttttagtctgagggaatggagaggcaaagaaagaagggagagtaatagaattgggagggcagagacttaagggttctgcttcccagccctagaaattctatcattgctcagccccaatgagaaagcagatacacctaagccatcatcaaccactaacatctcaacttgccagttgctgggtgctgggccctggcaggaatgggccaagccaagcaggggagactagagagcaccaatggccaacacagctgcctggctggggaggctgtgctgtttcccctggagacctgactggtctgtggttcccacaggaacagggttgtcttttgagcccccagtgtctggtttcattcatctcagacttgttatttcactcatctctaataaaggattggggggtcagtt

SEQ ID NO: 10878 - DNA, 2552 bp, Homo sapiens
cgtctattttcctacgactccagctggccttgaacatgggaaacacgagcttcaatgaggtcatggaggcccagctaccctcacacggcggccctaaaccctcagctgagagtgacatgggcacccgcagggactacattatggccaagtatgtggagcataggtttgcacgccggtgcacacctgagcctcagcgactctggacagccatttgcaacagggacctcctgtcggtactggaggcctttgccaatgggcaggactttggacagccgctgccagggcctgatgcacaggcacctgaagaactcgtcttgcatttggctgtcaaagtcgccaaccaggcttccctgcctctggtggatttcatcatccagaacggtggtcacctggatgccaaggctgctgacgggaacacggctctgcactacgcagcactctacaaccagcccgactgcctcaagctgctgctgaaggggagagctttggttggcacagtaaatgaagcaggcgagacagctctggacatagccaggaagaagcaccacaaggagtgtgaggagctgctggagcaggcccaggcggggacctttgccttccctctacatgtggactactcctgggtaatttccacagagcctggctctgacagtgaggaggatgaggaagagaagcgctgcttgctgaagctcccggcccaggctcactgggccagtgggaggctggacatcagcaacaagacctatgagactgtcgccagcctgggagcagccacccctcagggcgagagtgaggactgtcccccgcccttgccagtcaaaaactcttctcggactttggtccaagggtgtgcaagacatgccagtggagatcgttctgaagtctccagcctgagttcagaggcccctgagacccctgagagcctgggcagtccagcctcctcctccagtctgatgagccccttggaacctggggatcccagccaagccccacccaactctgaagagggcctccgagagcccccaggcacctccagacccagcctgacatccgggaccaccccttcggagatgtacctccccgtcagattcagctccgagagcactcgctcctatcggcggggggcgcggagccctgaagatggtccctcagccaggcagcctctgcccagaaggaacgtgccggttggcatcactgaaggagatggctcaaggactgggagtctcccagcaagttctgtgcaacttttgcaagactagctccttgctggcccccacatgccccatgctaggccccaatgttcagagctgggacttgagctcacaaaactggggagctgagacatttgttctcttggatctcactctctctgtcccttgtgcctctgtagctggccttcttcctgccacaggccatgcctctaccaaggacacatggcctttccctgttaggactgatggcggttctttcctatctcattacccgctaggggcctgggagccctgtggctggatctgagtgctcctgagctggcttcagctgcagaactctcagtccctcatcagatcgagactctatttcccccgtcagtctgggggcttcacaagggcaggagagccctccatcactgacttccagatcagggaccctgccaagtagggactgtcttctcagccagccatttattagtctaatattccttcactaaattccaactctatgtctggacctgtgttaggcacttcagataccacacgagtaagacaagggccctgcaggggtggtcctttggtggaaagctggtcttaagggttgggcttgggaataggcagggtcagattccagggcatggctctggactcagctggtttatacctatatgaccattacaattgtctacagatcacatccattctggctggtcaacatgcatgctgtactggctgttaaataaaaatattctgaatgtcactccttttgagggacagcacagccttccctaggcattctcctatattccccagccaaattgtagagtcagatgcacccacatttgcctgtgtccttgatttagcaggaaggaaaggaatagtcagggttgatggatgcccacttctcttctctttctcttggtcaactcaggagccttttagtctgagggaatggagaggcaaagaaagaagggagagtaatagaattgggagggcagagacttaagggttctgcttcccagccctagaaattctatcattgctcagccccaatgagaaagcagatacacctaagccatcatcaaccactaacatctcaacttgccagttgctgggtgctgggccctggcaggaatgggccaagccaagcaggggagactagagagcaccaatggccaacacagctgcctggctggggaggctgtgctgtttcccctggagacctgactggtctgtggttcccacaggaacagggttgtcttttgagcccccagtgtctggtttcattcatctcagacttgttatttcactcatctctaataaaggattggggggtcagtt

SEQ ID NO: 10879 - DNA, 2053 bp, Homo sapiens
gggacctgaaggccccaatctagtcttagtctacacttcacatccttgaggtgctgctgggtgaggagaaacacaaatggaacaggatgattatgcccatttaacagagtgggaaatggaggcctaaagaatgtggagggccagaggtaatgcatacatcctccgcccctaaattcccacagataaaccggcccccggtgaagctgaccctgctgacgtgccaagtgaggccaaaccctgaggagaaaaagtgcttcgacctggtgacccgtgagtggtccctgtgcctctcccccacccacagctgctcagggcttctctaagacacctgtcagctcccggggggcttcagtgaggggtctgtgtccagttccacacatggtgtcgaattgctgctactgcagacataagaatccttaggtctaggatacccacatcacattaaatgtcaaaatgcacccactttacataataaatgtggctatttatacagagcatatttgagtggatttgggtcatctgggttttgaaattatttctttttttaaaattttacctttttttcccaaatacccagacttgaaggagatgaaattattgtttctttacattttctacttttcgttcttcagagcctttggtgcaggctttgtgtgagagcagacacaggctgagaaagacctagatcttgtcctcaggaaactctctggcaggggtgtggggtgggtacccaggactgtaagatgagggggctgtccagaagatgggtgcagatatagccccatagaagattagggagcaggaaggcctgcactgctgtggggaatcaggaaaggctcctggaggagacagtatttgagtttagccttgaaggacatgtagaatgaagagtttgtggggtgggggcttttgaggagacaggattagcatgatgaaaggcatggaagcaggagagtgggtctggccggtttggccagagtggagggttcatgtagcagagtgagagatgaggcctggaaatccctcttaaaagtttggaccttatttcctggcaatagagagccatgggagatcttggggcagggcagtggtgtaattagagcagagccttgggcacaacagttgggagctggtacaggctaggggaaaggggaaatgggaagcagggagaccagacaggaggcctggtcgcccaggaggagaccaggaagggcccagtggggtggtgacagttggttcagaggatgccctgcctcagagctgggttctctggggttccaagccctttgagacctcgtctgagcctggaaccagggcttcacgcagagggagctttgttgggatcctacttcggaggccagttctgagaaactgcccctggtgctggccactgtcattccactcccttcccactcctagcttgagagtccgacttgtcagggacacatctccatgtggccccagcggctttggtgggggctccctgggctccgggaaggccagcagcatttctgtgggtcagaagcccccttctctcccgacagacaaccggacgtaccactttcaggcagaggacgagcacgagtgtgaggcgtgagtgccccctcggccagcccggccagccttgtgggtgggggccggcggccctatctcttcccacttgacatccccatcccaccccgttcaatctccgcaggtgggtgtcagtgttgcagaacagcaaggacgaagccctgagcagcgccttcctcggggagcccagcgctggcccggggtcctgggggtccgccggccatgatggggagccgcacgacctcacaaagctgctcatcgcggaggtgaagagcaggcctgggaatagccagtgctgcgactgcggggctgcaggtcggtccccggggccggggcaggagggaggcttaagtggaggggaggggctgcacctccaggctccagctgctttcctctgcagaccccacgtggctcagcaccaacctgggcgtgctcacctgcatccagtgctcgggcgtccaccgcgaactgggcgtgcgct

SEQ ID NO: 10880 - DNA, 591 bp, Homo sapiens
gggacctgaaggccccaatctagtcttagtctacacttcacatccttgaggtgctgctgggtgaggagaaacacaaatggaacaggatgattatgcccatttaacagagtgggaaatggaggcctaaagaatgtggagggccagaggtaatgcatacatcctccgcccctaaattcccacagataaaccggcccccggtgaagctgaccctgctgacgtgccaagtgaggccaaaccctgaggagaaaaagtgcttcgacctggtgacccacaaccggacgtaccactttcaggcagaggacgagcacgagtgtgaggcgtgggtgtcagtgttgcagaacagcaaggacgaagccctgagcagcgccttcctcggggagcccagcgctggcccggggtcctgggggtccgccggccatgatggggagccgcacgacctcacaaagctgctcatcgcggaggtgaagagcaggcctgggaatagccagtgctgcgactgcggggctgcagaccccacgtggctcagcaccaacctgggcgtgctcacctgcatccagtgctcgggcgtccaccgcgaactgggcgtgcgct

SEQ ID NO: 10881 - DNA, 589 bp, Homo sapiens
gaggaggatttggaagacccagagcgggatgaaacgggacagagccctgaaggggcagggatgggggaaggcggaggagtttctactgaggccagggctccacgctcgcgcccgccatgccggagcagttcagcgtcgccgagttcctggccgtcaccgcggaggacctcagctccccggctggggccgccgccttcgccgccaagatgccccggtaccgaggggcggcgctggcgcgggaggagatcttggaaggagaccaagccatcctgcagagaataaagaaggctgtgcgggcaatccatagctccggccttggccatgtggagaatgaagagcagtaccgagaggccgtggaatccttaggcaacagccacctgtcccagaacagccatgagctgtccacaggcttcctaaacttggccgtgttcacccgcgaggttgctgcgctcttcaagaacctgattcagaacttgaacaacattgtctctttccccctggacagtctgatgaaggggcagctgagggacggtcgacaggattccaaaaaacagctggagaaggcatggaaggactatgaagccaaaat

SEQ ID NO: 10882 - DNA, 2226 bp, Homo sapiens
aggatttggaagacccagagcgggatgaaacgggacagagccctgaaggggcagggatgggggaaggcggaggagtttctactgaggccagggctccacgctcgcgcccgccatgccggagcagttcagcgtcgccgagttcctggccgtcaccgcggaggacctcagctccccggctggggccgccgccttcgccgccaagatgccccggtaccgaggggcggcgctggcgcgggaggagatcttggaaggagaccaagccatcctgcagagaataaagaaggctgtgcgggcaatccatagctccggccttggccatgtggagaatgaagagcagtaccgagaggccgtggaatccttaggcaacagccacctgtcccagaacagccatgagctgtccacaggcttcctaaacttggccgtgttcacccgcgaggttgctgcgctcttcaagaacctgattcagaacttgaacaacattgtctctttccccctggacagtctgatgaaggggcagctgagggacggtcgacaggattccaaaaaacagctggagaaggcatggaaggactatgaagccaaaatggccaagctggagaaggagcgcgatcgggccagggtgacaggagggatccctgggaacctggggatcccagccaagccccacccaactctgaagagggcctccgagagcccccaggcacctccagacccagcctgacatccgggaccaccccttcggagatgtacctccccgtcagattcagctccgagagcactcgctcctatcggcggggggcgcggagccctgaagatggtccctcagccaggcagcctctgcccagaaggaacgtgccggttggcatcactgaaggagatggctcaaggactgggagtctcccagcaagttctgtgcaacttttgcaagactagctccttgctggcccccacatgccccatgctaggccccaatgttcagagctgggacttgagctcacaaaactggggagctgagacatttgttctcttggatctcactctctctgtcccttgtgcctctgtagctggccttcttcctgccacaggccatgcctctaccaaggacacatggcctttccctgttaggactgatggcggttctttcctatctcattacccgctaggggcctgggagccctgtggctggatctgagtgctcctgagctggcttcagctgcagaactctcagtccctcatcagatcgagactctatttcccccgtcagtctgggggcttcacaagggcaggagagccctccatcactgacttccagatcagggaccctgccaagtagggactgtcttctcagccagccatttattagtctaatattccttcactaaattccaactctatgtctggacctgtgttaggcacttcagataccacacgagtaagacaagggccctgcaggggtggtcctttggtggaaagctggtcttaagggttgggcttgggaataggcagggtcagattccagggcatggctctggactcagctggtttatacctatatgaccattacaattgtctacagatcacatccattctggctggtcaacatgcatgctgtactggctgttaaataaaaatattctgaatgtcactccttttgagggacagcacagccttccctaggcattctcctatattccccagccaaattgtagagtcagatgcacccacatttgcctgtgtccttgatttagcaggaaggaaaggaatagtcagggttgatggatgcccacttctcttctctttctcttggtcaactcaggagccttttagtctgagggaatggagaggcaaagaaagaagggagagtaatagaattgggagggcagagacttaagggttctgcttcccagccctagaaattctatcattgctcagccccaatgagaaagcagatacacctaagccatcatcaaccactaacatctcaacttgccagttgctgggtgctgggccctggcaggaatgggccaagccaagcaggggagactagagagcaccaatggccaacacagctgcctggctggggaggctgtgctgtttcccctggagacctgactggtctgtggttcccacaggaacagggttgtcttttgagcccccagtgtctggtttcattcatctcagacttgttatttcactcatctctaataaaggattggggggtcagtt

SEQ ID NO: 10883 - DNA, 11167 bp, Homo sapiens
ctcggcccaacaaaatggcggcggcagcggtgtcgctttgtttccgcggctcctgcggcggtggcagtggtagcggcctttgagctgtggggaggttccagcagcagctacagtgacgactaagactccagtgcatttctatcgtaaccgggcgcgggggagcgcagatcggcgcccagcaatcacagaagccgacaaggcgttcaagcgaaaacatgaccgctgagcccatgagtgaaagcaagttgaatacattggtgcagaagcttcatgacttccttgcacactcatcagaagaatctgaagaaacaagttctcctccacgacttgcaatgaatcaaaacacagataaaatcagtggttctggaagtaactctgatatgatggaaaacagcaaggaagagggaactagctcttcagaaaaatccaagtcttcaggatcgtcacgatcaaagaggaaaccttcaattgtaacaaagtatgtagaatcagatgatgaaaaacctttggatgatgaaactgtaaatgaagatgcgtctaatgaaaattcagaaaatgatattactatgcagagcttgccaaaaggtacagtgattgtacagccagagccagtgctgaatgaagacaaagatgattttaaagggcctgaatttagaagcagaagtaaaatgaaaactgaaaatctcaaaaaacgcggagaagatgggcttcatgggattgtgagctgcactgcttgtggacaacaggtcaatcattttcaaaaagattccatttatagacacccttcattgcaagttcttatttgtaagaattgctttaagtattacatgagtgatgatattagccgtgactcagatggaatggatgaacaatgtaggtggtgtgcggaaggtggaaacttgatttgttgtgacttttgccataatgctttctgcaagaaatgcattctacgcaaccttggtcgaaaggagttgtccacaataatggatgaaaacaaccaatggtattgctacatttgtcacccagagcctttgttggacttggtcactgcatgtaacagcgtatttgagaatttagaacagttgttgcagcaaaataagaagaagataaaagttgacagtgaaaagagtaataaagtatatgaacatacatccagattttctccaaagaagactagttcaaattgtaatggagaagaaaagaaattagatgattcctgttctggctctgtaacctactcttattccgcactaattgtgcccaaagagatgattaagaaggcaaaaaaactgattgagaccacagccaacatgaactccagttatgttaaatttttaaagcaggcaacagataattcagaaatcagttctgctacaaaattacgtcagcttaaggcttttaagtctgtgttggctgatattaagaaggctcatcttgcattggaagaagacttaaattccgagtttcgagcgatggatgctgtaaacaaagagaaaaataccaaagagcataaagtcatagatgctaagtttgaaacaaaagcacgaaaaggagaaaaaccttgtgctttggaaaagaaggatatttcaaagtcagaagctaaactttcaagaaaacaggtagatagtgagcacatgcatcagaatgttccaacagaggaacaaagaacaaataaaagtaccggtggtgaacataagaaatctgatagaaaagaagaacctcaatatgaacctgccaacacttctgaagatttagacatggatattgtgtctgttccttcctcagttccagaagacatttttgagaatcttgagactgctatggaagttcagagttcagttgatcatcaaggggatggcagcagtggaactgaacaagaagtggagagttcatctgtaaaattaaatatttcttcaaaagacaacagaggaggtattaaatcaaaaactacagctaaagtaacaaaagaattatatgttaaactcactcctgtttccctttctaattccccaattaaaggtgctgattgtcaggaagttccacaagataaagatggctataaaagttgtggtctgaaccccaagttagagaaatgtggacttggacaggaaaacagtgataatgagcatttggttgaaaatgaagtttcattacttttagaggaatctgatcttcgaagatccccacgtgtaaagactacacccttgaggcgaccgacagaaactaaccctgtaacatctaattcagatgaagaatgtaatgaaacagttaaggagaaacaaaaactatcagttccagtgagaaaaaaggataagcgtaattcttctgacagtgctatagataatcctaagcctaataaattgccaaaatctaagcaatcagagactgtggatcaaaattcagattctgatgaaatgctagcaatcctcaaagaggtgagcaggatgagtcacagttcttcttcagatactgatattaatgaaattcatacaaaccataagactttgtatgatttaaagactcaggcggggaaagatgataaaggaaaaaggaaacgaaaaagttctacatctggctcagattttgatactaaaaagggcaaatcagctaagagctctataatttctaaaaagaaacgacaaacccagtctgagtcttctaattatgactcagaattagaaaaagagataaagagcatgagtaaaattggtgctgccagaaccaccaaaaaaagaattccaaatacaaaagattttgactcttctgaagatgagaaacacagcaaaaaaggaatggataatcaagggcacaaaaatttgaagacctcacaagaaggatcatctgatgatgctgaaagaaaacaagagagagagactttctcttcagcagaaggcacagttgataaagacacgaccatcatggaattaagagatcgacttcctaagaagcagcaagcaagtgcttccactgatggtgtcgataagctttctgggaaagaggagagttttacttctttggaagttagaaaagttgctgaaactaaagaaaagagcaagcatctcaaaaccaaaacatgtaaaaaagtacaggatggcttatctgatattgcagagaaattcctaaagaaagaccagagcgatgaaacttctgaagatgataaaaagcagagcaaaaagggaactgaagaaaaaaagaaaccttcagactttaagaaaaaagtaattaaaatggaacaacagtatgaatcttcatctgatggcactgaaaagttacctgagcgagaagaaatttgtcattttcctaagggcataaaacaaattaagaatggaacaactgatggagaaaagaaaagtaaaaaaataagagataaaacttctaaaaagaaggatgaattatctgattatgctgagaagtcaacagggaaaggagatagttgtgactcttcagaggataaaaagagtaagaatggagcatatggtagagagaagaaaaggtgcaagttgcttggaaagagttcaaggaagagacaagattgttcatcatctgatactgagaaatattccatgaaagaagatggttgtaactcttctgataagagactgaaaagaatagaattgagggaaagaagaaatttaagttcaaagagaaatactaaggaaatacaaagtggctcatcatcatctgatgctgaggaaagttctgaagataataaaaagaagaagcaaagaacttcatctaaaaagaaggcagtcattgtcaaggagaaaaagagaaactccctaagaacaagcactaaaaggaagcaagctgacattacatcctcatcttcttctgatatagaagatgatgatcagaattctataggtgagggaagcagcgatgaacagaaaattaagcctgtgactgaaaatttagtgctgtcttcacatactggattttgccaatcttcaggagatgaagccttatctaaatcagtgcctgtcacagtggatgatgatgatgacgacaatgatcctgagaatagaattgccaagaagatgcttttagaagaaattaaagccaatctttcctctgatgaggatggatcttcagatgatgagccagaagaagggaaaaaaagaactggaaaacaaaatgaagaaaacccaggagatgaggaagcaaaaaatcaagtcaattctgaatcagattcagattctgaagaatctaagaagccaagatacagacataggcttttgcggcacaaattgactgtgagtgacggagaatctggagaagaaaaaaagacaaagcctaaagagcataaagaagtcaaaggcagaaacagaagaaaggtgagcagtgaagattcagaagattctgattttcaggaatcaggagttagtgaagaagttagtgaatccgaagatgaacagcggcccagaacaaggtctgcaaagaaagcagagttggaagaaaatcagcggagctataaacagaaaaagaaaaggcgacgtattaaggttcaagaagattcatccagtgaaaacaagagtaattctgaggaagaagaggaggaaaaagaagaggaggaggaagaggaggaggaggaggaagaggaggaggaagatgaaaatgatgattccaagtctcctggaaaaggcagaaagaaaattcggaagattcttaaagatgataaactgagaacagaaacacaaaatgctcttaaggaagaggaagagagacgaaaacgtattgctgagagggagcgtgagcgagaaaaattgagagaggtgatagaaattgaagatgcttcacccaccaagtgtccaataacaaccaagttggttttagatgaagatgaagaaaccaaagaacctttagtgcaggttcatagaaatatggttatcaaattgaaaccccatcaagtagatggtgttcagtttatgtgggattgctgctgtgagtctgtgaaaaaaacaaagaaatctccaggttcaggatgcattcttgcccactgtatgggccttggtaagactttacaggtggtaagttttcttcatacagttcttttgtgtgacaaactggatttcagcacggcgttagtggtttgtcctcttaatactgctttgaattggatgaatgaatttgagaagtggcaagagggattaaaagatgatgagaagcttgaggtttctgaattagcaactgtgaaacgtcctcaggagagaagctacatgctgcagaggtggcaagaagatggtggtgttatgatcataggctatgagatgtatagaaatcttgctcaaggaaggaatgtgaagagtcggaaacttaaagaaatatttaacaaagctttggttgatccaggccctgattttgttgtttgtgatgaaggccatattctaaaaaatgaagcatctgctgtttctaaagctatgaattctatacgatcaaggaggaggattattttaacaggaacaccacttcaaaataacctaattgagtatcattgtatggttaattttatcaaggaaaatttacttggatccattaaggagttcaggaatagatttataaatccaattcaaaatggtcagtgtgcagattctaccatggtagatgtcagagtgatgaaaaaacgtgctcacattctctatgagatgttagctggatgtgttcagaggaaagattatacagcattaacaaaattcttgcctccaaaacacgaatatgtgttagctgtgagaatgacttctattcagtgcaagctctatcagtactacttagatcacttaacaggtgtgggcaataatagtgaaggtggaagaggaaaggcaggtgcaaagcttttccaagattttcagatgttaagtagaatatggactcatccttggtgtttgcagctagactacattagcaaagaaaataagggttattttgatgaagacagtatggatgaatttatagcctcagattctgatgaaacctccatgagtttaagctccgatgattatacaaaaaagaagaaaaaagggaaaaaggggaaaaaagatagtagctcaagtggaagtggcagtgacaatgatgttgaagtgattaaggtctggaattcaagatctcggggaggtggtgaaggaaatgtggatgaaacaggaaacaatccttctgtttctttaaaactggaagaaagtaaagctacttcttcttctaatccaagcagcccagctccagactggtacaaagattttgttacagatgctgatgctgaggttttagagcattctgggaaaatggtacttctctttgaaattcttcgaatggcagaggaaattggggataaagtccttgttttcagccagtccctcatatctctggacttgattgaagattttcttgaattagctagtagggagaagacagaagataaagataaaccccttatttataaaggtgaggggaagtggcttcgaaacattgactattaccgtttagatggttccactactgcacagtcaaggaagaagtgggctgaagaatttaatgatgaaactaatgtgagaggacgattatttatcatttctactaaagcaggatctctaggaattaatctggtagctgctaatcgagtaattatattcgacgcttcttggaatccatcttatgacatccagagtatattcagagtttatcgctttggacaaactaagcctgtttatgtatataggttcttagctcagggaaccatggaagataagatttatgatcggcaagtaactaagcagtcactgtcttttcgagttgttgatcagcagcaggtggagcgtcattttactatgaatgagcttactgaactttatacttttgagccagacttattagatgaccctaattcagaaaagaagaagaagagggatactcccatgctgccaaaggataccatacttgcagagctccttcagatacataaagaacacattgtaggataccatgaacatgattctcttttggaccacaaagaagaagaagagttgactgaagaagaaagaaaagcagcttgggctgagtatgaagcagagaagaagggactgaccatgcgtttcaacataccaactgggaccaatttaccccctgtcagtttcaactctcaaactccttatattcctttcaatttgggagccctgtcagcaatgagtaatcaacagctggaggacctcattaatcaaggaagagaaaaagttgtagaagcaacaaacagtgtgacagcagtgaggattcaacctcttgaggatataatttcagctgtatggaaggagaacatgaatctctcagaggcccaagtacaggcgttagcattaagtagacaagccagccaggagcttgatgttaaacgaagagaagcaatctacaatgatgtattgacaaaacaacagatgttaatcagctgtgttcagcgaatacttatgaacagaaggctccagcagcagtacaatcagcagcaacagcaacaaatgacttatcaacaagcaacactgggtcacctcatgatgccaaagcccccaaatttgatcatgaatccttctaactaccagcagattgatatgagaggaatgtatcagccagtggctggtggtatgcagccaccaccattacagcgtgcaccacccccaatgagaagcaaaaatccaggaccttcccaagggaaatcaatgtgattttgcactaaaagcttaatggattgttaaaatcatagaaagatcttttatttttttaggaatcaatgacttaacagaactcaactgtataaatagtttggtccccttaaatgccaatcttccatattagttttactttttttttttttaaatagggcataccatttcttcctgacatttgtcagtgatgttgcctagaatcttcttacacacgctgagtacagaagatatttcaaattgttttcagtgaaaacaagtccttccataatagtaacaactccacagatttcctctctaaatttttatgcctgcttttagcaaccataaaattgtcataaaattaataaatttaggaaagaataaagatttatatattcattctttacatataaaaacacacagctgagttcttagagttgattcctcaagttatgaaatacttttgtacttaatccatttcttgattaaagtgattgaaatggttttaatgttcttttgactgaagtctgaaactgggctcctgctttattgtctctgtgactgaaagttagaaactgagggttatctttgacacagaattgtgtgcaatattcttaaatactactgctctaaaagttggagaagtcttgcagttatcttagcattgtataaacagccttaagtatagcctaagaagagaattcctttttcttctttagtccttctgccattttttattttcagttatatgtgctgaaataattactggtaaaatttcagggttgtggattatcttccacacatgaattttctctctcctggcacgaatataaagcacatctcttaactgcatggtgccagtgctaatgcttcatcctgttgctggcagtgggatgtggacttagaaaatcaagttctagcattttagtaggttaacactgaagttgtggttgttaggttcacaccctgttttataaacaacatcaaaatggcagaaccattgctgactttaggttcacatgaggaatgtacttttaacaattcccagtactatcagtattgtgaaataattcctctgaaagataagaatcactggcttctatgcgcttcttttctctcatcatcatgttcttttaccccagtttccttacatttttttaaattgtttcagagtttgttttttttttagtttagattgtgaggcaattattaaatcaaaattaattcatccaatacccctttactagaagttttactagaaaatgtattacattttattttttcttaatccagttctgcaaaaatgacctataaatttattcatgtacaattttggttacttgaattgttaaagaaaacattgtttttgactatgggagtcaactcaacatggcagaaccatttttgagatgatgatacaacaggtagtgaaacagcttaagaattccaaaaaaaaaaaaaaaaaaaaaaaaaagaaaactgggtttgggctttgctttaggtatcactggattagaatgagtttaacattagctaaaactgctttgagttgtttggatgattaagagattgccatttttatcttggaagaactagtggtaaaacatccaagagcactaggattgtgatacagaatttgtgaggtttggtggatccacgcccctctcccccactttcccatgatgaaatatcactaataaatcctgtatatttagatattatgctagccatgtaatcagatttatttaattgggtggggcaggtgtgtatttactttagaaaaaatgaaaaagacaagatttatgagaaatatttgaaggcagtacactctggccaactgttaccagttggtatttctacaagttcagaatattttaaacctgatttactagacctgggaattttcaacatggtctaattatttactcaaagacatagatgtgaaaattttaggcaaccttctaaatctttttcaccatggatgaaactataacttaaagaataatacttagaagggttaattggaaatcagagtttgaaataaaacttggaccactttgtatacactcttctcacttgacattttagctatataatatgtactttgagtataacatcaagctttaacaaatatttaaagacaaaaaaatcacgtcagtaaaatactaaaaggctcatttttatatttgttttagatgttttaaatagttgcaatggattaaaaatgatgatttaaaatgttgcttgtaatacagttttgcctgctaaattctccacattttgtaacctgttttatttctttgggtgtaaagcgtttttgcttagtattgtgatattgtatatgttttgtcccagttgtatagtaatgtttcagtccatcatccagctttggctgctgaaatcatacagctgtgaagacttgcctttgtttctgttagactgcttttcagttctgtattgagtatcttaagtactgtagaaaagatgtcacttcttcctttaaggctgttttgtaatatatataaggactggaattgtgtttttaaagaaaagcattcaagtatgacaatatactatctgtgttttcaccattcaaagtgctgtttagtagttgaaacttaaactatttaatgtcatttaataaagtgaccaaaatgtgttgtgctctttattgtattttcacagctttgaaaatctgtgcacatactgtttcatagaaaatgtatagcttttgttgtcctatataatggtggttcttttgcacatttagttatttaatattgagaggtcacgaagtttggttattgaatctgttatatactaaattctgtaaagggagatctctcatctcaaaaagaatttacataccaggaagtccatgtgtgtttgtgttagttttggatgtctttgtgtaatccagccccatttcctgtttcccaacagctgtaacactcattttaagtcaagcagggctaccaacccacacttgatagaaaagctgcttaccattcagaagcttccttattacctggcctccaaatgagctgaatattttgtagccttcccttagctatgttcattttccctccattatcataaaatcagatcgatatttatgtgccccaaacaaaactttaagagcagttacattctgtcccagtagcccttgtttcctttgagagtagcatgttgtgaggctatagagacttattctaccagtaaaacaggtcaatccttttacatgtttattatactaaaaattatgttcagggtatttactactttatttcaccagactcagtctcaagtgacttggctatctccaaatcagatctacccttagagaataaacatttttctaccgttattttttttcaagtctataatctgagccagtcccaaaggagtgatcaagtttcagaaatgctttcatcttcacaacattttatatatactattatatggggtgaataaagttttaaatccgaaatata

SEQ ID NO: 10884 - DNA, 10218 bp, Homo sapiens
ctcggcccaacaaaatggcggcggcagcggtgtcgctttgtttccgcggctcctgcggcggtggcagtggtagcggcctttgagctgtggggaggttccagcagcagctacagtgacgactaagactccagtgcatttctatcgtaaccgggcgcgggggagcgcagatcggcgcccagcaatcacagaagccgacaaggcgttcaagcgaaaacatgaccgctgagcccatgagtgaaagcaagttgaatacattggtgcagaagcttcatgacttccttgcacactcatcagaagaatctgaagaaacaagttctcctccacgacttgcaatgaatcaaaacacagataaaatcagtggttctggaagtaactctgatatgatggaaaacagcaaggaagagggaactagctcttcagaaaaatccaagtcttcaggatcgtcacgatcaaagaggaaaccttcaattgtaacaaagtatgtagaatcagatgatgaaaaacctttggatgatgaaactgtaaatgaagatgcgtctaatgaaaattcagaaaatgatattactatgcagagcttgccaaaagaagatgggcttcatgggattgtgagctgcactgcttgtggacaacaggtcaatcattttcaaaaagattccatttatagacacccttcattgcaagttcttatttgtaagaattgctttaagtattacatgagtgatgatattagccgtgactcagatggaatggatgaacaatgtaggtggtgtgcggaaggtggaaacttgatttgttgtgacttttgccataatgctttctgcaagaaatgcattctacgcaaccttggtcgaaaggagttgtccacaataatggatgaaaacaaccaatggtattgctacatttgtcacccagagcctttgttggacttggtcactgcatgtaacagcgtatttgagaatttagaacagttgttgcagcaaaataagaagaagataaaagttgacagtgaaaagagtaataaagtatatgaacatacatccagattttctccaaagaagactagttcaaattgtaatggagaagaaaagaaattagatgattcctgttctggctctgtaacctactcttattccgcactaattgtgcccaaagagatgattaagaaggcaaaaaaactgattgagaccacagccaacatgaactccagttatgttaaatttttaaagcaggcaacagataattcagaaatcagttctgctacaaaattacgtcagcttaaggcttttaagtctgtgttggctgatattaagaaggctcatcttgcattggaagaagacttaaattccgagtttcgagcgatggatgctgtaaacaaagagaaaaataccaaagagcataaagtcatagatgctaagtttgaaacaaaagcacgaaaaggagaaaaaccttgtgctttggaaaagaaggatatttcaaagtcagaagctaaactttcaagaaaacaggtagatagtgagcacatgcatcagaatgttccaacagaggaacaaagaacaaataaaagtaccggtggtgaacataagaaatctgatagaaaagaagaacctcaatatgaacctgccaacacttctgaagatttagacatggatattgtgtctgttccttcctcagttccagaagacatttttgagaatcttgagactgctatggaagttcagagttcagttgatcatcaaggggatggcagcagtggaactgaacaagaagtggagagttcatctgtaaaattaaatatttcttcaaaagacaacagaggaggtattaaatcaaaaactacagctaaagtaacaaaagaattatatgttaaactcactcctgtttccctttctaattccccaattaaaggtgctgattgtcaggaagttccacaagataaagatggctataaaagttgtggtctgaaccccaagttagagaaatgtggacttggacaggaaaacagtgataatgagcatttggttgaaaatgaagtttcattacttttagaggaatctgatcttcgaagatccccacgtgtaaagactacacccttgaggcgaccgacagaaactaaccctgtaacatctaattcagatgaagaatgtaatgaaacagttaaggagaaacaaaaactatcagttccagtgagaaaaaaggataagcgtaattcttctgacagtgctatagataatcctaagcctaataaattgccaaaatctaagcaatcagagactgtggatcaaaattcagattctgatgaaatgctagcaatcctcaaagaggtgagcaggatgagtcacagttcttcttcagatactgatattaatgaaattcatacaaaccataagactttgtatgatttaaagactcaggcggggaaagatgataaaggaaaaaggaaacgaaaaagttctacatctggctcagattttgatactaaaaagggcaaatcagctaagagctctataatttctaaaaagaaacgacaaacccagtctgagtcttctaattatgactcagaattagaaaaagagataaagagcatgagtaaaattggtgctgccagaaccaccaaaaaaagaattccaaatacaaaagattttgactcttctgaagatgagaaacacagcaaaaaaggaatggataatcaagggcacaaaaatttgaagacctcacaagaaggatcatctgatgatgctgaaagaaaacaagagagagagactttctcttcagcagaaggcacagttgataaagacacgaccatcatggaattaagagatcgacttcctaagaagcagcaagcaagtgcttccactgatggtgtcgataagctttctgggaaagaggagagttttacttctttggaagttagaaaagttgctgaaactaaagaaaagagcaagcatctcaaaaccaaaacatgtaaaaaagtacaggatggcttatctgatattgcagagaaattcctaaagaaagaccagagcgatgaaacttctgaagatgataaaaagcagagcaaaaagggaactgaagaaaaaaagaaaccttcagactttaagaaaaaagtaattaaaatggaacaacagtatgaatcttcatctgatggcactgaaaagttacctgagcgagaagaaatttgtcattttcctaagggcataaaacaaattaagaatggaacaactgatggagaaaagaaaagtaaaaaaataagagataaaacttctaaaaagaaggatgaattatctgattatgctgagaagtcaacagggaaaggagatagttgtgactcttcagaggataaaaagagtaagaatggagcatatggtagagagaagaaaaggtgcaagttgcttggaaagagttcaaggaagagacaagattgttcatcatctgatactgagaaatattccatgaaagaagatggttgtaactcttctgataagagactgaaaagaatagaattgagggaaagaagaaatttaagttcaaagagaaatactaaggaaatacaaagtggctcatcatcatctgatgctgaggaaagttctgaagataataaaaagaagaagcaaagaacttcatctaaaaagaaggcagtcattgtcaaggagaaaaagagaaactccctaagaacaagcactaaaaggaagcaagctgacattacatcctcatcttcttctgatatagaagatgatgatcagaattctataggtgagggaagcagcgatgaacagaaaattaagcctgtgactgaaaatttagtgctgtcttcacatactggattttgccaatcttcaggagatgaagccttatctaaatcagtgcctgtcacagtggatgatgatgatgacgacaatgatcctgagaatagaattgccaagaagatgcttttagaagaaattaaagccaatctttcctctgatgaggatggatcttcagatgatgagccagaagaagggaaaaaaagaactggaaaacaaaatgaagaaaacccaggagatgaggaagcaaaaaatcaagtcaattctgaatcagattcagattctgaagaatctaagaagccaagatacagacataggcttttgcggcacaaattgactgtgagtgacggagaatctggagaagaaaaaaagacaaagcctaaagagcataaagaagtcaaaggcagaaacagaagaaaggtgagcagtgaagattcagaagattctgattttcaggaatcaggagttagtgaagaagttagtgaatccgaagatgaacagcggcccagaacaaggtctgcaaagaaagcagagttggaagaaaatcagcggagctataaacagaaaaagaaaaggcgacgtattaaggttcaagaagattcatccagtgaaaacaagagtaattctgaggaagaagaggaggaaaaagaagaggaggaggaagaggaggaggaggaggaagaggaggaggaagatgaaaatgatgattccaagtctcctggaaaaggcagaaagaaaattcggaagattcttaaagatgataaactgagaacagaaacacaaaatgctcttaaggaagaggaagagagacgaaaacgtattgctgagagggagcgtgagcgagaaaaattgagagaggtgatagaaattgaagatgcttcacccaccaagtgtccaataacaaccaagttggttttagatgaagatgaagaaaccaaagaacctttagtgcaggttcatagaaatatggttatcaaattgaaaccccatcaagtagatggtgttcagtttatgtgggattgctgctgtgagtctgtgaaaaaaacaaagaaatctccaggttcaggatgcattcttgcccactgtatgggccttggtaagactttacaggtggtaagttttcttcatacagttcttttgtgtgacaaactggatttcagcacggcgttagtggtttgtcctcttaatactgctttgaattggatgaatgaatttgagaagtggcaagagggattaaaagatgatgagaagcttgaggtttctgaattagcaactgtgaaacgtcctcaggagagaagctacatgctgcagaggtggcaagaagatggtggtgttatgatcataggctatgagatgtatagaaatcttgctcaaggaaggaatgtgaagagtcggaaacttaaagaaatatttaacaaagctttggttgatccaggccctgattttgttgtttgtgatgaaggccatattctaaaaaatgaagcatctgctgtttctaaagctatgaattctatacgatcaaggaggaggattattttaacaggaacaccacttcaaaataacctaattgagtatcattgtatggttaattttatcaaggaaaatttacttggatccattaaggagttcaggaatagatttataaatccaattcaaaatggtcagtgtgcagattctaccatggtagatgtcagagtgatgaaaaaacgtgctcacattctctatgagatgttagctggatgtgttcagaggaaagattatacagcattaacaaaattcttgcctccaaaacacgaatatgtgttagctgtgagaatgacttctattcagtgcaagctctatcagtactacttagatcacttaacaggtgtgggcaataatagtgaaggtggaagaggaaaggcaggtgcaaagcttttccaagattttcagatgttaagtagaatatggactcatccttggtgtttgcagctagactacattagcaaagaaaataagggttattttgatgaagacagtatggatgaatttatagcctcagattctgatgaaacctccatgagtttaagctccgatgattatacaaaaaagaagaaaaaagggaaaaaggggaaaaaagatagtagctcaagtggaagtggcagtgacaatgatgttgaagtgattaaggtctggaattcaagatctcggggaggtggtgaaggaaatgtggatgaaacaggaaacaatccttctgtttctttaaaactggaagaaagtaaagctacttcttcttctaatccaagcagcccagctccagactggtacaaagattttgttacagatgctgatgctgaggttttagagcattctgggaaaatggtacttctctttgaaattcttcgaatggcagaggaaattggggataaagtccttgttttcagccagtccctcatatctctggacttgattgaagattttcttgaattagctagtagggagaagacagaagataaagataaaccccttatttataaaggtgaggggaagtggcttcgaaacattgactattaccgtttagatggttccactactgcacagtcaaggaagaagtgggctgaagaatttaatgatgaaactaatgtgagaggacgattatttatcatttctactaaagcaggatctctaggaattaatctggtagctgctaatcgagtaattatattcgacgcttcttggaatccatcttatgacatccagagtatattcagagtttatcgctttggacaaactaagcctgtttatgtatataggttcttagctcagggaaccatggaagataagatttatgatcggcaagtaactaagcagtcactgtcttttcgagttgttgatcagcagcaggtggagcgtcattttactatgaatgagcttactgaactttatacttttgagccagacttattagatgaccctaattcagaaaagaagaagaagagggatactcccatgctgccaaaggataccatacttgcagagctccttcagatacataaagaacacattgtaggataccatgaacatgattctcttttggaccacaaagaagaagaagagttgactgaagaagaaagaaaagcagcttgggctgagtatgaagcagagaagaagggactgaccatgcgtttcaacataccaactgggaccaatttaccccctgtcagtttcaactctcaaactccttatattcctttcaatttgggagccctgtcagcaatgagtaatcaacagctggaggacctcattaatcaaggaagagaaaaagttgtagaagcaacaaacagtgtgacagcagtgaggattcaacctcttgaggatataatttcagctgtatggaaggagaacatgaatctctcagaggcccaagtacaggcgttagcattaagtagacaagccagccaggagcttgatgttaaacgaagagaagcaatctacaatgatgtattgacaaaacaacagatgttaatcagctgtgttcagcgaatacttatgaacagaaggctccagcagcagtacaatcagcagcaacagcaacaaatgacttatcaacaagcaacactgggtcacctcatgatgccaaagcccccaaatttgatcatgaatccttctaactaccagcagattgatatgagaggaatgtatcagccagtggctggtggtatgcagccaccaccattacagcgtgcaccacccccaatgagaagcaaaaatccaggaccttcccaagggaaatcaatgtgattttgcactaaaagcttaatggattgttaaaatcatagaaagatcttttatttttttaggaatcaatgacttaacagaactcaactgtataaatagtttggtccccttaaatgccaatcttccatattagttttactttttttttttttaaatagggcataccatttcttcctgacatttgtcagtgatgttgcctagaatcttcttacacacgctgagtacagaagatatttcaaattgttttcagtgaaaacaagtccttccataatagtaacaactccacagatttcctctctaaatttttatgcctgcttttagcaaccataaaattgtcataaaattaataaatttaggaaagaataaagatttatatattcattctttacatataaaaacacacagctgagttcttagagttgattcctcaagttatgaaatacttttgtacttaatccatttcttgattaaagtgattgaaatggttttaatgttcttttgactgaagtctgaaactgggctcctgctttattgtctctgtgactgaaagttagaaactgagggttatctttgacacagaattgtgtgcaatattcttaaatactactgctctaaaagttggagaagtcttgcagttatcttagcattgtataaacagccttaagtatagcctaagaagagaattcctttttcttctttagtccttctgccattttttattttcagttatatgtgctgaaataattactggtaaaatttcagggttgtggattatcttccacacatgaattttctctctcctggcacgaatataaagcacatctcttaactgcatggtgccagtgctaatgcttcatcctgttgctggcagtgggatgtggacttagaaaatcaagttctagcattttagtaggttaacactgaagttgtggttgttaggttcacaccctgttttataaacaacatcaaaatggcagaaccattgctgactttaggttcacatgaggaatgtacttttaacaattcccagtactatcagtattgtgaaataattcctctgaaagataagaatcactggcttctatgcgcttcttttctctcatcatcatgttcttttaccccagtttccttacatttttttaaattgtttcagagtttgttttttttttagtttagattgtgaggcaattattaaatcaaaattaattcatccaatacccctttactagaagttttactagaaaatgtattacattttattttttcttaatccagttctgcaaaaatgacctataaatttattcatgtacaattttggttacttgaattgttaaagaaaacattgtttttgactatgggagtcaactcaacatggcagaaccatttttgagatgatgatacaacaggtagtgaaacagcttaagaattccaaaaaaaaaaaaaaaaaaaaaaaaaagaaaactgggtttgggctttgctttaggtatcactggattagaatgagtttaacattagctaaaactgctttgagttgtttggatgattaagagattgccatttttatcttggaagaactagtggtaaaacatccaagagcactaggattgtgatacagaatttgtgaggtttggtggatccacgcccctctcccccactttcccatgatgaaatatcactaataaatcctgtatatttagatattatgctagccatgtaatcagatttatttaattgggtggggcaggtgtgtatttactttagaaaaaatgaaaaagacaagatttatgagaaatatttgaaggcagtacactctggccaactgttaccagttggtatttctacaagttcagaatattttaaacctgatttactagacctgggaattttcaacatggtctaattatttactcaaagacatagatgtgaaaattttaggcaaccttctaaatctttttcaccatggatgaaactataacttaaagaataatacttagaagggttaattggaaatcagagtttgaaataaaacttggaccactttgtatacactcttctcacttgacattttagctatataatatgtactttgagtataacatcaagctttaacaaatatttaaagacaaaaaaatcacgtcagtaaaatactaaaaggctcatttttatatttgttttagatgttttaaatagttgcaatggattaaaaatgatgatttaaaatgttgcttgtaatacagttttgcctgctaaattctccacattttgtaacctgttttatttctttgggtgtaaagcgtttttgcttagtattgtgatattgtatatgttttgtcccagttgtatagtaatgtttcagtccatcatccagctttggctgctgaaatcatacagctgtgaagacttgcctttgtttctgttagactgcttttcagttctgtattgagtatcttaagtactgtagaaaagatgtcacttcttcctttaaggctgttttgtaatatatataaggactggaattgtgtttttaaagaaaagcattcaagtatgacaatatactatctgtgttttcaccattcaaagtgctgtttagtagttgaaacttaaactatttaatgtcatttaataaagtgaccaaaatgtg

SEQ ID NO: 10885 - DNA, 17077 bp, Homo sapiens
gaagatggtggtgttatgatcataggctatgagatgtatagaaatcttgctcaaggaaggaatgtgaagagtcggaaacttaaagaaatatttaacaaagctttggttgatccaggtaaggtattaatagacagtgacataaagaagcaagttgaataaaaaatgtgtttatattttaacaaatagtaattgcacagctactaagtatctggtctttgttgtggttatccttcaggtttttgccttttagaaaattcttagtatttcaatagaataaaatcacccttaatgtcgccagctgttcagaatttatttgctgagtctgaaagtgtttagggttttaggggataccttgtaaacacttaaaaatgcatcaaatgcctgtgttgcaatcaaagattcttccagctatccaaatattaggtgataacaagagctctctccatatcctgaaaacagtttgtgtctttccaaacttcatgtcattagaagaattgctgcttgcttatctccttttaaggggccatcagtatgaaaggttaatattttcaatactgttgatccttatgtgatagtaatctgatgtgagagccagatgttgatatatttgccacttggaaaagcaacacgttgtactgtctgcaaaactaaaattattttttaatctacgattattaatttgtgcaactttttcttcatatgtttatcttgtcatatcatatttaagacactattgaggttttatttttgttgagaaagtctgggtaattgtcattgtcaaagtgatagtaatctttagaatccttggctttgcctcttttttaaagataatgaggtagttaatacatagcaaaataactgccatcacaaatctaaggcctaataataagtttatctctttcccacgattaaataggtgtttataaatcttgtggctggtttattgttgaaaaattataagctagtgtctagtatcattgtagcagattttttccacaagatttccttgaaactgtttaatacaacagtttcaggtgcttagtgtacttatttgttcatgaaaaaaatgaagaaaaaaaaaattaaagcttctaacatgaagggtaacatttgtcattgccatattttatcatttagtgacatttaaaaaaaatttttggccgggcatggtggtgcactcctgtagtcccagctactcaggaggctgaggcagaagaatcgctcaaacctgggagctggaggttccagtgagccaagattgtgccactgcactcccatctgggtgacagagcgagactccatctcaaaaataaaaaacaaaaaaacaaaaaaaaacttttcattttggaataattttctgtttacatgaaagttgaaaaggtagtgcagagagttcccatataccctacatctggttcctcaattgttaacatcttacattgccatggtagatttgtcaaaactaagaaattgacacattattattaataacttcaaactgcatttgtattgcaccagtttttctatccagggttctacattgtatttagctgtcatgtctctaacagtcttctggtctatgacggtttctcaatctttattttttcattatctcatcagtcttaaggaggaccgtccaggtagatatcctgtagagtgttctctgatctgaatttatagtttttcttgtgattagactgagattagactgaggttttgaaagaatataccagaggtgacataccctttttgtcacatcatatctcatatcgggggtacatgataagcacttgctgttactgatgatgttaactttcatcacttggctagggtagagtttgtcaggtttctctcctgtagagctgctacttttacctgtccctcatctgttcattggaatccagtcactcaatctagcccacctgaatgggaggatggtggaaattaagctgtatctcctatagtgggtaatatctacacataaaatttggatttttttaaagaaaaaattatcttttcttacccatttatttagcctttgatttatataattatatactcatctatttttagttcgtgcattggactataaaccattactgcattttttttttttttttgctcaaattgtttcactttgaccattgggagctttttttaaggtgaggtcctctaccctttgatatgtccctatccttttggctttgagcactttattactttctggcattacaggatgctccaggttcatgttatattgtcctggccccagaatcagccatttcttgaagacatcatggttccttttactgaaaattgacatttacaaatgtaaacacacccatataatttgcaaatatatccttccattctgtgagttgtctttttacttttttatatcatcttttcagtactaatctttaaaattttgattacatttaatttacctatttttttcttgtgttgcttttgcatttagtgcatatccaagtattcattgcttaatcgaaggtcatgaattttttcacctgtgttttcttattttatagttctagctcttgtatttatgtttatgatctattttcagtttatttttgtatatggcatgaggtgggagtccaacttcattttttgtattttgatatccagttgttctaacaccatttgttgaaaagactattctttcttcattgaagagtcttgacaccattgttgaaaatcaattgaccatagatgtatgtgtttatttctaggctctcaatattattgtattgatctatatgtctgtccttatgccagtgtgacattgttttaattactgtagctttgtggtaagttttgcaatcaggaagaagtcctacagctttatttttctgtctcaaagttgttttgctatttgaggttccttgaaatttcatttgaatttgatgattggcttttatatttcctcaaagaaactagctgggattctgttagatattgcattgaatctgtagattaatttgaggaatattgccatcttaacaatattaaatcttcccctccatgaacatctaatttctctccgtttatttaggtctttaatttcttttaataatgaaatttgatttaggtcctttaatttctttagtgtaaaagtcttggacttattttcttaaatttattcctaaatattttattctttttgagccttttggaaataaaattgttttaattttattttcagataattctttgttagtgtatagaaatacaacagatttttgtatactgattctgtatcctgcaacttagttgagtccatttataagttctaatagttgtatgtgtgcgctcacgcgtgtgtgtgcgcgcgcacgcacgcgatttagttttctattaagaaaatcatagtctatgagtagaaatagttttactttttcctttccaatatgaatatcttcaacttctttttcttgcctaattgcccttcttagaaatttccatacaatgtcgaacgtaagtggtcagagcagttggttgtcatgtttttgatctcagggaaagctttcagttctccaccattaagtatgacattagctgtggatttctaataggtgtcttttatcaggttgagtaagttctacattgggttatattttttgtttgttttgataattaaaaaaataaatacctagattacccttgttaaaacttaagaggggctggtttctccattaggttttactggatgttcttcaggaaactgaagctctacttttattttcttttccagagtatatataagtattagagatagttcctctgccatagctgggtaaccatctgcaacaagaatattctaatatccatcatgtataacatggaatatattaaaactgttgttaagttttaaggtttagtgatagtatctagatataattttctttgccacctaagtctaaagtgtcaggatctgttcagtacttctaaatttattagaagggatctgttcagtataacacttaattttccagtacatgttttccattttatgcccaatttatcttctctgatttggaacaaattagtgatagtgaagaatcatataaatggcagcagagtatgtgaagactgaagtttgggtgtaatgttaaagaaaagtctaaattgaagttcaagatggaaacaaaatgtcagaaccagacagttttgggtatgagattcttaaggatgagctgaggttgtaaacttataaggtaggctattagatcagaagcctggaaaattgggagtatgtattaggattggaaacagtgtttagagctgaccagagttaagatagtagtgttcatctttcaacttagctgctctggttatctcttcctgcgtaacaattatcccaagccttagtagcttaaagtgacaagaatcagctgggtgcaatggctcatacctgtaataacaatactttgggaggccaaggcaggaggattgcttgaggctgggagtttgaggccagcctgggcaacatagtgagaccccatatctacaaaaaaataaaagaattaaccaggtgtggtggcacacacctgtagtctcagctattcaggaagctgacatgggatgattgcttgagtccaggagttcaaggaagcagtgaactatgatcactgagatcataatcatcacagagtgtgagacccagtttcttaaaaaagaaagtgacaacattttgttaactttcctagttttactgggtcagggatttaatagaggtttacttggacagttctaaacattttatcaacttttctctctaatatctttatggttttttatgtaaaaaaattcaccaataggtggcaatgtaacactgaaaaataatttgcatttgttactattataatagcatgtgacaaaacctttatttgacctttcttccctaacttaccatttgttttgaggcatatttttctacttaatgtacttaaacaatctggtggagttttctaattcacattactgtttttagaagaatgttccacattttgtagcttgagaggacataatttttatgtgtgtgcatgaatgtgcatatgcacaggattaactcaaggtactgtttgctttaagcaataagatatatctatgtaattttataaaataatgacaggtttccatagtgtattgaaccatcttaagttaacagactcttttagtcaggcttgaatttttgaacagaagaaattttcttcaagtctttctctaaattcctgttcttctgctctccagagcctcatggctgccattccccctgtagtttctgtataattatttataagtgtaggtattttgaaaccctcctatctgatatatatatgtcattgtttgggaattaagttttctagaaagtatataaggtaacaaacatttcattttatgtaagtatgtatgtatgtatttagggggcagggagatggggatctcattctgttacccaggctggagtgcagtagcatgattatagctcactgtagcttcaaatcctgggctcaagtgatcctcccagttcagccttctgaggagctaagactacaggagtgtgccgccatgcccaactacatttttttttttttttttggtagagacagggtcttactgtgttgcccaggctggtctcgaactcctgacaacacctagataattatttggagatgaggatctcactatgttacccaagctggtctcgaactcctgacacacaactaattttttggagacgagggtctcgttatgttgcttaggttagtcttggcctcctggcctcaagcaatccttctgcctcagcctcctgagtagtagctggcattacaggtgtgagccaccaagtccagctaaaacttactcctttcgaacattaaaaatacttatttttaattttttatgttagtaaatgttatatacatttctatcttataattcatattctatttaatatgatgaataacatgtttaatatatgaataacaattttaactttttcattgactcagggttattaatgagtgcatttacttttatttttattttatttaatttttttttttgagacggagtctcactctgtcacccaggctggagcgcagtggcgcgatctcggctcactgcgagctccgcctcccgggttcacgccattctcctgcctcagcctcccgagtagctgggactacaggcgcctgccaccacgcctggctaatttttttttcttgtatttttttagtggaaacggggtttcaccgtgttagccaggatggtctctatctcctgacctcgtgatccgcccgtcttggcctgccaaagtgctgggattacaggcgtgagccaccgcgcctggcttacttttattcttaattcttctagttcttcagatatccgtactaaccatagggctaccactctccttccattgccatgccaacaaatagttcttttaagttaaagaaattataaaagtaatacatatccttaagcaaaataaaaacagaagaaaatgttgtatattgaaaagtaaaagttccctacctcctagtctcattattgtttcatttatatccgtataggaattttttgtgcttacagaagcatgtattctccttatttggtattgcaacatttaggtggtcctcaaagccaccctcaggcttggtaactcataagaaggactcacagaactcagaaaatccattagactcatggttatggtttattacagcaaaaatatacaaatgggatcataatatggataactattctgcaacacactcctttttatttagtaatatatttgtcatatctttcaaggtttgcacatagagatatacatcattttttcagattatttatttttctataagttattggggtacaggtggtatttggttacatgagtaagttctttagtggtgatttgtgagatcctggtgcatccatcacccgagcagtatatgctacaccatatatgttgtcttttatcccttgccctcctcctactcttaccccaaagtccccaaagtccgttgtgtcattcttatgcctttgtgtcctcatagcctagcttccacatatcagtgagaacatttgatgtttgcttttctattcctgagttacttcacttagaataatagtcccaagtctcatccaggtaattgcaaatactgttaattcattcctttttatggctgtgtagtattccatcatatatatatatatatatatatatatatatatatatatatatatatatatatatatgccacaatttctttatccactcattcattgatgggcatttgggctggttccacaattttgcaactgtgaattgtgctgctataaatatgcatgtgcaaatatcttttttgaataatgacttcttttcctctgggtagatacacagtagtgggattgctggatcaaattgtggttctacttttagttctttaaggaatctccacactgttttccatagcggctgtactagtttacattcctaccagcagtgtagaagtgttccctgattgctgcattcacaccaacatctactgttttttgattatggccatgcttgcaggagtaaggtggtatcacattgtgtttttgatttgcatttcactgatcattagtgatgttgagcattttttcatatgtttgttggctatttgcatatcttcttttgagaattgtctgttcatgttcttagcccactttgtggtaagattgtttggtttttttcttactgatttgtttgagttcattgtagattctggatattagtcctttgtcagatgtatagatagtgaagattttctcccactccgtgggttgtctgtttactctgctgactgttccttttgccatgcaaaagctctttagtttaattaggtcccggctatttatctttgtttttattgcatttgcttttgggttcttgaccatgaaatccttgactaagccaatgtctagaagggtttttccaatctcatcttctagaatttttatagtttcaggtcttaggtttaagtccttaatccatcatgaggtgatttttgtataagatgagagacgaagatgcagtttaattctcctacatgtgggtagccaattatcccagcaccatttgttgaaaagggtgtcttttccccactttatgtttttgtttgctttgtcgaagattagttggctctaagtatttgggtttatttctgagtcctctattctgttccattggtctgtgtgcttatttttataccagtaccaagcttttttggtgactgtggcctttacagaatagtttgaaatcaggtagtgtgatgcctccagatttgttctttttgcttagtcttgctttggctatgcgggctcttttttggttccatatgaattttagaattgttttttctaactctgaagaatgatggtgttattttgatggggattgcattgaatttgtagattgcttttggcagtatggtcattttcaccatattgattctacccattcatgagcatgggatgtgtttccatttgtttgtgtcgcctatgatttctttcagcagtgttttgtagttttccttgtagaggtcttttgactcctttgttaggtatattcctatctttcttgtttatttatttatttatgtatttatttatgcagctattgtaaaaggggttgagttcttgatttgattctccacttggttgctgttggtgtatagaagagctactgatttgtgtacattaatcttgtatccggaaaccttgctgaattcttttatcagttctaggagctttgtggaggagtccttagggttttcaaggtaaacgataatcgtcagcaaacagggacagtttgacttcctctttactgatttggattccctttatttctttttttctttttctttttctttttttgagatggagtctcgctctgtcgcccaggctggagtgcagtggtgcgatcttggctcactgcaagctccgcctcccgggttcacgccattctcctgcctcagcctcccgagtagctgggactacaggcaccggccaccacgcccagctaattttttttgtatttttagtagagacggggtttcactgtgttagccaggatggtctcgatctcctgacctcgtgatctgcccgctcagcctcccaaagtgctgggattacaggcgtgagccaccgcacccggcccagatcccctttatttctttcgtctgattgctctggctaggacttccagtactatgttgaagaggagtggtgagggtgggcatccttgtcttctttccgttctcagagggaatgctttcagcttttctccattcagtattatgttggctatgggtttgtcatagatggcttttattacattaagatatgtcccttgtatgtcgattttgctgagggttttaatcatatagggatgctggattttgtcgaatgctttttctgaatctattgagatgatcatgtgatttttgtttttaattctgtttatgtggtgtatcacatttatttacttgtatgtgttaaaccatccctgcatccctgatatgaaacccacttgatcatggtggattatctttttggcatgttgttggatttggctagctaatatttttgttaaggattttagcatctatgttcattgaggataatggtctgtagttttcttttttggtcgtgatctttcctggttttgctattacggtgatgaatagggatgaattagggagggttacttctttctctgtcttgtgggatagtgtcaaaaggattggtaccaatgctttgaatgtctggtagaattctgctgtgaattggtctggtcctggacttttttttcttggtaatttttaaattgccatttcagtctcgctgcttgttactggtctgttcggggtatcaaattcttcctgatttaagctaggagggttgtatttttccaggagtttatccacctcttgtaggttttctagtttatgtgcgtaaaggtattcataatagccttgaatgatcttttgtgtttcagtggtgtcagttgtactatctcctgtttcgtttctcagtgactttatttggattttctctcttcttttcttggttaatcttgctaatgttctatcaattttattttatcttttcaaggaactagcttattgtttcatttatcttttgtattttttgttttgttttgtttcaatttcatttagtactgctctgatcttggttatttcctttcttctgctgggtttgggtttgttttgtttttgtttctctagttcctagtgaccttagattgtctgtttgtgctctttcggactttttgatgtaggcgttcagggctatgaactttcctcttagcactgcctcagctgtatcccagaggttttgataggctgtgtcattattgtattcaggtgggtgtattcagctcccacgcaaaccgaaaggctggtcttgtctcactcccatggtgtaccgcaccccctacccctccagcgccgaaacagccccgagtgtgtttgagtctggcttgaaaacttgtccccggctttccacctccaagctgcaaaagaaaagggctttagttcatcccccacctgtgaagtctgcaatctggatttgcgccctccccggagttctggccaggaggcttcttgccccattcaaattgttaaaaagttcagctagagaagtccttctccctgtggagttttaccctctgctctgatggccatcctcctgatggatccctgtgttgccaggcaggaatgggctgcttggggatccagcaagctcccagtgcctttctgctacttcctctacccctgtatttcgctcggcttggctttctaacttgactcaactccagctaaagtcaggaatttctccagcaaacagaccttcagcttctccagtgggggtgtgtctacctcattaattttaactctgtgacttattccattatcccatggtttaagccccatttaccagatcccctctgacaaatttttaggttgttttcaattttcctccgtaacaaaccgtgctgcagagaacattcttttatgtatctttgggtgcctgtggaagagtatctttgggaccaattcctagaaattgaaatatgggtcaaagggtttacacattttgcattttgataattattgtaaaattgacttccaaaatttttgatactaatttagactcccacagagtgtatgagagtacccatttcaacgcatcctcatggataccgaatattaagtggtaaaaccatttaaatcactgctgtaaaaggcatttttttctctgtagaaaatgttttcagattcaaagtaagggatgcataatttttaaatacaaagctagagattttagttttacaaaatattagtttttttttgttgttgttgttgttgtttttttttactatttgtgtagccccaactgaatactgaataacagttgttattatttgatctgtcatactgaagctgttacttttgaagtcatgtaaaagttgcattttctctaatgcttaccagatgggagatagtttgacagctgctttgttgaaatcagcaattaagtaatatgtgtgtatatgttaaccagcaagcaaatagagtatgtattatgccctggaaaaaatatatatcagctgggcgtggtggcttatgccggtaatcccagcacttgggaggccaaggcgggcagatcacttgaggtcaggagtttgagaccagcctgaccaacatggtgaaacctcgtctttactaaaaatgcaaaaaaattagccaggcatggtggcgggcacctgtaatcccagctactcgataggctgaggcaggagaattacctgaacccgggaggtggaggttgcagtgacccaagattgtgccactgcattccagcctgggcgacagagggagactccatctcaaataaaaaagaaaagaaaagaaaaaaaatatgtatgttattttaacaaataagcctttagtatttcttctaaaagagtccacagatgctgtggaacatatttgttcaggtacaaatgcattccatagtaataaaatgttgttattttttatattgcaatcccaaatattttctgagtttaagcttttaagatcttttatagcttaaaagctgttctccctaccctccatacccatgtaacaaccagtttcactttcttttatcagttaaaatttttccccagcaatgaatgttagttatttggactaagtgggaagtattatatggtctgttgtgacatatattattcttaaagtgtaacttttgaaatttgtcttttcatgtatatatacattgctcttagtctttgctgatagtttaagttgatatactaatgctgaaatagctttaaagacttttcaattttaaaagacatttttaaaaataggctatgtctgttgggggaactttttccctcttgttgtttttatttttgcttatttttgtaaactcagaggaccctgactaccatttatagtggtatttcaatgctctaccatttggatataattaatatagttagtgctgtattaaccaaatacgggagcagataaaatatgtttatacttacaacgatgtcattttatcttcctgtaagatcagcactttaaagggattaactttatttacttaaatggatcacattttcagttttattatatattaattgtgttatttttctgtttatttttgtaggccctgattttgttgtttgtgatgaaggccatattctaaaaaatgaagcatctgctgtttctaaagctatgaattctatacgatcaaggaggaggattattttaacaggaacaccacttcaaaataacctaattgagtgtgagttaatatctctgattatgcagtagaatattggtatttcctcagatatatttttgtaacgttaccatttacctttcttctacttattctagtatagtcctagaccatgatctacataggttcatcttagtctgctgtgaaagaataacatacttttcaaatgagatgctttataaatgagtggtaaaatacagttaagagatacgctattgtgaatgttcatatataaatatggaatgtgaattattgcaagagtatcagaagtcttaatgattgctttagaaagtacataagcatatgtgattactccagataattttaaggggatattccagttttggggcatgtactgtcaagaaatcagaaagaaatgggaactgtgaacattttagtaaagtggagatgggagaaggagaggtttgctgaatccatggcaggacagtttgctgaggctaaaggtagttgatgtgaacctagggaaatgacttgtgaattaccctcattttcgtatgtctgtggtgacactaaagaagggaacatgagattattcagcaagtaactaattgaaatttcctgttataatctctcactttttttctttttcccactgtaatggctttttgttatttttctctgtgttacattcctttagtgtatttatggtaactttttgctattttattatttgtaatactagtcatttcactttagcctatactttatgtttgtttttatctgttccagttttcctcttttctattctgttaccctatttatagaaatgctgtttcatattgtggtcctatatagtatgggacaagtgatggctctgttaatttttacaaaatgggttagtcttacaaaatacattagtaattaattttttttttttactatttgtgtagccccaactgaatactgaataacagttgttattatttgatctctcaaatattatttggttattctggaaatgaatcagttaatataaattaacttgcttagtagcttattacctcctatttattgttttgacttagtatctcctttcttcacaagatagcctcactgaccataaaatcatggttagattaatggaccacttgttttatacttcatatctcttataaagaataatagtgagtttgaataaactgtccttaggtatttttaaaaaacgttcatgtctagtatttagggatggtttttacttcaattttctctctcgttttggtaattcacttgtagatcagacttataaccatgtttattctatacttagcttgatattctttctttatagcttaattctaatgcatgtgtttttgacatgagcatttcattggggaatttttctaagtctttttaacgattgttaatgttgttaatgaataatgtcttctctcttagatcattgtatggttaattttatcaaggaaaatttacttggatccattaaggagttcaggaatagatttataaatccaattcaaaatggtcagtgtgcagattctaccatggtagatgtcagagtgatgaaaaaacgtgctcacattctctatgagatgttagctggatgtgttcaggtacaaatatgttccatagtaataaaatattcttacttttttatataacaatcccaacatattttctgagcttaaagtttaataattttgtgttttctttcccgctctttcagtagatagttttacagttatatctccttgcgttgtcttaaaaaatttctgctgcattcaacttttaaaaaagaagttccgctgagtttaaaacatagttgattcatttgccaggtgtaaagcctcatatcttattatgttaatgtttagatttttcatccttaagatagggagttccttaagaggaacatagctactatgatgaagttcctatgctcaccctaattctgtagtacagtattataaatctcacttttttgaaatggttataggagaggccagtatgaattaagagaggagccacttttaaagtaatcctggagaaacagttttgttactttcaagtatatataataacctgaacagactagtggtgtcgtttacatacagattttcagtgaatctatattaatgaatggataagtgtctagagactgagctggcagttaatagatctcaagatacgcactttctctgtagatgttaggtactgatgatagcctcaaagatgttttaacaaatgagacaggctattcttttggttggatatacagtttgccctccatatctgcaggttctgcatccatggattcaacctaccatggatcaaaaatatttttttaaaaaatagataaaatggacagaggctaggtacagtggtgcacacctgtaattccagcactttaagaggccaaggtgggaggatcacttgagcccaggagttcaaggctgcagtgagctaaaatcatgccactacactccaggctgggtgacagagcaagaccctgtctctaaaaaaagttttaaaaaattagccagccacggtggtgcgcacctatagtctctgtcacttgggaggctgaggcaggaggattgcttgagcccaggaattcaagactgcaaggagctaagattatgccactgtacttcagcctcaatgatagagtaagaccctgtctcttaaaaaaaagaaagaaaataattaagaaaaaaatggatgattgtgtctgtactgaacatgtacagacttttttcttgtcattatttcctaaacaatagagtatagcaactatttacatagtatttgtattgtgtgaggcattataagtaatctggggatgatttaaagtatatgggaggatgtttatatgttatatgcaaacactacattatttatataagtgacttgaactttcatggattttgctatctgtggaggtggggtgggttctggaaccagtctcccatagatactgaggcatgactgtacttgccatcattataaggagtagttgttccgtttggtcaggttggctacatgtgctagcaagtaccctgtttctgtattgctgctactacccaggcagcatttttctttctggtttaaggagtaatttctatttagcacattggtgttctgtttttctactcttacaataaaatggtttcaagagtgcttgtagaggggttgctttcttaattgggcaaatattccctctaaaattatatgttattgtttgacatattagcatatctttctaagaagccaactcagactgcattagactttgattcctaggttttattacatgattaaagcaaggcattttgctcacactacctactacatcccctccataccttttgttatttttttttctgtacagagaagactattttgaaaacttaaattgctcacttggtaatgtgattgcttcaatttaaaacctacctggtgtgttgcagtgtctttttaccagtgtaccatattgtatagtcatatgaaatacattgtgtagataattgtgggtttagaaagggtaaatatatttaagaaaatgttttcttatatgtttagtgcctatttatttatgtgtatatttcagttataagcaatgagaacttgtagttcattcctgttaaatatttagattaattttcattctctttcttgttaattacagaggaaagattatacagcattaacaaaattcttgcctccaaaacacgaatatgtgttagctgtgagaatgacttctattcagtgcaagctctatcagtactacttagatcacttaacaggtaaacaatacaccttgttgatttcatcttctctataaagacattctttttccaaagaagattatttcagtcatcttactatgtctgttgttctttttcagttttgcatttgaataaaatgggtatgcttaaaagcataaaatatttctaattaaaacactgatgctgtcaaaattaaaatcaagaagcaaattgatgaaaaagatatacagcacatatgaataatgcccttaatttgtaaagagcttttatttcagaaaaattatgaatgtgaataaatccataaaagaagatatacaaaattccagagtatttttttaaaaagtatttacccacattaataataaaaggtgtataagttaaattca

SEQ ID NO: 10886 - DNA, 814 bp, Homo sapiens
gaagatggtggtgttatgatcataggctatgagatgtatagaaatcttgctcaaggaaggaatgtgaagagtcggaaacttaaagaaatatttaacaaagctttggttgatccaggccctgattttgttgtttgtgatgaaggccatattctaaaaaatgaagcatctgctgtttctaaagctatgaattctatacgatcaaggaggaggattattttaacaggaacaccacttcaaaataacctaattgagtatcattgtatggttaattttatcaaggaaaatttacttggatccattaaggagttcaggaatagatttataaatccaattcaaaatggtcagtgtgcagattctaccatggtagatgtcagagtgatgaaaaaacgtgctcacattctctatgagatgttagctggatgtgttcagaggaaagattatacagcattaacaaaattcttgcctccaaaacacgaatatgtgttagctgtgagaatgacttctattcagtgcaagctctatcagtactacttagatcacttaacagttttgcatttgaataaaatgggtatgcttaaaagcataaaatatttctaattaaaacactgatgctgtcaaaattaaaatcaagaagcaaattgatgaaaaagatatacagcacatatgaataatgcccttaatttgtaaagagcttttatttcagaaaaattatgaatgtgaataaatccataaaagaagatatacaaaattccagagtatttttttaaaaagtatttacccacattaataataaaaggtgtataagttaaattca

SEQ ID NO: 10887 - DNA, 17729 bp, Homo sapiens
tgctgagagggagcgtgagcgagaaaaattgagagaggtaactaatttctttcttcttctttttcttttgtagctacagggtcttgctctgttgcccaggctggcctcgaactcttgggctcaagtgatcctcctaccttggcctcctaaacttctgggattacaggcgtgagtcaacacacccagccttaatttatttctattaatgatttattttatttggtatatgacttcaatatatttcagcattttaagagtagaatgttgtaatctaccacagatttcttttttttagacggagtctggctctgttacccaggctggattgcagtggcatgatctcagctcactgcaacctttgcctcctgggttcatgtgattcttgtgcctcagcctcccaagtggccgggactacaggcatgcactaccacacccagctaatttttgtattttttagtagagttggggtttcaccatgttggccaggctggtcttgtgctcctgacctcaagtgatccacctgcctcagcctcccaaagtactgggattacatgtgtgagccaccttgcccagcctcaaccacaggatttctagttgcaattgatttttcctactgtcactatttcatgcaacttaaaatagtcattaagctttattaatttaattaagtgcatggaaagcattgagattcttgaatgatcaccaaaatggttatgttgtattttgggtagagaaatgtttcaaaattacttcttaaatccataaaagatttcagttttttaaatggactttatgttacaaaagttttcaaattcacaggtggagagaataatataataattctccctggatctattaactcagtttcagcagttactaacacaggacgagtcttgtttcatcttttttttttttttttttttttttttttttgagatggagtttcactcttgtcacccaggctggagtgcagtggcccaatctcggctcactgcaacctccacctcctgggttcaagtgattctcctgtctcagcctcctgagtatctgagattacaggtgcacgccaccatgcctggccgtttcatctattctttttccttcagattatttcagagcaaatctcagaaatcatattctgtttataaatagttgggaatgtattgttaaaagataatggtattttaaacattactgcagtgccattattaaactgaattctctcattgcctcacatagtagttttaaaaaatagttggtatgggcctggcgcggtggctcacgcctgtaatcccaacactttgggaggctgaggcgggtggatcacctgaggtcaggtgttggagaccagcctggccaacatggtgaaaccccgtctctactaaaaatacaaaaaaaattagccaggtatggtggtgcacgcctgtgatctcagcctcttgggaggctgagacaggagaattgcttgaacctgggaggcagagcttgcagtgagccagggttgcaccattgcactttagtctgggtgacaagagcaaaactctgtctcaaaaaaaaaaaatagttggtttgaatcagggtcttaacaagggccatctgcatattctgttgtatttggatgttacatctcttacctaattttaacctagtttctctttggttctttctttttctttacccattcttacagttcatttgcttaagaaaccagattatttttgtaaaattttctatattctgagttttgttatttgcatccctgtggtacagtttcactggcttctatatttcgtataaattggtaataagatctagagtcctgatcagatttagattcagttctctttttggtagaaatactcatgggcagtaatatgtacttccttttggatctcattaagaggtactttaaaactgcttgtccctttttttgtggtacagctcctctaactttgttccactttttcagaatctttttggatattctcagttctttgcatttccacatagtattacgttgttggtttttacaaaaatccctgtggaatttctgttggaattttgttgaatctttcttgtaatgtggccagaagacatcttaacagtgttttgtctcctgttacatgaatatagtgtacttctctatttatttaccttctctttaatttctcttaggaatgttttgtagttttctctgtacaggtctagtacatattttaaaaaatttatccccaagtaattcctgatttttgatgttacattgtattagtccattttcacgctgctaataaagacatacccaagactgggcaatttataaaagaaagagttttattggacttatagttccatgtggcttggggaggcctcacaatcatggtggaaggtaaaaggcacatttcacattgtggcagacgagaagaacttgtgcagggaaactcctctttttaaaactatagatcttgtgagacttattcactatcacaagaacagcacaggaaagacctgcccccgtgattcaattacctcccactgggtccgtcccacaacatgtgggaattcaagatgagatttgggtggggacacagccaagccatatcatatagtaaatgtagtttcacgtaatgttggcataatgaccttgtgtcctaagctctaaatttacttactcgttatagtagcttttttgataaattctttgtgactttcatgtatacgtttgtgttgtctgtaaagaaaaactattttgctaattccattccaatctgtcatttatttttttaaaattataaatggtgaatttcttcaaatgcttttcattgcatctgttggagtgacctagaaaatgtcttgtattccttgaataaaccttgcttagtcacgttatattactccttttatatattgtattgcatttgctgatccttccttccttccttcctcccttccttccttccttcctttctttctttctttttctttctttcaagatagggtcttgctctgtctctcaggctagagtgctatagtgtgatcatagctcactgcagcctcaaactcctgggctcaagcaatcctcttgcctcagctttccaagtagctgggacaacaggcatgtaccaccatacctggttaattttttattttagagattgggtctcattatgctacccaggctggtcttgaccccctggcctcaagtggtcctctcccatcagcctcccaaagtgctgtgactatagtagggagcctccacacctggcatattccatttctttaatacatgtagaactatttagatcttttctttttctttaggtctgttttggtaaatttcaaacttaaggaatttttccatttcatttaagtagtcaaattatttatgtaaatttgtttatagtctttcattatactttgtaggttctgtcatttattgtttctgttaggaatttgtgttttatcattttttccttgattaatctgtgcaaaaagttcacaattttactatctcaaaaaaaaaaaaaaacgcagctttggatttcattaattttttttctattgtttgacccttttctatttcattgattttcattcttctttttactgtgtttatccttctttggacttattttctgttctttttctagctacttaaggtggattttggatcttctttaacgtatgcatttttaaaggtataaaatttgccactgtgcatactgtttaaacactgcatcttacagattttggtattttgtgttcatttttactctgctctgaatcttttctaatttctgtgagccagaatatgatctgtcttggtggatgttcaatgtttatattctgctgttgttgggtgacatattctataaattttgatcagattatattgatggctgattatattcacatcttctgtagttttaatggtattctctccaatcagaggagtgttgatgtctccaactataattgttaattcatctctttctccttgtaggtctctcagattttgcttcatgtttgctggaagttgttttgttaggtacatatacatttaggattacatctttctggttaattccccctttaacaacatgtaatgtgactctgtattatctggtaattttctttcacctgaagtctgctgtatttgataataatggtaacgacatcatcatctttcttttccaacatcttaggaaaagtttcatttatacagccaggttgaaagtatttcattgatttcctgtaaacttacttcctagatttttttcattgtcatatttttcattttcatgtttcctttattacattcctatttatgtactaatctttatctatcagtacatctttttatgcatttcatagtaaattgcatacatcatttcatttatctcaaatgctttagcaggtgtatcattagctaaagttcaatatttatgtgttttcctttttatgtaaaaggaaatttacttaaaatgaaaggcaaaaatcttgtgtacatttgtttttgaataatatgtggtgtatattttctcattatttttttctagtaattttgttcccccacaattttatcgtgaaatttgtaaatatatggagagaattgtaaacatgaacacgaatgtacctaccatgtagcttcttcatttcttaacatgttgctgtatttgctttattacatatctgtcttatctatgcatccatcaaccattttattcgtccctgctctaatctgtattatttccttttattctctagctagggtttagtttgtgcttccttttctggttccttaaggtgtaaagttaggttcttgattgtgatctttcttcttttctactgtatgcctttatcgctgtaaatcctcttcttagtactgttttctctacgtcccatatgttttgtattttgtgttttaactttcatttgtctcaaagtgttttctaattttccttgtgatcttttacttgatcctttagttacttatttaatttccacatatttgtgttctttccagttgtcttctgttatggattttttgttgcattcccttgtgactggaaaagatacttcagtctctttatatttattaaggcttttttgtgcctgattatatggtctgtccttgagaatgtgcacttgagagaaaatgtatagtctaccattgttgagtggagtgttctttatatgtctgttaggtctattttttttttttttttaaagacacagtgtcttgctctgttgctcaggctggagtgcagtgacgtgatcatagctcactgtagcctcgaactcctgggctcaagtgatcctcctgcctccgccccttgagtagctgggaccataggtgcatgccaccaccccagctaatttttttaaactgttttacagaggcagggtcttacagtgttgcccaggttggtctccaactcctggcctcaagtgatcctcctgccttggcttcctaaagtggtggaattaaggcatgaaacactgtggccagctccaattggtttatagtgttattcgagtcctatatttccttaattatctttgtctacttgttttacgcttttattgatattgggctatttatgtctccaactgtttctctctttttttgttttagttttcccctactacactgatgtatatttctccttttagttctttcagtgctttcttcatatgtcttggtgctctgttgtttgttgtatttatgtttataattacattttttgagaacctggctttattatcaatacataatatcctatttgtctcttgtaacagtttctgacttaaagtctattttgtctgatgtctatatagtcatctcagctctcttttggttgttatttgcatggaatgtcttttactattctttcactttcagtttatttgtgtctttagatctaaagcgaaccttttttagataaccagtatttggatcattttttaaaaattattatgtccatctatgtctttttgatccaggagtttaatccatttacacttgaggtaagtagtgataaataaggatttacttctgccattttgtgttttcctttttcattttgttcattattttgttcattatttcctccattactgctttcttttgtgtttggttaattttttgcagtgacatattttgattcccatctcactttcatttttgtatattctatattttctttgtggttatcatggagattacatataacatcctaaagttatgagagtcttacttgaattgatgtgaacttaacttcagttgcatacaaaaattctactcttccacagctccattcccctgtatattatgtggtgactctgttacaattattgatatcacaaattacatttttatacatgtcgtgaatggtaacatatattcataattgtattttatgcttttgtcttttaaatcctaaagaaagtaaaaagtgaggttatgaaacaaaattttgtgatactaggttttatatttgcccctgtatgtatctcttctaggagatctttatttctttatatggctttgagttacttctagcatcctttcatttcaacccaaagacttccctgtaggaagcattttttatagggcaggtctagttttaacaaattcatttggcttaggagtgtcttaacttgttcctctattttgaaggataattttgctgggtatagaatcctcagctgatgcctggcacagtagctcacccctgtaatcccagcactttgggagaccgaggcgggaggatcacttgaggccaggagcttaagaccagactgggcaacatagtgagaccttgtctttacaaaaaattaaaaaattatctggatgtggtggcacacacttgtggtctaagctacttgagaggttggaggattgctttagccaggggttcgaggatacagtaagctatgattatgccattgtactatagcctggatgacagagtgagatgctgtgtctattttttaaaaaagaaaaaagaatcctcagctaactttttttttcattcatcactttgaaatatattgtcacactgccttctggcctctaaagtttttgatgagaaattaggtgatgatcttattgaagtttttttgtatgtgttgacttgcttctctcttgctgctttcaatattctctttgtctttggccttcgacagtttgtgtgtaatgtgttttgatctatacgtatttgagtttatcccagtttgagttcattcctgtatttgtagatttaagtctctctccttcaatttgggaagttttccacaattatttcatcaaataattgttgcttctttctttttcttttctccttctgtgactctcgtaatacataagatgttcttcatgatggtttccctcccatccctttttgtttcttcactttagtttttttttttccctttttgatcttcggacttgaggatttcagttaatatcttcatattcactgattcttctgcctgctcaaatctgctattcatcctcttttgattgggccatattttcctatttggctgtatctttgtgattttttttaatactttaagttctagggtacatgtgcacaatgtgcaggtttgttacataggtatacatgtgccatgttggtttgctgcacccatcaactcgtgtgattttttaaaattgcatattgtgtatttgactgttgtaacttggcaactctgcatatgaggttctctcccttttcaagggtttgctgggattttaaaatatatataaattgtagtagacctattgttttaagactcccccacattattttttcaaagagtgttcttgttgtgtgtcatcagtaaagtctctgtccctttcattcatgttcaactaatgttttgaaagatttttttgaacgtctgctgggtgtggtggctcacgcccataatcccagcactttgggaggccaaggcaggcggatcacctggattcaggagttcgagaccagcctagccaacatggtgaaatcctatttctactaaaaatacaaaaaatttagccagacatggtggcacgtgcctgcaatcccagctactcgggaggctgaggcacaagaattgcttgaacccgggaggcagaggttgcagtgagccaagattgcgccattgcattccagcctgggcgacagagcaagactccatctcaaaaaataaaagaaggctttttttttttaatgcctgctctctctgtttgtagattgattgtgctggtgcactcctttaatccataactaggcttccactaaacctaaagataagcctgaggggaaaacttaagattttaataaagatcttttctgagcatgtattttacctggacacacatatggctttctgaattatcctatatacctggttgcttttgagtgtcccaaatttaaaagtagctgcgtgtggtggctcatacctgtagtcccagcaactctggaggctgaggtaggaggatagcttgagcccagttgtgtgaggccagcctgggcaacattgtgagaccctgtttctacaaaaataaagactagttgggcgtggtggtgcacacctatagtcccagctacttgggcggttgaggtggctagatcggttgaggtggctagatcggttgaggtggctggatcaattcaacccaggagttcagtgctgcagtgagctataattacaccacagcactccagccttggtgacaaagcaagaccctgtatcttgaaaaaaaaaattccaaaagtgtcctatctctagctatttgggccttaggtggtgttttgggagtgttcccctgtaatgccttgccccaggcctgtagtcacgttgcagttgttttgtgtgtgtgtgtgtgtgtgtgttttaaagctgttcttgttgtccttctcaccagagctctgagttaggtgaagaaatgatgagagccttatgtcagtccttcaagtatccttcagacaggttagataaaatttacacaataatttgtaaataacatctgctttgctccctctggtttgtgggaggatactgggaaacagggtgctgctgctttgagactaaaaccttcaccttctggtaggtggtggggcaaggacaagtaaaaatgctgtaaaacgttcctattgtattgaaggtgactttttttctttttcgttattttagagacagggtcttgctatgttgcctgggttagcctcaaattcttgggttcaagcgattctcctgtctaggcctagttgtttgtactacaggcggtcaccaccatgcctggctaagatgttgttttcttgattgggtatttgcttggttgctgtaaacctttgactgtgttccagagctctgacaaagttggttcagaaagtttctacttgtttacaaaatagttctgtgtgggaactggagtttggagcttcctaatctattgttttgttgatatctacattttcccttcttttttttttttgttttttttttggagacagtcttactctgtcacccagcttggaatgatgcagtagcatgatcactgtagcctggaattcctgggctcaagcaattctcccacttcagccttctgagtagctagaagtacaggagcaagctaatctcttcatttttgaaagttgttttccctgggtatagaattctaaattgatactttaaaaaaatctctttaaagatgttacttctttgtgacattttgtttgttatctttctcctttttccttcatctttgctcctctgcatgtgccttttatttcttggaaagatagtcttaaaagatttttcagtattttaagattttctgttaatgtctggctttcggaaattgaagatttttattttctttgtttatcctgctctgggttccttgaacttgttggatctgtgagtttatagtttcatcaaatttttgttggtttgttttagagacagggtcttactctgttgcccatgctagagtgcagtggtacgataattggtcactgtaacctcaaactcctgggctcaagagatactcttgcctcagcttctggagtggctaggactagaggcatgccctattgctaatttttaaacttttcgtagaaacaaggtcttgctatgttgcccaagctggcctcaaacttgtgacctcaagtgatcctcacaccttggcctcccaaagatcttggattacaggtgtgagctaccatatccagcttccatcaaatttttggaaagttcacatcattattttttgaaataatttttttctgttctatttttctttgggacttatatattatgctctttaatattgttccataggtttcttattttcccccctctgtttcattttggatagtttttcttgctttgtcttcaattttgttgatcttttcttctgcactattatgatattaatccacttagtgaattacagtgtactataattttcatcactaggaattccatttagttttttgaaatatcttctatttttgttttcattgtgttcatgttttcagtgtttgggcattttttttttttttttttctgagatggaggctcgctctatcacccaggctggagtgcagtggtgcgatctctctgctcactggaacctccgcctcctgggttcaagcgattctcctgcctcagcctcctgagtagctgggactacaggcgtgtgccaccatgcccagctaattttttatatatttttagtagagacgaggtttcaccacgttgcccaggctggtctgaaactcctgagctcaagcgattcacctacctctgcctcccaaagtgctgggattacaggtgtgagccaccacacccggcctatttgggcatttttaatcagctgtctcactttacttgtctgcctatttcattatttctgttacttcttgtcccatttttgttgactcttttttcccctggttattcttcatattttttttcttcttgacaaacctagtaatgttttattaaaaagttcagtttaattttgaagcttttaaaaaagcctggttaatgcgtttcttcaatactctttaatttatgaattgctttgacccactgctaagatttggtctcttcgtggtctctactgaatgccctgggttataaacgaagaggctactgtgcctcctctgaaatcgaatgcctcccagcaccatgtgatcactgggagctgtttagctcacagcttcttggtcatgctctgcctggcctcacaaagtttcactcctcatgtgtgcattttaatgttcagctatgactcaaagtgaatcctgtcttgattttgagttctttttgtgtagctcttttttctttgtagttctgccccacaacttcagtcatctcagcctgacctttgtttcttcaacttgatatatctccagtgctctccttgggaatcccttttccctgatccttcaggcaccaattcaaggggaatataggggtcttgttggttttcctactctgagggatcagggtcccgtggtgtctttatttaatgactgaaaaaaatttttttcatatattttgcctacttttctacttgattacagcaggaaggtaaacctggttcctaataaaccatcatgactggaagcagaagtttggctcaaccttttaatattttggtcatatgattttttttcctttattttcccttcaattcagatatgggagatatttcatgtctgtatttatttttactacaccttaagtgattatttgtcctaagtttttctcctatttcattgctgtgtatttatcattttttaaaatttcagcttttagtttagatacggggtgggggggtacatgtacaggtttgttactaggtatattgtgtgatgctcaggtttgggatgtggatcccatcaccgtggtagtgaacatagtacccaatagttgttcagcctatgccctcttccttccctccccctccagtagttcatagtgtctattgttcccatgttgatgtccatgtgtgctcagtgtttagttcccacttgggagaacatgtggtatttggttttctgttcctatgtgaatttgcttagatttatagcctccagctgcctccaagttgctgtagaggacatgattttcttctttatggctgcatagtattccgtggtgtatatgtaccacattttgtttacctaatccaccattcatggtcacctaggctgattacatgtctttgctattgtgaatagcatggcaatgaacttatgagtacttgtgtcttttttggaagaattatttattttcctttgggtatatacccagtattattagttaaataaagtttccttatattatagcttgagtgcataaacacatctacttagtcactaataggcagatgatttctttttaacttatctcctcctacatttaggatgaagatacactaatcctcaatcctgaagacaacacttaataacaaaagtatcatcaagtcactgatgaacatatggttcagaaatcttaattaaagccttgtatattagttttttttattgtggcattaaaatgtaccacacacttaacctcttaagacaaacttatttgtctcacgggtcaggaagttgggaatagcttagtgagcgtggctctactgggttttctgcttagtttcccaccaagccgaaattaagatgttaactagagttttgctttcatctaagactttgtatccttttccaactcacttgttggtagaatttagttcctttcagttattacacttaggtccttagctactagagttctctctccacaacatggcagattgtttcatctttgagatcaatagaaaagcatttcagtcatttaaagggctcactttaattaggtcaggctcacctagaatatctcccttttgattaaatcagagtcagcttattagtgggccaattatgcgaatgatagcccaatcatatttacaggtctcaaccatactcagaaggtgaggggattatgcagggtgtttatatcagatgacggtaattctggggccattttaggattctgtgtaccacaccttgtaaacaggacaagacatttagggaattttccatttttatataatggctttaccccagtgatatgaagctactacatatccaggctaggacacagtaataatttagtgaatacttagcctatgccagatactttgcatacattgccttattcagtctccagaacaaccttgtggaaactattgataatcattcccagtttgcagattcagacacagaagctaagagggtttaggtagcttgatgaaatggaatttgggtctgaatggcctatgctatttttacttcaccacactgtttctcagcgttaatcttggtttgtatatcacaattttatgtaagtacaatatctattcagataatttactgcaaatctgtgacttatttgtagttttttggatgtgacaatgatcgtatggttttacaaagaggaagtgtccttttaaagagacatttacaaacattttatagatgacattgcatattttcttgtgttcgcttcaaaatgatttgtgggatctggggaactggacaatgggtaaaatgctgtcagtgaaacaaaactggccttaagttgataattttctttttcttttgagacggagtctcactctgtcgcccaggctagagtgcagtggcgcaatcacggctctccgcaacctccacctctcaggttcaagcgattctcctgcctcagcctcctgagtagctgggactataggcgcgcgccactgcgcttggctaattttgttgttgttattgtatttttagtagagatgggatttcaccatattgaccaggttggtctcaaactcctgacctcatgatccacccaccttggcctcccaaagtgctgggattacaggcatgagtgaccgtgcccggccttaagttgataatttttgaagctgagtgatgggtaataggatttattattctcttccatctacttttgtgtatgtttgaaaatttctatattgaacattaacaaattcatttgttaactagttttaattgtaaataagaaaaaagtgcctaaaattttatttcttcaccattgtaatttttgttttttaatttttttttaaagttttttttgtttgtttgtgttttttttttttttttttttgagatggagctttgctctttcacccaggctggaatgaagtggcacgatctcggctcattgcaacctccgctgccaggttcaatccattctcctgtctcggcctccagagtagctgggattacaggcgcccgccaccagcctggctaatttttgtatattttgtagagacagggtttcaccatgttggccaggctggtcttgaactcttgacctcaggcgatccatccccctcagcctaccaaagtgttaggattataggagtgagccaccgtgcccaactgcgtaatgtttttatgattttaaaatcacgagtttctatttttttttcatggaaccataaaactgtttatcacaagcatttattttactaaactagtattttgtaatgtttaagagcatggactcgggggatcaaccctctgggtaaatctcagtgtcatgatactcaatagtcgtatgaccttgtgcaggttactttacttctctgtccctcagttttttcatctgtcaaatggtaatacttgtacctatcttgcgtagttactgaatatactatgtaacggatagagattaggataagacagcaaaaaatatatgcacacacacacttgttacctgtgtgcatatattatatctacttaagttttattctaaataaggagcttgtgataattgtttccgttttgtaattagaaggtattatatgttcctatcatgatttttgagcctgtggttctgaaaccagtgtttctaaatatttttttcttttcacatcatgtatttacagtgtttttcagtggtagtcatgttgacatcctgagtcgcacagttcttgtttgggactgtcttcttcctcctccttccttcttcctccttcttctttcttcttcctcctccttcctcctccttccttcttcttcctcctccttcttcctccttcctcctccttccttcttcttccttcttcttttttcttcctcctccttcctccttcttccttctccttcctccttccttcttccttcttccttcttcttcttctttcttcttcttcctcctcctcctccctcctcctccctccttcctcctccttccacctccttcctccttcctgcttcctcctcctcctccttcttccttctccttcttcttccttctttcttctttttttttttttggcatagcaaccaacaacagggaacactgcttttttcacaactctgtgtaataaatgttgttgaaatatccagggtgagatctgttgagctaaattactgacattatcagagtgatttaaaattttttggagagttttgattttagaagacataaaaccctgggctctgtcctggctttattgaagcaaaatagtagtgtattagttctgagattgggtaatttataaagaaaagagttttcattgactcacggttttgcaggctgtgcaggaaatatagtggcttctgcttccggggaggcctcaggaagcttccaatcatggcagaaagcaaagggggagtgaggcacctcacatggtgggagcaggagcaagagagtgagggagaggtgctgcacagttttaaacaactggatcttgtgagaactcgctcactgtcacaagaatagcaccaaaggggatggtgttaaaccattcatgagaaatccaccttcatgatccagccacctcccaccaggccccacctccaacattggggattacaattaacatgagatttggtggggacacagatccaaatcataccaattggatttgtggtgtgggagtaaatgtgtctatattttggaaaatctcccttggtaagactgaccattgcttgaatgatttctttgagcttaactatcaacaactccttttcttgtaggtgatagaaattgaagatgcttcacccaccaagtgtccaataacaaccaagttggttttagatgaagatgaagaaaccaaagaacctttagtgcaggttcatagaaatatggttatcaaattgaaaccccatcaagtagatggtaagaaactattagatgattcaataatttttagttaaatttttaccaatatttgggtgtgaggcagctgcctcacatcctgctaagtcctggaggtaaattggtgagtggggtggggaatccacaattcccctgcctttatggagctcataaacaaatgaggaagaacaaaattgggtgatttcaaacacaatgagcgttataaaaagagaaagaagtgctacttacaaatgggtagatatagcaagtaggtttcacctaattagcaaagactggcctaagggcagctaggggttgggaagagctgtagctagctaaaagcctttttcagaaaatgctatttcagcatttttaggtatgttttctttattagagttgaatcagtaagtcagttttgagtgtttatgtgaattaatcataagggaggttctgtagttcctaccttttgagttgctagtcccctttcttgctcagtgtttactatcgaataaaggaaaagatgatgaaattatctcatgggtttttttttcctgattgactcaataaactcaaaggtatttttgataggaagccattctctttttggataaagttgctctctttttacaaaaattattattattattttttgagatggagtctcgctctgtcactcaggctggagtacagtggtgctataacagctcactgcaatctctgcctcctggcctcaagtgattctcccaactcagcctcctgagtatctgggactacaggtgcacaccaccaccacgcccagctaattttttgtattttagtagagacggggtttcaccatgttggccaggctggtctcgaactcctgacctcaagtgatctacccgcctcggccttccaaagtgcttggattacaggcgtgagccactgtgcccggccacgtttctcttttagagtattcttatgtttctttgaaccatctcagggaatacagaacatctactgtggatagcttagagaagatgaaggaaagtccccctgttctatgtttgtgttaacttgtttctgctttagtttggtgggaaaaaatcccatttagatgtaagaaattatttagctaagtgtttttttaatgctgtttcttagaagttttggttatgtttttgatgtgtttatgtaaaggaagtttttaacttggacctttaaatttaacttaatgaagctgttatttttaggtgttcagtttatgtgggattgctgctgtgagtctgtgaaaaaaacaaagaaatctccaggttcaggatgcattcttgcccactgtatgggccttggtaagactttacaggtaagagctgaagaatatgaaggtatcctgtttttgtggattcattaatatatattggattctattatgtttcaggcacagtcgtaggggctgaagataaagcagtgaacaagaataacaagatctgtctccaaggagcttatattctagtggaggagagagctgctaatca

SEQ ID NO: 10888 - DNA, 461 bp, Homo sapiens
tgctgagagggagcgtgagcgagaaaaattgagagaggtgatagaaattgaagatgcttcacccaccaagtgtccaataacaaccaagttggttttagatgaagatgaagaaaccaaagaacctttagtgcaggttcatagaaatatggttatcaaattgaaaccccatcaagtagatggtgttcagtttatgtgggattgctgctgtgagtctgtgaaaaaaacaaagaaatctccaggttcaggatgcattcttgcccactgtatgggccttggtaagactttacaggtaagagctgaagaatatgaaggtatcctgtttttgtggattcattaatatatattggattctattatgtttcaggcacagtcgtaggggctgaagataaagcagtgaacaagaataacaagatctgtctccaaggagcttatattctagtggaggagagagctgctaatca

SEQ ID NO: 10889 - DNA, 1021 bp, Homo sapiens
atttctatatgatgggtttcttttgtaatcctatttgttttatgtgtttcaaaacgatattccaagagaatttataagcttctctacactgccaaaagtgtttatgtcacaagtaagattaaaactcctaatctagaaacttggttgatatagacaatttttgtgtctttaaccatatttcttttgatcaggtgtgggcaataatagtgaaggtggaagaggaaaggcaggtgcaaagcttttccaagattttcagatgttaagtagaatatggactcatccttggtgtttgcagctagactacattagcaaagaaaataaggtaagtcaggtaacttagtttaaaagcatctattggaagcagaataaacttagacaaaaaattgacctacagactgtatattcaaattttctattgctttgttctattctatgtcttatttctaatttctatatgtcttgcatgtattatgattataggagtgttaaatgttattttattgagcccattttaaaaaactttttattttgaaataattttatacttatagaaaagttgcaaaaatagttctgagaattcccctatacctttgacccagtttcttctaatatcagcatgttgcattagtatagtaaagttatcaaaactaagaaattaactttggtacaatactattaactaaatggcagactttatttggatttcttcaatgtttttacttatgtcttttttgttttccatgatccaatctaggacctcccattgcatttagtaagcatatctgtcctgtcttctttgtctactaaaatctgtaatagttcctcagtccttcctcagctcgtgccaattaacttattcttaaatgaacatcaatataatttccagtgtaagttgagatattctattaaaatagtggtcatttttttttctctagggttattttgatgaagacagtatggatgaatttatagcctcagattctgatgaaacctccatgagtttaagctccgatgattatac

SEQ ID NO: 10890 - DNA, 408 bp, Homo sapiens
atttctatatgatgggtttcttttgtaatcctatttgttttatgtgtttcaaaacgatattccaagagaatttataagcttctctacactgccaaaagtgtttatgtcacaagtaagattaaaactcctaatctagaaacttggttgatatagacaatttttgtgtctttaaccatatttcttttgatcaggtgtgggcaataatagtgaaggtggaagaggaaaggcaggtgcaaagcttttccaagattttcagatgttaagtagaatatggactcatccttggtgtttgcagctagactacattagcaaagaaaataagggttattttgatgaagacagtatggatgaatttatagcctcagattctgatgaaacctccatgagtttaagctccgatgattatac

SEQ ID NO: 10891 - DNA, 10455 bp, Homo sapiens
ctcggcccaacaaaatggcggcggcagcggtgtcgctttgtttccgcggctcctgcggcggtggcagtggtagcggcctttgagctgtggggaggttccagcagcagctacagtgacgactaagactccagtgcatttctatcgtaaccgggcgcgggggagcgcagatcggcgcccagcaatcacagaagccgacaaggcgttcaagcgaaaacatgaccgctgagcccatgagtgaaagcaagttgaatacattggtgcagaagcttcatgacttccttgcacactcatcagaagaatctgaagaaacaagttctcctccacgacttgcaatgaatcaaaacacagataaaatcagtggttctggaagtaactctgatatgatggaaaacagcaaggaagagggaactagctcttcagaaaaatccaagtcttcaggatcgtcacgatcaaagaggaaaccttcaattgtaacaaagtatgtagaatcagatgatgaaaaacctttggatgatgaaactgtaaatgaagatgcgtctaatgaaaattcagaaaatgatattactatgcagagcttgccaaaaggtacagtgattgtacagccagagccagtgctgaatgaagacaaagatgattttaaagggcctgaatttagaagcagaagtaaaatgaaaactgaaaatctcaaaaaacgcggagtgctgtggtgaatatccttatatttgattccttgtgcacatgtgggagaaaatctccaaagaattacctagttttgtttaattcttgagcgatgtatgcaccaaagcacatagaagatacttaaagatgggcttcatgggattgtgagctgcactgcttgtggacaacaggtcaatcattttcaaaaagattccatttatagacacccttcattgcaagttcttatttgtaagaattgctttaagtattacatgagtgatgatattagccgtgactcagatggaatggatgaacaatgtaggtggtgtgcggaaggtggaaacttgatttgttgtgacttttgccataatgctttctgcaagaaatgcattctacgcaaccttggtcgaaaggagttgtccacaataatggatgaaaacaaccaatggtattgctacatttgtcacccagagcctttgttggacttggtcactgcatgtaacagcgtatttgagaatttagaacagttgttgcagcaaaataagaagaagataaaagttgacagtgaaaagagtaataaagtatatgaacatacatccagattttctccaaagaagactagttcaaattgtaatggagaagaaaagaaattagatgattcctgttctggctctgtaacctactcttattccgcactaattgtgcccaaagagatgattaagaaggcaaaaaaactgattgagaccacagccaacatgaactccagttatgttaaatttttaaagcaggcaacagataattcagaaatcagttctgctacaaaattacgtcagcttaaggcttttaagtctgtgttggctgatattaagaaggctcatcttgcattggaagaagacttaaattccgagtttcgagcgatggatgctgtaaacaaagagaaaaataccaaagagcataaagtcatagatgctaagtttgaaacaaaagcacgaaaaggagaaaaaccttgtgctttggaaaagaaggatatttcaaagtcagaagctaaactttcaagaaaacaggtagatagtgagcacatgcatcagaatgttccaacagaggaacaaagaacaaataaaagtaccggtggtgaacataagaaatctgatagaaaagaagaacctcaatatgaacctgccaacacttctgaagatttagacatggatattgtgtctgttccttcctcagttccagaagacatttttgagaatcttgagactgctatggaagttcagagttcagttgatcatcaaggggatggcagcagtggaactgaacaagaagtggagagttcatctgtaaaattaaatatttcttcaaaagacaacagaggaggtattaaatcaaaaactacagctaaagtaacaaaagaattatatgttaaactcactcctgtttccctttctaattccccaattaaaggtgctgattgtcaggaagttccacaagataaagatggctataaaagttgtggtctgaaccccaagttagagaaatgtggacttggacaggaaaacagtgataatgagcatttggttgaaaatgaagtttcattacttttagaggaatctgatcttcgaagatccccacgtgtaaagactacacccttgaggcgaccgacagaaactaaccctgtaacatctaattcagatgaagaatgtaatgaaacagttaaggagaaacaaaaactatcagttccagtgagaaaaaaggataagcgtaattcttctgacagtgctatagataatcctaagcctaataaattgccaaaatctaagcaatcagagactgtggatcaaaattcagattctgatgaaatgctagcaatcctcaaagaggtgagcaggatgagtcacagttcttcttcagatactgatattaatgaaattcatacaaaccataagactttgtatgatttaaagactcaggcggggaaagatgataaaggaaaaaggaaacgaaaaagttctacatctggctcagattttgatactaaaaagggcaaatcagctaagagctctataatttctaaaaagaaacgacaaacccagtctgagtcttctaattatgactcagaattagaaaaagagataaagagcatgagtaaaattggtgctgccagaaccaccaaaaaaagaattccaaatacaaaagattttgactcttctgaagatgagaaacacagcaaaaaaggaatggataatcaagggcacaaaaatttgaagacctcacaagaaggatcatctgatgatgctgaaagaaaacaagagagagagactttctcttcagcagaaggcacagttgataaagacacgaccatcatggaattaagagatcgacttcctaagaagcagcaagcaagtgcttccactgatggtgtcgataagctttctgggaaagaggagagttttacttctttggaagttagaaaagttgctgaaactaaagaaaagagcaagcatctcaaaaccaaaacatgtaaaaaagtacaggatggcttatctgatattgcagagaaattcctaaagaaagaccagagcgatgaaacttctgaagatgataaaaagcagagcaaaaagggaactgaagaaaaaaagaaaccttcagactttaagaaaaaagtaattaaaatggaacaacagtatgaatcttcatctgatggcactgaaaagttacctgagcgagaagaaatttgtcattttcctaagggcataaaacaaattaagaatggaacaactgatggagaaaagaaaagtaaaaaaataagagataaaacttctaaaaagaaggatgaattatctgattatgctgagaagtcaacagggaaaggagatagttgtgactcttcagaggataaaaagagtaagaatggagcatatggtagagagaagaaaaggtgcaagttgcttggaaagagttcaaggaagagacaagattgttcatcatctgatactgagaaatattccatgaaagaagatggttgtaactcttctgataagagactgaaaagaatagaattgagggaaagaagaaatttaagttcaaagagaaatactaaggaaatacaaagtggctcatcatcatctgatgctgaggaaagttctgaagataataaaaagaagaagcaaagaacttcatctaaaaagaaggcagtcattgtcaaggagaaaaagagaaactccctaagaacaagcactaaaaggaagcaagctgacattacatcctcatcttcttctgatatagaagatgatgatcagaattctataggtgagggaagcagcgatgaacagaaaattaagcctgtgactgaaaatttagtgctgtcttcacatactggattttgccaatcttcaggagatgaagccttatctaaatcagtgcctgtcacagtggatgatgatgatgacgacaatgatcctgagaatagaattgccaagaagatgcttttagaagaaattaaagccaatctttcctctgatgaggatggatcttcagatgatgagccagaagaagggaaaaaaagaactggaaaacaaaatgaagaaaacccaggagatgaggaagcaaaaaatcaagtcaattctgaatcagattcagattctgaagaatctaagaagccaagatacagacataggcttttgcggcacaaattgactgtgagtgacggagaatctggagaagaaaaaaagacaaagcctaaagagcataaagaagtcaaaggcagaaacagaagaaaggtgagcagtgaagattcagaagattctgattttcaggaatcaggagttagtgaagaagttagtgaatccgaagatgaacagcggcccagaacaaggtctgcaaagaaagcagagttggaagaaaatcagcggagctataaacagaaaaagaaaaggcgacgtattaaggttcaagaagattcatccagtgaaaacaagagtaattctgaggaagaagaggaggaaaaagaagaggaggaggaagaggaggaggaggaggaagaggaggaggaagatgaaaatgatgattccaagtctcctggaaaaggcagaaagaaaattcggaagattcttaaagatgataaactgagaacagaaacacaaaatgctcttaaggaagaggaagagagacgaaaacgtattgctgagagggagcgtgagcgagaaaaattgagagaggtgatagaaattgaagatgcttcacccaccaagtgtccaataacaaccaagttggttttagatgaagatgaagaaaccaaagaacctttagtgcaggttcatagaaatatggttatcaaattgaaaccccatcaagtagatggtgttcagtttatgtgggattgctgctgtgagtctgtgaaaaaaacaaagaaatctccaggttcaggatgcattcttgcccactgtatgggccttggtaagactttacaggtggtaagttttcttcatacagttcttttgtgtgacaaactggatttcagcacggcgttagtggtttgtcctcttaatactgctttgaattggatgaatgaatttgagaagtggcaagagggattaaaagatgatgagaagcttgaggtttctgaattagcaactgtgaaacgtcctcaggagagaagctacatgctgcagaggtggcaagaagatggtggtgttatgatcataggctatgagatgtatagaaatcttgctcaaggaaggaatgtgaagagtcggaaacttaaagaaatatttaacaaagctttggttgatccaggccctgattttgttgtttgtgatgaaggccatattctaaaaaatgaagcatctgctgtttctaaagctatgaattctatacgatcaaggaggaggattattttaacaggaacaccacttcaaaataacctaattgagtatcattgtatggttaattttatcaaggaaaatttacttggatccattaaggagttcaggaatagatttataaatccaattcaaaatggtcagtgtgcagattctaccatggtagatgtcagagtgatgaaaaaacgtgctcacattctctatgagatgttagctggatgtgttcagaggaaagattatacagcattaacaaaattcttgcctccaaaacacgaatatgtgttagctgtgagaatgacttctattcagtgcaagctctatcagtactacttagatcacttaacaggtgtgggcaataatagtgaaggtggaagaggaaaggcaggtgcaaagcttttccaagattttcagatgttaagtagaatatggactcatccttggtgtttgcagctagactacattagcaaagaaaataagggttattttgatgaagacagtatggatgaatttatagcctcagattctgatgaaacctccatgagtttaagctccgatgattatacaaaaaagaagaaaaaagggaaaaaggggaaaaaagatagtagctcaagtggaagtggcagtgacaatgatgttgaagtgattaaggtctggaattcaagatctcggggaggtggtgaaggaaatgtggatgaaacaggaaacaatccttctgtttctttaaaactggaagaaagtaaagctacttcttcttctaatccaagcagcccagctccagactggtacaaagattttgttacagatgctgatgctgaggttttagagcattctgggaaaatggtacttctctttgaaattcttcgaatggcagaggaaattggggataaagtccttgttttcagccagtccctcatatctctggacttgattgaagattttcttgaattagctagtagggagaagacagaagataaagataaaccccttatttataaaggtgaggggaagtggcttcgaaacattgactattaccgtttagatggttccactactgcacagtcaaggaagaagtgggctgaagaatttaatgatgaaactaatgtgagaggacgattatttatcatttctactaaagcaggatctctaggaattaatctggtagctgctaatcgagtaattatattcgacgcttcttggaatccatcttatgacatccagagtatattcagagtttatcgctttggacaaactaagcctgtttatgtatataggttcttagctcagggaaccatggaagataagatttatgatcggcaagtaactaagcagtcactgtcttttcgagttgttgatcagcagcaggtggagcgtcattttactatgaatgagcttactgaactttatacttttgagccagacttattagatgaccctaattcagaaaagaagaagaagagggatactcccatgctgccaaaggataccatacttgcagagctccttcagatacataaagaacacattgtaggataccatgaacatgattctcttttggaccacaaagaagaagaagagttgactgaagaagaaagaaaagcagcttgggctgagtatgaagcagagaagaagggactgaccatgcgtttcaacataccaactgggaccaatttaccccctgtcagtttcaactctcaaactccttatattcctttcaatttgggagccctgtcagcaatgagtaatcaacagctggaggacctcattaatcaaggaagagaaaaagttgtagaagcaacaaacagtgtgacagcagtgaggattcaacctcttgaggatataatttcagctgtatggaaggagaacatgaatctctcagaggcccaagtacaggcgttagcattaagtagacaagccagccaggagcttgatgttaaacgaagagaagcaatctacaatgatgtattgacaaaacaacagatgttaatcagctgtgttcagcgaatacttatgaacagaaggctccagcagcagtacaatcagcagcaacagcaacaaatgacttatcaacaagcaacactgggtcacctcatgatgccaaagcccccaaatttgatcatgaatccttctaactaccagcagattgatatgagaggaatgtatcagccagtggctggtggtatgcagccaccaccattacagcgtgcaccacccccaatgagaagcaaaaatccaggaccttcccaagggaaatcaatgtgattttgcactaaaagcttaatggattgttaaaatcatagaaagatcttttatttttttaggaatcaatgacttaacagaactcaactgtataaatagtttggtccccttaaatgccaatcttccatattagttttactttttttttttttaaatagggcataccatttcttcctgacatttgtcagtgatgttgcctagaatcttcttacacacgctgagtacagaagatatttcaaattgttttcagtgaaaacaagtccttccataatagtaacaactccacagatttcctctctaaatttttatgcctgcttttagcaaccataaaattgtcataaaattaataaatttaggaaagaataaagatttatatattcattctttacatataaaaacacacagctgagttcttagagttgattcctcaagttatgaaatacttttgtacttaatccatttcttgattaaagtgattgaaatggttttaatgttcttttgactgaagtctgaaactgggctcctgctttattgtctctgtgactgaaagttagaaactgagggttatctttgacacagaattgtgtgcaatattcttaaatactactgctctaaaagttggagaagtcttgcagttatcttagcattgtataaacagccttaagtatagcctaagaagagaattcctttttcttctttagtccttctgccattttttattttcagttatatgtgctgaaataattactggtaaaatttcagggttgtggattatcttccacacatgaattttctctctcctggcacgaatataaagcacatctcttaactgcatggtgccagtgctaatgcttcatcctgttgctggcagtgggatgtggacttagaaaatcaagttctagcattttagtaggttaacactgaagttgtggttgttaggttcacaccctgttttataaacaacatcaaaatggcagaaccattgctgactttaggttcacatgaggaatgtacttttaacaattcccagtactatcagtattgtgaaataattcctctgaaagataagaatcactggcttctatgcgcttcttttctctcatcatcatgttcttttaccccagtttccttacatttttttaaattgtttcagagtttgttttttttttagtttagattgtgaggcaattattaaatcaaaattaattcatccaatacccctttactagaagttttactagaaaatgtattacattttattttttcttaatccagttctgcaaaaatgacctataaatttattcatgtacaattttggttacttgaattgttaaagaaaacattgtttttgactatgggagtcaactcaacatggcagaaccatttttgagatgatgatacaacaggtagtgaaacagcttaagaattccaaaaaaaaaaaaaaaaaaaaaaaaaagaaaactgggtttgggctttgctttaggtatcactggattagaatgagtttaacattagctaaaactgctttgagttgtttggatgattaagagattgccatttttatcttggaagaactagtggtaaaacatccaagagcactaggattgtgatacagaatttgtgaggtttggtggatccacgcccctctcccccactttcccatgatgaaatatcactaataaatcctgtatatttagatattatgctagccatgtaatcagatttatttaattgggtggggcaggtgtgtatttactttagaaaaaatgaaaaagacaagatttatgagaaatatttgaaggcagtacactctggccaactgttaccagttggtatttctacaagttcagaatattttaaacctgatttactagacctgggaattttcaacatggtctaattatttactcaaagacatagatgtgaaaattttaggcaaccttctaaatctttttcaccatggatgaaactataacttaaagaataatacttagaagggttaattggaaatcagagtttgaaataaaacttggaccactttgtatacactcttctcacttgacattttagctatataatatgtactttgagtataacatcaagctttaacaaatatttaaagacaaaaaaatcacgtcagtaaaatactaaaaggctcatttttatatttgttttagatgttttaaatagttgcaatggattaaaaatgatgatttaaaatgttgcttgtaatacagttttgcctgctaaattctccacattttgtaacctgttttatttctttgggtgtaaagcgtttttgcttagtattgtgatattgtatatgttttgtcccagttgtatagtaatgtttcagtccatcatccagctttggctgctgaaatcatacagctgtgaagacttgcctttgtttctgttagactgcttttcagttctgtattgagtatcttaagtactgtagaaaagatgtcacttcttcctttaaggctgttttgtaatatatataaggactggaattgtgtttttaaagaaaagcattcaagtatgacaatatactatctgtgttttcaccattcaaagtgctgtttagtagttgaaacttaaactatttaatgtcatttaataaagtgaccaaaatgtg

SEQ ID NO: 10892 - DNA, 8188 bp, Homo sapiens
acaactgatggagaaaagaaaagtaaaaaaataagagataaaacttctaaaaagaaggatgaattatctgattatgctgagaagtcaacagggaaaggagatagttgtgactcttcagaggataaaaagagtaagaatggagcatatggtagagagaagaaaaggtgcaagttgcttggaaagagttcaaggaagagacaagattgttcatcatctgatactgagaaatattccatgaaagaagatggttgtaactcttctgataagagactgaaaagaatagaattgagggaaagaagaaatttaagttcaaagagaaatactaaggaaatacaaagtggctcatcatcatctgatgctgaggaaagttctgaagataataaaaagaagaagcaaagaacttcatctaaaaagaaggcagtcattgtcaaggagaaaaagagaaactccctaagaacaagcactaaaaggaagcaagctgacattacatcctcatcttcttctgatatagaagatgatgatcagaattctataggtgagggaagcagcgatgaacagaaaattaagcctgtgactgaaaatttagtgctgtcttcacatactggattttgccaatcttcaggtatgcaaaaataaataaaaaattcataatttgtacttccccctcttgagttactacattgtttaatttcctctgaagctaatcaaatttagggttactacttaggagaataccacttaaaaattatttaggagtttattaaaaaaagtttccctatttatttttatgctgccattggaagatattttgaacattgctagtattcagtatcagggatctcaaatttgttgagtaaatgacaaaatttctttatcaatgtttagtgcttttctctggagtaatgagcagaaggaaaagcggactggtgccagtggttcagtagctatttagttatataatggaagtgagtgcttggtactggtatgacatggtgtgtcaaaattttaactgccatgcatatggctttttaagtttgaacagataactttgtgtctcatgaaatcccctttaattatttttaatttacctcattaaaaccctttgttgatgcttattaactagtttctaatgacatgaacagatgtttttcttttaaaaacactgtcaaaatgaaggaagaaaatccaaacattagctggattagcctaccctgatgaggtagagtactaggaacattaaagtttgggtcagctggtgaatgaaaatatttttatgaattaattaaaatctttaaaatttatgaaaaataattttaaaaataagtttttattattgaagttattttaaaaatcagttgtataataaatgtgtattggtcatttgtctttttttttagtcagtaagacctgtcagttctatggatactcagaatttatttaaaaatgtttataaagtgggttttacataaaattgtatttccaacataggtagaatttaaaaatttttccttccagttcttatgttacagttttcaatttatcccaattggattttaatggaattaatttgaatcttggctattttttaaattttaatttttaattttgtagagatgaggtcttgctatgttacccaggctgatcttgaactcctggcatcaagcaatccttccacctcggccttccaaagtgttggaattacaggcatgagctactgtgcccagcaaaatcttgttttttaataaaactttacatttcttttatggagtacttatgacttgacttgaaaaccacatgtgatatgcagtgtgtgtgtttcaattgaatgctctgctatatcagatgactagatggagctctgtttgtgtggctattgtaacttcaagttcacagtttcttacctgaaattcttggggtctgttgtgtttcagaatttgcaactttttggtttttagaaaaataatagagagaagttactatatattttataaaagctccagtggggcctgatgcagcaccagataatcaaacacatagtatttctgcagcaaaacatttgaagattcacatttaaaggaataagcagtttagaccaggttttgctgccagattgtctttggtaccctcttacagaaactttccattttgagagtgttttagatttcaaaattatatataagggattgtggacttatattaaaaatacagaatctaatatttactttgatgtcaaatcaatgttttagttgttaggttagctgtgaaaatccttattaaggattagagtttaagaataataaattgtgtttaaaaattagttaaaatccattaaaaattatatgtcactgagctaattttatttctggttttatttatttggatcttctctctttttttcttagtctggctatttttaaactttggaaaattggtttctgtgattaaacagtttcactggtgaaatcagtatgtttgatttcaagtattttactacttttcttaagatctcacttgatttattgatacctatgaaagtttctgttatgcacctctcatgttgagaattattaatatttagtgtaataattaatatgaattcattaggccttaagaagggatggtgatatatggcaaatactcaattgatgcatctcttgataattacttatctcagcactgatctagatcactgtgttccattttgatttatttaactttgatctgaaggacaaataggctgatggggagtaaactttttctcaggtgtgtatcaagagaaactttgagaattcgtcacttcagcaaattccaatccttcaactgcttggtgaaataagccttgttgagattttctttaccctggatatttttgggggctaagctgattatttgggatgaaataagaaagaagataaatttgttagggaatttaacctgtgaaaaattgggccttgtcaatagaaacaagtagaatagaatatgagtgccttgaaaataagcgctgtaaaaagttctgtttttaaagataagtttgcgtgtgagccagtgttatgatattccttcagaatttacttacatgcttatgtaagcatgctgaatttatgtactcctctgtctaacttaattttaggtcacagttttagaaggttaaaagaaaaaccctgccccctattgagtttagaggattccagtttattcgcagtatttgggtatcatattacagctacagtattttcctagaaattggggcttggtaatggcatgaataaccaagatgaagaacatggtcctaggagattgcagtttaatgcaagacagacatagagaaatcattaaaaaaagtaacagaagaaagatataaaactagaatggggcctgtaatcccagcactttgggaggccaaggtgggtggattatctgaggtcagtagttcaaaaccagcctggccaacatggtgaaaccccatctctactaaaaatacaaaaaaattagccaggtgtagtggcgcacacctgtaatcccagctacttgggaggctgaggcaggagaatcgcttgaacccaggagatggagattgcagtgagccacgatcgcgccactgcacttgagcctgggcgacagagcgagactccgtctcaaaacagaaacagcaacaaacacaacaaactataatggggctacacaataaatggcaagtgaactacttaaatatttggggaaatatttagaagaatagttggcatttgaacttcaaaggataggtcaaattttgaaaggtgtagtaaagagggagtgacagtactgttactaattatatttcatttgaagattggtctgtttgaatgagatatttattgtgagtttgctgggatattatgaaatctcttctctctctctgtctgtctcttttttttttttttgagttgaagtctcactctgccacccaggctggagtgcagtggtgcaatctcggctcactgcaatccctgctcactgcaacctctgccttccgggttcaagcgattctcatgcctcaggctcctgggtagctgagattacaggtgcatgccaccacattggctaatttttgtattttcagtagagacagggtttctccatgttggccaggctggcctcgagctcctgacctcaagtgatccgcctgcctcagcctctcaaaatgctggcattacaagcttgagccaccacgcctggccttatttagtgtatttctatcctgagcctgtaggtgtctgtttcctttatagattttttcctccatttcccttcaacattttattgtgaaaaacatttaagtatacaccaaagcatctaccattaatattatactgtattttcttgataacatatctatatatccttctgtctatccatcagtatatcttttttttgcctttttagctttttattttgcataattataaatccacagaaatttgtaaaaaaaaaaaaaaatacagggaggtctcagataacctttacttagtttccctcaagggtaatatcttgtaactctagtacagtgtcaaaaccagaaaactgaagatttattcagatttcaccagtttcacatgcactcatttgtgtgtgtataagtatagttcagtgcagttgtaccacgtgtgtatctttgtataatcaccaccacaaccgatatatcaaaccagttccattatcacaaggctcccttgtgatactgctgtccttacctccattcctgacatctggcaactagtaatctgttctttatcactgtaattttgctattttgaaatggaatcatgaagtatataaccttttgagattggcttttttcacttagtataatacccttaaaatctttgatgcatttcagattaaacggtagacatcagcatacttctcctgaaacacttaagcatgcatagtattaacctacagtttaatatttcagtttttcttttgaagtaaaatttatatagaatgaaatgcccaaatcttaacctctttagattttttttttttttttgagagagttgttacccaggctggagtgccgtggtgcgatcttggcttactgaaacctccgcctcccaggttcaagtgattctcctgcctcagcctccctagtagctgggattacaggcacacaccaccatggctggttaatttttgtgtttttagtagagacgggattttgccatgttggccaggctggtctggaactcctgacctcaggtgatccgcttgccttggcttcccaaagtgctgggattacaggcgtgcgccacctcacccggccctctttagatttttaatcaaaatatagaaatgcagctttttataagaaaataagttttactgtactgaactgtatctctgggtaactcaggtcacaaataccatacacattcaactgcattttaaaattacttgctactaccaaaatattaatactgtttttgctattcctcgaagatacagcaccagttaacgtcaaaattaaaatggaccagtacgaaggttattgtggcaagaaacttatgctaatatgatggctgttgatacagaattgttactgagaagggtggactttaaaagccttgtgccctgggaaggaactctgaaatatataaggtccagctatttatcattttactgctggcacttcacaaataacctgttatgttttctataagaatgctttttactcatattttggagtccagagtttagaccccacttagtttgctttaaagtttttggctttcagttttattttacatggttttaattatatagcttatttaaagctaattttaagtacacttttttccctcaaggagatgaagccttatctaaatcagtgcctgtcacagtggatgatgatgatgacgacaatgatcctgagaataggtatgattccatctgtaaggactttaaaaagattataacacaccctaggcatgggcacaaacagcagcaacggaacagcaagcaggttgtaaaaaccaggagtgcctgccttagaaagactcgctcacagtcttcctgcaagtttgaaagaaaggccagaaaatgggctaaaactcagaaaccttaagagaaagtaatatcattatttacacacctagcatagggtgtgttataaatacagaactgtcaattttatgttgctatgtaaactgcagtaatttttttggaataatttattttgacagattattgatgaaagtaaatcatatctcagtaaattggtaacaacagacatctcctctatatttgactattgttaattgccatccaatatggtggtcctatttattaaggcctgttgagaagaaacaaaaagagagattactcagatatttaagattaagaaattgctttcaaaataagtgtcagtttacaaggtatctagactgagttagagtttaaccagttttcaaataaaatagaaatacacggtatgagagcatttactttaataagacttaataggtttaaatgtcaacagtgtagcctatacagatatacttaagtaaggggtggctgggtgaagaaaaaaaaagacactatcagtgtagtgaagaataaggaaaacaacagtattaaagactatagctataatgtttcaacataacttttaaacacttcctggacaatagcataccccatgctcataatcttcaacaagaagacagcatggtatagtgcatggaattttggaataatgggcataagggtatctgatttctaacatttttaacaactgtctgtgtcatcatgggcaagtgactttactttttgtcaaaaatttactatatttaagaagaaaaagttgggcgaaattttctgtaattctagtaccaaaaaatccatgatagatttgagatgatttcattaaagagcactacattaaccattcatttattcctaatagtaagttctaacattaagaaaacataaaaatatacatgtaattttctgtcataattttgtaagaaattaactgacttagtaaatgccctgggttcagctgttagtttcgctcttttgtatcttgctgatgctgttaggtttctctgtttcaaaggtcagcattctgctaattaacagaagaatgtttttattaaggtgaatgaacagttttattttacagttttgaatagagcttaattgtggacacaaatattcagattctgcttgcctacttttttaaattaaaaaatgtatatccatttattttatgggataggtggtaggttccagaatggagtgataagggcatacaatttattcatcagggattttacattatatcatcacagccagatactgaaagcatttaaaattttactcttttttaagatgctttaatttttcttcatttatatttgctatttgattttctatacatcatgaggcctcagatgttactcaaaggctaataatgttttaaacattctatatcttaatttaactgtgaatgatttactttaatttcatatttaaccaccaaataagagtgttgttaaggtataatttttttgtgtgtgttagagcttgtcaaaatataaatatcattttcaacttttaagttacctgatcgtatctctctgtaactggcaagtattttattggaaagtatctttaattccaccttgaatttgtgattaaaaaatacaaccctgttgagtacttttgagaagaattgaattttatcttgagcatgtctttctatactcagtttaatttgtttttataaaatatacaatttattaacttgtttaatattcactataccaaagaggtatctaatacccatgggttatgtagtcatgatggggatacaaatactttcttgcactattttagtatagattatatatttgagcatatttgaatatgcactaagcaacttaaaaaattcatttgcagatcacgattaagtcttagaattatttttctaacttcctaatttttgagtaggttgtattttggtagacagcatattgtaattgtatgtaaatttgtacacaattgtgtgtaaattgtgtataaatcttatatgctttgtctttttagcagtattgtaatacattttcagtgttggtgtttatgaagcgatagtgtattattgcaaatggttaactatttggatgcaataaatttttgtaaacctttt

SEQ ID NO: 10893 - DNA, 2967 bp, Homo sapiens
acaactgatggagaaaagaaaagtaaaaaaataagagataaaacttctaaaaagaaggatgaattatctgattatgctgagaagtcaacagggaaaggagatagttgtgactcttcagaggataaaaagagtaagaatggagcatatggtagagagaagaaaaggtgcaagttgcttggaaagagttcaaggaagagacaagattgttcatcatctgatactgagaaatattccatgaaagaagatggttgtaactcttctgataagagactgaaaagaatagaattgagggaaagaagaaatttaagttcaaagagaaatactaaggaaatacaaagtggctcatcatcatctgatgctgaggaaagttctgaagataataaaaagaagaagcaaagaacttcatctaaaaagaaggcagtcattgtcaaggagaaaaagagaaactccctaagaacaagcactaaaaggaagcaagctgacattacatcctcatcttcttctgatatagaagatgatgatcagaattctataggtgagggaagcagcgatgaacagaaaattaagcctgtgactgaaaatttagtgctgtcttcacatactggattttgccaatcttcaggagatgaagccttatctaaatcagtgcctgtcacagtggatgatgatgatgacgacaatgatcctgagaataggtatgattccatctgtaaggactttaaaaagattataacacaccctaggcatgggcacaaacagcagcaacggaacagcaagcaggttgtaaaaaccaggagtgcctgccttagaaagactcgctcacagtcttcctgcaagtttgaaagaaaggccagaaaatgggctaaaactcagaaaccttaagagaaagtaatatcattatttacacacctagcatagggtgtgttataaatacagaactgtcaattttatgttgctatgtaaactgcagtaatttttttggaataatttattttgacagattattgatgaaagtaaatcatatctcagtaaattggtaacaacagacatctcctctatatttgactattgttaattgccatccaatatggtggtcctatttattaaggcctgttgagaagaaacaaaaagagagattactcagatatttaagattaagaaattgctttcaaaataagtgtcagtttacaaggtatctagactgagttagagtttaaccagttttcaaataaaatagaaatacacggtatgagagcatttactttaataagacttaataggtttaaatgtcaacagtgtagcctatacagatatacttaagtaaggggtggctgggtgaagaaaaaaaaagacactatcagtgtagtgaagaataaggaaaacaacagtattaaagactatagctataatgtttcaacataacttttaaacacttcctggacaatagcataccccatgctcataatcttcaacaagaagacagcatggtatagtgcatggaattttggaataatgggcataagggtatctgatttctaacatttttaacaactgtctgtgtcatcatgggcaagtgactttactttttgtcaaaaatttactatatttaagaagaaaaagttgggcgaaattttctgtaattctagtaccaaaaaatccatgatagatttgagatgatttcattaaagagcactacattaaccattcatttattcctaatagtaagttctaacattaagaaaacataaaaatatacatgtaattttctgtcataattttgtaagaaattaactgacttagtaaatgccctgggttcagctgttagtttcgctcttttgtatcttgctgatgctgttaggtttctctgtttcaaaggtcagcattctgctaattaacagaagaatgtttttattaaggtgaatgaacagttttattttacagttttgaatagagcttaattgtggacacaaatattcagattctgcttgcctacttttttaaattaaaaaatgtatatccatttattttatgggataggtggtaggttccagaatggagtgataagggcatacaatttattcatcagggattttacattatatcatcacagccagatactgaaagcatttaaaattttactcttttttaagatgctttaatttttcttcatttatatttgctatttgattttctatacatcatgaggcctcagatgttactcaaaggctaataatgttttaaacattctatatcttaatttaactgtgaatgatttactttaatttcatatttaaccaccaaataagagtgttgttaaggtataatttttttgtgtgtgttagagcttgtcaaaatataaatatcattttcaacttttaagttacctgatcgtatctctctgtaactggcaagtattttattggaaagtatctttaattccaccttgaatttgtgattaaaaaatacaaccctgttgagtacttttgagaagaattgaattttatcttgagcatgtctttctatactcagtttaatttgtttttataaaatatacaatttattaacttgtttaatattcactataccaaagaggtatctaatacccatgggttatgtagtcatgatggggatacaaatactttcttgcactattttagtatagattatatatttgagcatatttgaatatgcactaagcaacttaaaaaattcatttgcagatcacgattaagtcttagaattatttttctaacttcctaatttttgagtaggttgtattttggtagacagcatattgtaattgtatgtaaatttgtacacaattgtgtgtaaattgtgtataaatcttatatgctttgtctttttagcagtattgtaatacattttcagtgttggtgtttatgaagcgatagtgtattattgcaaatggttaactatttggatgcaataaatttttgtaaacctttt

SEQ ID NO: 10894 - DNA, 628 bp, Homo sapiens
aattctcctgcctgagcctcggcccaacaaaatggcggcggcagcggtgtcgctttgtttccgcggctcctgcggcggtggcagtggtagcggcctttgagctgtggggaggttccagcagcagctacagtgacgactaagactccagtgcatttctatcgtaaccgggcgcgggggagcgcagatcggcgcccagcaatcacagaagccgacaaggcgttcaagcgaaaacatgaccgctgagcccatgaggtaaaacgcaaccccgtctcatgggccccagcggtctgggcccaggcaccgtctgagtcgggtgtttgggaaggcgttcgcttggtgggttaggcctgtgtgttgcttagccgaaagaggcatcgttttctctttagtgaaagcaagttgaatacattggtgcagaagcttcatgacttccttgcacactcatcagaagaatctgaagaaacaagttctcctccacgacttgcaatgaatcaaaacacagataaaatcagtggttctggaagtaactctgatatgatggaaaacagcaaggaagagggaactagctcttcagaaaaatccaagtcttcaggatcgtcacgatcaaagaggaaaccttcaattgtaa

SEQ ID NO: 10895 - DNA, 18924 bp, Homo sapiens
tgaaaatgatgattccaagtctcctggaaaaggcagaaagaaaattcggaagattcttaaagatgataaactgagaacagaaacacaaaatgctcttaaggaagaggaagagagacgaaaacgtattgctgagagggagcgtgagcgagaaaaattgagagaggtaactaatttctttcttcttctttttcttttgtagctacagggtcttgctctgttgcccaggctggcctcgaactcttgggctcaagtgatcctcctaccttggcctcctaaacttctgggattacaggcgtgagtcaacacacccagccttaatttatttctattaatgatttattttatttggtatatgacttcaatatatttcagcattttaagagtagaatgttgtaatctaccacagatttcttttttttagacggagtctggctctgttacccaggctggattgcagtggcatgatctcagctcactgcaacctttgcctcctgggttcatgtgattcttgtgcctcagcctcccaagtggccgggactacaggcatgcactaccacacccagctaatttttgtattttttagtagagttggggtttcaccatgttggccaggctggtcttgtgctcctgacctcaagtgatccacctgcctcagcctcccaaagtactgggattacatgtgtgagccaccttgcccagcctcaaccacaggatttctagttgcaattgatttttcctactgtcactatttcatgcaacttaaaatagtcattaagctttattaatttaattaagtgcatggaaagcattgagattcttgaatgatcaccaaaatggttatgttgtattttgggtagagaaatgtttcaaaattacttcttaaatccataaaagatttcagttttttaaatggactttatgttacaaaagttttcaaattcacaggtggagagaataatataataattctccctggatctattaactcagtttcagcagttactaacacaggacgagtcttgtttcatcttttttttttttttttttttttttttttttgagatggagtttcactcttgtcacccaggctggagtgcagtggcccaatctcggctcactgcaacctccacctcctgggttcaagtgattctcctgtctcagcctcctgagtatctgagattacaggtgcacgccaccatgcctggccgtttcatctattctttttccttcagattatttcagagcaaatctcagaaatcatattctgtttataaatagttgggaatgtattgttaaaagataatggtattttaaacattactgcagtgccattattaaactgaattctctcattgcctcacatagtagttttaaaaaatagttggtatgggcctggcgcggtggctcacgcctgtaatcccaacactttgggaggctgaggcgggtggatcacctgaggtcaggtgttggagaccagcctggccaacatggtgaaaccccgtctctactaaaaatacaaaaaaaattagccaggtatggtggtgcacgcctgtgatctcagcctcttgggaggctgagacaggagaattgcttgaacctgggaggcagagcttgcagtgagccagggttgcaccattgcactttagtctgggtgacaagagcaaaactctgtctcaaaaaaaaaaaatagttggtttgaatcagggtcttaacaagggccatctgcatattctgttgtatttggatgttacatctcttacctaattttaacctagtttctctttggttctttctttttctttacccattcttacagttcatttgcttaagaaaccagattatttttgtaaaattttctatattctgagttttgttatttgcatccctgtggtacagtttcactggcttctatatttcgtataaattggtaataagatctagagtcctgatcagatttagattcagttctctttttggtagaaatactcatgggcagtaatatgtacttccttttggatctcattaagaggtactttaaaactgcttgtccctttttttgtggtacagctcctctaactttgttccactttttcagaatctttttggatattctcagttctttgcatttccacatagtattacgttgttggtttttacaaaaatccctgtggaatttctgttggaattttgttgaatctttcttgtaatgtggccagaagacatcttaacagtgttttgtctcctgttacatgaatatagtgtacttctctatttatttaccttctctttaatttctcttaggaatgttttgtagttttctctgtacaggtctagtacatattttaaaaaatttatccccaagtaattcctgatttttgatgttacattgtattagtccattttcacgctgctaataaagacatacccaagactgggcaatttataaaagaaagagttttattggacttatagttccatgtggcttggggaggcctcacaatcatggtggaaggtaaaaggcacatttcacattgtggcagacgagaagaacttgtgcagggaaactcctctttttaaaactatagatcttgtgagacttattcactatcacaagaacagcacaggaaagacctgcccccgtgattcaattacctcccactgggtccgtcccacaacatgtgggaattcaagatgagatttgggtggggacacagccaagccatatcatatagtaaatgtagtttcacgtaatgttggcataatgaccttgtgtcctaagctctaaatttacttactcgttatagtagcttttttgataaattctttgtgactttcatgtatacgtttgtgttgtctgtaaagaaaaactattttgctaattccattccaatctgtcatttatttttttaaaattataaatggtgaatttcttcaaatgcttttcattgcatctgttggagtgacctagaaaatgtcttgtattccttgaataaaccttgcttagtcacgttatattactccttttatatattgtattgcatttgctgatccttccttccttccttcctcccttccttccttccttcctttctttctttctttttctttctttcaagatagggtcttgctctgtctctcaggctagagtgctatagtgtgatcatagctcactgcagcctcaaactcctgggctcaagcaatcctcttgcctcagctttccaagtagctgggacaacaggcatgtaccaccatacctggttaattttttattttagagattgggtctcattatgctacccaggctggtcttgaccccctggcctcaagtggtcctctcccatcagcctcccaaagtgctgtgactatagtagggagcctccacacctggcatattccatttctttaatacatgtagaactatttagatcttttctttttctttaggtctgttttggtaaatttcaaacttaaggaatttttccatttcatttaagtagtcaaattatttatgtaaatttgtttatagtctttcattatactttgtaggttctgtcatttattgtttctgttaggaatttgtgttttatcattttttccttgattaatctgtgcaaaaagttcacaattttactatctcaaaaaaaaaaaaaaacgcagctttggatttcattaattttttttctattgtttgacccttttctatttcattgattttcattcttctttttactgtgtttatccttctttggacttattttctgttctttttctagctacttaaggtggattttggatcttctttaacgtatgcatttttaaaggtataaaatttgccactgtgcatactgtttaaacactgcatcttacagattttggtattttgtgttcatttttactctgctctgaatcttttctaatttctgtgagccagaatatgatctgtcttggtggatgttcaatgtttatattctgctgttgttgggtgacatattctataaattttgatcagattatattgatggctgattatattcacatcttctgtagttttaatggtattctctccaatcagaggagtgttgatgtctccaactataattgttaattcatctctttctccttgtaggtctctcagattttgcttcatgtttgctggaagttgttttgttaggtacatatacatttaggattacatctttctggttaattccccctttaacaacatgtaatgtgactctgtattatctggtaattttctttcacctgaagtctgctgtatttgataataatggtaacgacatcatcatctttcttttccaacatcttaggaaaagtttcatttatacagccaggttgaaagtatttcattgatttcctgtaaacttacttcctagatttttttcattgtcatatttttcattttcatgtttcctttattacattcctatttatgtactaatctttatctatcagtacatctttttatgcatttcatagtaaattgcatacatcatttcatttatctcaaatgctttagcaggtgtatcattagctaaagttcaatatttatgtgttttcctttttatgtaaaaggaaatttacttaaaatgaaaggcaaaaatcttgtgtacatttgtttttgaataatatgtggtgtatattttctcattatttttttctagtaattttgttcccccacaattttatcgtgaaatttgtaaatatatggagagaattgtaaacatgaacacgaatgtacctaccatgtagcttcttcatttcttaacatgttgctgtatttgctttattacatatctgtcttatctatgcatccatcaaccattttattcgtccctgctctaatctgtattatttccttttattctctagctagggtttagtttgtgcttccttttctggttccttaaggtgtaaagttaggttcttgattgtgatctttcttcttttctactgtatgcctttatcgctgtaaatcctcttcttagtactgttttctctacgtcccatatgttttgtattttgtgttttaactttcatttgtctcaaagtgttttctaattttccttgtgatcttttacttgatcctttagttacttatttaatttccacatatttgtgttctttccagttgtcttctgttatggattttttgttgcattcccttgtgactggaaaagatacttcagtctctttatatttattaaggcttttttgtgcctgattatatggtctgtccttgagaatgtgcacttgagagaaaatgtatagtctaccattgttgagtggagtgttctttatatgtctgttaggtctattttttttttttttttaaagacacagtgtcttgctctgttgctcaggctggagtgcagtgacgtgatcatagctcactgtagcctcgaactcctgggctcaagtgatcctcctgcctccgccccttgagtagctgggaccataggtgcatgccaccaccccagctaatttttttaaactgttttacagaggcagggtcttacagtgttgcccaggttggtctccaactcctggcctcaagtgatcctcctgccttggcttcctaaagtggtggaattaaggcatgaaacactgtggccagctccaattggtttatagtgttattcgagtcctatatttccttaattatctttgtctacttgttttacgcttttattgatattgggctatttatgtctccaactgtttctctctttttttgttttagttttcccctactacactgatgtatatttctccttttagttctttcagtgctttcttcatatgtcttggtgctctgttgtttgttgtatttatgtttataattacattttttgagaacctggctttattatcaatacataatatcctatttgtctcttgtaacagtttctgacttaaagtctattttgtctgatgtctatatagtcatctcagctctcttttggttgttatttgcatggaatgtcttttactattctttcactttcagtttatttgtgtctttagatctaaagcgaaccttttttagataaccagtatttggatcattttttaaaaattattatgtccatctatgtctttttgatccaggagtttaatccatttacacttgaggtaagtagtgataaataaggatttacttctgccattttgtgttttcctttttcattttgttcattattttgttcattatttcctccattactgctttcttttgtgtttggttaattttttgcagtgacatattttgattcccatctcactttcatttttgtatattctatattttctttgtggttatcatggagattacatataacatcctaaagttatgagagtcttacttgaattgatgtgaacttaacttcagttgcatacaaaaattctactcttccacagctccattcccctgtatattatgtggtgactctgttacaattattgatatcacaaattacatttttatacatgtcgtgaatggtaacatatattcataattgtattttatgcttttgtcttttaaatcctaaagaaagtaaaaagtgaggttatgaaacaaaattttgtgatactaggttttatatttgcccctgtatgtatctcttctaggagatctttatttctttatatggctttgagttacttctagcatcctttcatttcaacccaaagacttccctgtaggaagcattttttatagggcaggtctagttttaacaaattcatttggcttaggagtgtcttaacttgttcctctattttgaaggataattttgctgggtatagaatcctcagctgatgcctggcacagtagctcacccctgtaatcccagcactttgggagaccgaggcgggaggatcacttgaggccaggagcttaagaccagactgggcaacatagtgagaccttgtctttacaaaaaattaaaaaattatctggatgtggtggcacacacttgtggtctaagctacttgagaggttggaggattgctttagccaggggttcgaggatacagtaagctatgattatgccattgtactatagcctggatgacagagtgagatgctgtgtctattttttaaaaaagaaaaaagaatcctcagctaactttttttttcattcatcactttgaaatatattgtcacactgccttctggcctctaaagtttttgatgagaaattaggtgatgatcttattgaagtttttttgtatgtgttgacttgcttctctcttgctgctttcaatattctctttgtctttggccttcgacagtttgtgtgtaatgtgttttgatctatacgtatttgagtttatcccagtttgagttcattcctgtatttgtagatttaagtctctctccttcaatttgggaagttttccacaattatttcatcaaataattgttgcttctttctttttcttttctccttctgtgactctcgtaatacataagatgttcttcatgatggtttccctcccatccctttttgtttcttcactttagtttttttttttccctttttgatcttcggacttgaggatttcagttaatatcttcatattcactgattcttctgcctgctcaaatctgctattcatcctcttttgattgggccatattttcctatttggctgtatctttgtgattttttttaatactttaagttctagggtacatgtgcacaatgtgcaggtttgttacataggtatacatgtgccatgttggtttgctgcacccatcaactcgtgtgattttttaaaattgcatattgtgtatttgactgttgtaacttggcaactctgcatatgaggttctctcccttttcaagggtttgctgggattttaaaatatatataaattgtagtagacctattgttttaagactcccccacattattttttcaaagagtgttcttgttgtgtgtcatcagtaaagtctctgtccctttcattcatgttcaactaatgttttgaaagatttttttgaacgtctgctgggtgtggtggctcacgcccataatcccagcactttgggaggccaaggcaggcggatcacctggattcaggagttcgagaccagcctagccaacatggtgaaatcctatttctactaaaaatacaaaaaatttagccagacatggtggcacgtgcctgcaatcccagctactcgggaggctgaggcacaagaattgcttgaacccgggaggcagaggttgcagtgagccaagattgcgccattgcattccagcctgggcgacagagcaagactccatctcaaaaaataaaagaaggctttttttttttaatgcctgctctctctgtttgtagattgattgtgctggtgcactcctttaatccataactaggcttccactaaacctaaagataagcctgaggggaaaacttaagattttaataaagatcttttctgagcatgtattttacctggacacacatatggctttctgaattatcctatatacctggttgcttttgagtgtcccaaatttaaaagtagctgcgtgtggtggctcatacctgtagtcccagcaactctggaggctgaggtaggaggatagcttgagcccagttgtgtgaggccagcctgggcaacattgtgagaccctgtttctacaaaaataaagactagttgggcgtggtggtgcacacctatagtcccagctacttgggcggttgaggtggctagatcggttgaggtggctagatcggttgaggtggctggatcaattcaacccaggagttcagtgctgcagtgagctataattacaccacagcactccagccttggtgacaaagcaagaccctgtatcttgaaaaaaaaaattccaaaagtgtcctatctctagctatttgggccttaggtggtgttttgggagtgttcccctgtaatgccttgccccaggcctgtagtcacgttgcagttgttttgtgtgtgtgtgtgtgtgtgtgttttaaagctgttcttgttgtccttctcaccagagctctgagttaggtgaagaaatgatgagagccttatgtcagtccttcaagtatccttcagacaggttagataaaatttacacaataatttgtaaataacatctgctttgctccctctggtttgtgggaggatactgggaaacagggtgctgctgctttgagactaaaaccttcaccttctggtaggtggtggggcaaggacaagtaaaaatgctgtaaaacgttcctattgtattgaaggtgactttttttctttttcgttattttagagacagggtcttgctatgttgcctgggttagcctcaaattcttgggttcaagcgattctcctgtctaggcctagttgtttgtactacaggcggtcaccaccatgcctggctaagatgttgttttcttgattgggtatttgcttggttgctgtaaacctttgactgtgttccagagctctgacaaagttggttcagaaagtttctacttgtttacaaaatagttctgtgtgggaactggagtttggagcttcctaatctattgttttgttgatatctacattttcccttcttttttttttttgttttttttttggagacagtcttactctgtcacccagcttggaatgatgcagtagcatgatcactgtagcctggaattcctgggctcaagcaattctcccacttcagccttctgagtagctagaagtacaggagcaagctaatctcttcatttttgaaagttgttttccctgggtatagaattctaaattgatactttaaaaaaatctctttaaagatgttacttctttgtgacattttgtttgttatctttctcctttttccttcatctttgctcctctgcatgtgccttttatttcttggaaagatagtcttaaaagatttttcagtattttaagattttctgttaatgtctggctttcggaaattgaagatttttattttctttgtttatcctgctctgggttccttgaacttgttggatctgtgagtttatagtttcatcaaatttttgttggtttgttttagagacagggtcttactctgttgcccatgctagagtgcagtggtacgataattggtcactgtaacctcaaactcctgggctcaagagatactcttgcctcagcttctggagtggctaggactagaggcatgccctattgctaatttttaaacttttcgtagaaacaaggtcttgctatgttgcccaagctggcctcaaacttgtgacctcaagtgatcctcacaccttggcctcccaaagatcttggattacaggtgtgagctaccatatccagcttccatcaaatttttggaaagttcacatcattattttttgaaataatttttttctgttctatttttctttgggacttatatattatgctctttaatattgttccataggtttcttattttcccccctctgtttcattttggatagtttttcttgctttgtcttcaattttgttgatcttttcttctgcactattatgatattaatccacttagtgaattacagtgtactataattttcatcactaggaattccatttagttttttgaaatatcttctatttttgttttcattgtgttcatgttttcagtgtttgggcattttttttttttttttttctgagatggaggctcgctctatcacccaggctggagtgcagtggtgcgatctctctgctcactggaacctccgcctcctgggttcaagcgattctcctgcctcagcctcctgagtagctgggactacaggcgtgtgccaccatgcccagctaattttttatatatttttagtagagacgaggtttcaccacgttgcccaggctggtctgaaactcctgagctcaagcgattcacctacctctgcctcccaaagtgctgggattacaggtgtgagccaccacacccggcctatttgggcatttttaatcagctgtctcactttacttgtctgcctatttcattatttctgttacttcttgtcccatttttgttgactcttttttcccctggttattcttcatattttttttcttcttgacaaacctagtaatgttttattaaaaagttcagtttaattttgaagcttttaaaaaagcctggttaatgcgtttcttcaatactctttaatttatgaattgctttgacccactgctaagatttggtctcttcgtggtctctactgaatgccctgggttataaacgaagaggctactgtgcctcctctgaaatcgaatgcctcccagcaccatgtgatcactgggagctgtttagctcacagcttcttggtcatgctctgcctggcctcacaaagtttcactcctcatgtgtgcattttaatgttcagctatgactcaaagtgaatcctgtcttgattttgagttctttttgtgtagctcttttttctttgtagttctgccccacaacttcagtcatctcagcctgacctttgtttcttcaacttgatatatctccagtgctctccttgggaatcccttttccctgatccttcaggcaccaattcaaggggaatataggggtcttgttggttttcctactctgagggatcagggtcccgtggtgtctttatttaatgactgaaaaaaatttttttcatatattttgcctacttttctacttgattacagcaggaaggtaaacctggttcctaataaaccatcatgactggaagcagaagtttggctcaaccttttaatattttggtcatatgattttttttcctttattttcccttcaattcagatatgggagatatttcatgtctgtatttatttttactacaccttaagtgattatttgtcctaagtttttctcctatttcattgctgtgtatttatcattttttaaaatttcagcttttagtttagatacggggtgggggggtacatgtacaggtttgttactaggtatattgtgtgatgctcaggtttgggatgtggatcccatcaccgtggtagtgaacatagtacccaatagttgttcagcctatgccctcttccttccctccccctccagtagttcatagtgtctattgttcccatgttgatgtccatgtgtgctcagtgtttagttcccacttgggagaacatgtggtatttggttttctgttcctatgtgaatttgcttagatttatagcctccagctgcctccaagttgctgtagaggacatgattttcttctttatggctgcatagtattccgtggtgtatatgtaccacattttgtttacctaatccaccattcatggtcacctaggctgattacatgtctttgctattgtgaatagcatggcaatgaacttatgagtacttgtgtcttttttggaagaattatttattttcctttgggtatatacccagtattattagttaaataaagtttccttatattatagcttgagtgcataaacacatctacttagtcactaataggcagatgatttctttttaacttatctcctcctacatttaggatgaagatacactaatcctcaatcctgaagacaacacttaataacaaaagtatcatcaagtcactgatgaacatatggttcagaaatcttaattaaagccttgtatattagttttttttattgtggcattaaaatgtaccacacacttaacctcttaagacaaacttatttgtctcacgggtcaggaagttgggaatagcttagtgagcgtggctctactgggttttctgcttagtttcccaccaagccgaaattaagatgttaactagagttttgctttcatctaagactttgtatccttttccaactcacttgttggtagaatttagttcctttcagttattacacttaggtccttagctactagagttctctctccacaacatggcagattgtttcatctttgagatcaatagaaaagcatttcagtcatttaaagggctcactttaattaggtcaggctcacctagaatatctcccttttgattaaatcagagtcagcttattagtgggccaattatgcgaatgatagcccaatcatatttacaggtctcaaccatactcagaaggtgaggggattatgcagggtgtttatatcagatgacggtaattctggggccattttaggattctgtgtaccacaccttgtaaacaggacaagacatttagggaattttccatttttatataatggctttaccccagtgatatgaagctactacatatccaggctaggacacagtaataatttagtgaatacttagcctatgccagatactttgcatacattgccttattcagtctccagaacaaccttgtggaaactattgataatcattcccagtttgcagattcagacacagaagctaagagggtttaggtagcttgatgaaatggaatttgggtctgaatggcctatgctatttttacttcaccacactgtttctcagcgttaatcttggtttgtatatcacaattttatgtaagtacaatatctattcagataatttactgcaaatctgtgacttatttgtagttttttggatgtgacaatgatcgtatggttttacaaagaggaagtgtccttttaaagagacatttacaaacattttatagatgacattgcatattttcttgtgttcgcttcaaaatgatttgtgggatctggggaactggacaatgggtaaaatgctgtcagtgaaacaaaactggccttaagttgataattttctttttcttttgagacggagtctcactctgtcgcccaggctagagtgcagtggcgcaatcacggctctccgcaacctccacctctcaggttcaagcgattctcctgcctcagcctcctgagtagctgggactataggcgcgcgccactgcgcttggctaattttgttgttgttattgtatttttagtagagatgggatttcaccatattgaccaggttggtctcaaactcctgacctcatgatccacccaccttggcctcccaaagtgctgggattacaggcatgagtgaccgtgcccggccttaagttgataatttttgaagctgagtgatgggtaataggatttattattctcttccatctacttttgtgtatgtttgaaaatttctatattgaacattaacaaattcatttgttaactagttttaattgtaaataagaaaaaagtgcctaaaattttatttcttcaccattgtaatttttgttttttaatttttttttaaagttttttttgtttgtttgtgttttttttttttttttttttgagatggagctttgctctttcacccaggctggaatgaagtggcacgatctcggctcattgcaacctccgctgccaggttcaatccattctcctgtctcggcctccagagtagctgggattacaggcgcccgccaccagcctggctaatttttgtatattttgtagagacagggtttcaccatgttggccaggctggtcttgaactcttgacctcaggcgatccatccccctcagcctaccaaagtgttaggattataggagtgagccaccgtgcccaactgcgtaatgtttttatgattttaaaatcacgagtttctatttttttttcatggaaccataaaactgtttatcacaagcatttattttactaaactagtattttgtaatgtttaagagcatggactcgggggatcaaccctctgggtaaatctcagtgtcatgatactcaatagtcgtatgaccttgtgcaggttactttacttctctgtccctcagttttttcatctgtcaaatggtaatacttgtacctatcttgcgtagttactgaatatactatgtaacggatagagattaggataagacagcaaaaaatatatgcacacacacacttgttacctgtgtgcatatattatatctacttaagttttattctaaataaggagcttgtgataattgtttccgttttgtaattagaaggtattatatgttcctatcatgatttttgagcctgtggttctgaaaccagtgtttctaaatatttttttcttttcacatcatgtatttacagtgtttttcagtggtagtcatgttgacatcctgagtcgcacagttcttgtttgggactgtcttcttcctcctccttccttcttcctccttcttctttcttcttcctcctccttcctcctccttccttcttcttcctcctccttcttcctccttcctcctccttccttcttcttccttcttcttttttcttcctcctccttcctccttcttccttctccttcctccttccttcttccttcttccttcttcttcttctttcttcttcttcctcctcctcctccctcctcctccctccttcctcctccttccacctccttcctccttcctgcttcctcctcctcctccttcttccttctccttcttcttccttctttcttctttttttttttttggcatagcaaccaacaacagggaacactgcttttttcacaactctgtgtaataaatgttgttgaaatatccagggtgagatctgttgagctaaattactgacattatcagagtgatttaaaattttttggagagttttgattttagaagacataaaaccctgggctctgtcctggctttattgaagcaaaatagtagtgtattagttctgagattgggtaatttataaagaaaagagttttcattgactcacggttttgcaggctgtgcaggaaatatagtggcttctgcttccggggaggcctcaggaagcttccaatcatggcagaaagcaaagggggagtgaggcacctcacatggtgggagcaggagcaagagagtgagggagaggtgctgcacagttttaaacaactggatcttgtgagaactcgctcactgtcacaagaatagcaccaaaggggatggtgttaaaccattcatgagaaatccaccttcatgatccagccacctcccaccaggccccacctccaacattggggattacaattaacatgagatttggtggggacacagatccaaatcataccaattggatttgtggtgtgggagtaaatgtgtctatattttggaaaatctcccttggtaagactgaccattgcttgaatgatttctttgagcttaactatcaacaactccttttcttgtaggtgatagaaattgaagatgcttcacccaccaagtgtccaataacaaccaagttggttttagatgaagatgaagaaaccaaagaacctttagtgcaggttcatagaaatatggttatcaaattgaaaccccatcaagtagatggtaagaaactattagatgattcaataatttttagttaaatttttaccaatatttgggtgtgaggcagctgcctcacatcctgctaagtcctggaggtaaattggtgagtggggtggggaatccacaattcccctgcctttatggagctcataaacaaatgaggaagaacaaaattgggtgatttcaaacacaatgagcgttataaaaagagaaagaagtgctacttacaaatgggtagatatagcaagtaggtttcacctaattagcaaagactggcctaagggcagctaggggttgggaagagctgtagctagctaaaagcctttttcagaaaatgctatttcagcatttttaggtatgttttctttattagagttgaatcagtaagtcagttttgagtgtttatgtgaattaatcataagggaggttctgtagttcctaccttttgagttgctagtcccctttcttgctcagtgtttactatcgaataaaggaaaagatgatgaaattatctcatgggtttttttttcctgattgactcaataaactcaaaggtatttttgataggaagccattctctttttggataaagttgctctctttttacaaaaattattattattattttttgagatggagtctcgctctgtcactcaggctggagtacagtggtgctataacagctcactgcaatctctgcctcctggcctcaagtgattctcccaactcagcctcctgagtatctgggactacaggtgcacaccaccaccacgcccagctaattttttgtattttagtagagacggggtttcaccatgttggccaggctggtctcgaactcctgacctcaagtgatctacccgcctcggccttccaaagtgcttggattacaggcgtgagccactgtgcccggccacgtttctcttttagagtattcttatgtttctttgaaccatctcagggaatacagaacatctactgtggatagcttagagaagatgaaggaaagtccccctgttctatgtttgtgttaacttgtttctgctttagtttggtgggaaaaaatcccatttagatgtaagaaattatttagctaagtgtttttttaatgctgtttcttagaagttttggttatgtttttgatgtgtttatgtaaaggaagtttttaacttggacctttaaatttaacttaatgaagctgttatttttaggtgttcagtttatgtgggattgctgctgtgagtctgtgaaaaaaacaaagaaatctccaggttcaggatgcattcttgcccactgtatgggccttggtaagactttacaggtaagagctgaagaatatgaaggtatcctgtttttgtggattcattaatatatattggattctattatgtttcaggcacagtcgtaggggctgaagataaagcagtgaacaagaataacaagatctgtctccaaggagcttatattctagtggaggagagagctgctaatcaaataagaaatatgtactttcagaaaatgaatgttaagggaggatattgagttaggaaaggcatcttttaggaggtaatgtttgagcagaggtcctaatgaagcgaggctgtggggtttcaggtatggccaacaacaactgcaaagattctaaggtagaaattaccttttttttttttttttttttttttacaacttttaacggtttatgatgttaaagtaatgacaaagtaaagtatcttttactattaaaattgctgcatttctaaatggcaggagttgtagcagagatgtaaaattggtgaatgtatttgtacttttaaaccataaagtaattatagatttaatgggtcagaacacattaaagtggaaaaatattatgtaacatgattctcttctaaatgagcgatggtattttttgaaagactatagggacattctgtggagacctaggacttagtattggtatgggatcattttatactattcacattgatcatagaatcatggagctttagagttggaagagcctgatacatcatctagttgaactttggcattttactatctctttccctgtgccttgcctggtttggaaattctggccgtttattgtttaagcaaaacaaagctataatattgtaagattgcttaatttattaaatttttttgtggatatttaaacgaaggtgacaatctgttttcttataggtggtaagttttcttcatacagttcttttgtgtgacaaactggatttcagcacggcgttagtggtttgtcctcttaatactgctttgaattggatgaatgaatttgagaagtggcaagagggattaaaagatgatgagaagcttgaggtaacttattttaaatgttttctattattaaaatagtcacatgaaattcatatagtaaactatttttaattttttttaatttttaatgttttttaaccagtgatgcatatttcagtgggaatatttaatattcacatgtttttagtagctacttaaaaaaatctttatttccccacaaaaggtttctgaattagcaactgtgaaacgtcctca

SEQ ID NO: 10896 - DNA, 725 bp, Homo sapiens
tgaaaatgatgattccaagtctcctggaaaaggcagaaagaaaattcggaagattcttaaagatgataaactgagaacagaaacacaaaatgctcttaaggaagaggaagagagacgaaaacgtattgctgagagggagcgtgagcgagaaaaattgagagaggtaactaatttctttcttcttctttttcttttgtagctacagggtcttgctctgttgcccaggctggcctcgaactcttgggctcaagtgatcctcctaccttggcctcctaaacttctgggattacaggcgtgatagaaattgaagatgcttcacccaccaagtgtccaataacaaccaagttggttttagatgaagatgaagaaaccaaagaacctttagtgcaggttcatagaaatatggttatcaaattgaaaccccatcaagtagatggtgttcagtttatgtgggattgctgctgtgagtctgtgaaaaaaacaaagaaatctccaggttcaggatgcattcttgcccactgtatgggccttggtaagactttacaggtggtaagttttcttcatacagttcttttgtgtgacaaactggatttcagcacggcgttagtggtttgtcctcttaatactgctttgaattggatgaatgaatttgagaagtggcaagagggattaaaagatgatgagaagcttgaggtttctgaattagcaactgtgaaacgtcctca

SEQ ID NO: 10897 - DNA, 26284 bp, Homo sapiens
gaagaggaaaggcaggtgcaaagcttttccaagattttcagatgttaagtagaatatggactcatccttggtgtttgcagctagactacattagcaaagaaaataaggtaagtcaggtaacttagtttaaaagcatctattggaagcagaataaacttagacaaaaaattgacctacagactgtatattcaaattttctattgctttgttctattctatgtcttatttctaatttctatatgtcttgcatgtattatgattataggagtgttaaatgttattttattgagcccattttaaaaaactttttattttgaaataattttatacttatagaaaagttgcaaaaatagttctgagaattcccctatacctttgacccagtttcttctaatatcagcatgttgcattagtatagtaaagttatcaaaactaagaaattaactttggtacaatactattaactaaatggcagactttatttggatttcttcaatgtttttacttatgtcttttttgttttccatgatccaatctaggacctcccattgcatttagtaagcatatctgtcctgtcttctttgtctactaaaatctgtaatagttcctcagtccttcctcagctcgtgccaattaacttattcttaaatgaacatcaatataatttccagtgtaagttgagatattctattaaaatagtggtcatttttttttctctagggttattttgatgaagacagtatggatgaatttatagcctcagattctgatgaaacctccatgagtttaagctccgatgattatacaaagtaaatcgaatactttttcgtgccatcctgtattgacaaagttaaaacccctacttgctgattgacctcttataattgacgtttacatctttcctatgcttttctaacaatctgaatgtgtttttttgtttgtttgtttgtttgtttttagaaagaagaaaaaagggaaaaaggggaaaaaagatagtagctcaagtggaagtggcagtgacaatgatgttgaagtgattaaggtctggaattcaagatctcggggaggtggtgaaggaaatgtggatgaaacaggaaacaatccttctgtttctttaaaactggaagaaagtgagtctaatgaatgttgcctttatcatggaacagtaatttggaaaatgtcatgtcgttagtccttttttcagtcacttacctgactaattgactcaaaggaatctttcctcaattgatgagtctaatcaagtactcataattacagtaaatatctgatgaatctttaattataagcaagctactctgtgctctctggtatttgggggaaaggtaaaaagaaaaactaatgtttatttacttgtatatacctaaactctattattttcactacatgtgttagctaactgaattcttgagcaggcttgcaatgtagttgatagttttaaaaatgagtaggagaactggtattcagacctaaaaatgtctaatctcaaagccaccatgatattttcacttaactgtatgggaataaatggaaacatttcagataatcaagtgtgattgtagttaatttttagtcagtaatatacagtaaaactaattttaatcatttagtgtttttcctttgtgattcttcataatctgcaattatctactttaggtttcctgtgtattatgtacagtttctatcacctcttttgttttctttctgtctctcttgtgcatgaaagtgaagtcttagattgaactctgcagtggtttaagttgtctttacctatatgtaagttgaaggattagtgttgagacactgtatcctactagtgcagcctgtatgcctaggagcttaaaaactgggaccaaatgtctgcctatttgaaatagcagattatgaagagagaacaaggtagtggctctaaatatttggcatttgggagttgtggagcaaagcagttaactgtctataaggagaagagagttgtgggggccacctaggttagtgatcctgtgatcagataaacttggctggtctcaggcctacagctgaaataacttggtgattaattattttaattttatttttataatttcaacttttatattcgggggtacatatgctagttgattaacatgggtatattgcatgatgctcagctttggggtatgattgatcccatccccaggtactgaacatagtactcagtagttagtttttcagtctttgccccctttctctctccccactctagtagtcctccgtgtctgtcgctctcctctttatatccatgtgtacccagtgtttagctcttacttatatgtaagaacacgccgtatttggttttctgtttctgtgttaattcacttagtatataatggcctccagctgtatccctgttgctgcaaaggacatgattttgttctttattgtggctgtgtatattctatggtttatatgtaccacattttctctatccaatccactgttgatgggcacctgggttgattccatgtttttgctgttgtgaatagtgctgtaataaatatatgagtgcatgtgtctttctggcagatttattttccttttgttttatacttgtaatgagattgctgggtcaaattgcagttctgctttaagttctttgagaaatctctaaactgccttccataggcggtgaactaatttacaatcccaccaacataaatgttcccttttctttgccccttctccagcatctgctgttttttgactttttaataatagccattctgactggtgtgagattgtgtctcattgtggtttggatttgcatttctcctgtggttaatgatgatgagcatttttcatgtttgttggctgcttgtatgttctcttttgagaagtatctgttcttgtcttttgcccactttttaatggagttacttgtttttttgctgttgaattaagttccttatagattctggatattcattgttggatacatagtttgtgagtattttctctcattctgtaagttgtctgtttactctgttgatagttttttttttgttattttgtgtttttgtttttttgtttgtttgtttgttttttgtttttgctgtgcagaagctctttagtttaattaggtcccagttgtcaatttttgtttctgttgcaattgtttttgaggaattagtcataaattctttctgactcggtgatttctttataaacatttctctcttcagtacctccatggaatagacagatggcagtctaacagtagactctgacttctcttaagaaatcaggggaatagtaaaaattaaactacaaaatttctcttctcattcttctcttctgttaccccataaaacagtttactatcaatgttcatcttctggatagatataaagaatatttttatcagaataataaattattatagtgtaatttaaggcaatgagaagttcctgtatctccttccctgctgctgctgccccaatctgccttttccacataaattcctcagtctctcatctcataattaaaaatatataaagtttacatgttcctggaaattattttcttaaaatactcttgttgaattttttctcataacttatggctaacaggagcagaagagtagaccagtcagtgtgcatcatcctgtgctataaatgggttacgtaagagtatactgagattttttttttaaagtgtactgagatattgatcctttgtcacttgggaatacaattagaatctgaggcagctggtttgcctccgtaaatgagtagtctcttctctttttcctggtatgctatataagcattaacgttttttacatatgccataatgtgaatgggttggaaagcactgggggcagaatgtaggaggctacatgttgtgagcccaaaaacacacagggaaggccatcagttccaaaagacaaattttgaccacttgtctaggatttttgtttcattttagttgtgtgcagtcaaatataagtcatttgtatatggatatattttatatatttttgtagcttatatacgtgtatagtatattagaagcattctccagaactaatagataataaaaatttatttttttctttgcatctaaattaactccatataaaatggagtatatcataatgtatggacatacgtagctggtattgtataactttaaaaaaaatgactttcttacagtaaatataagaaaatctgaataggaagtattaaggggctagtctgcctccttagcgcagtaggcagcacatcggtctcataatctgaaggaagtattaaagggttaacaatgttgtacctggaatttgaaatggatattaaataattaattacctataattgagctacaatatgatttttgccacatattttattttcacgtcaaagagttactgtttgctttaatccttttgtagtagctgtctcgtttttctgagaagcagcatcttgaatgagtcatttaagtttagcttacatcatccccatttctgtgttttaaatgttttttattagaaggagagttcatgatcacgaaatgactatgtaaattacttcaaagtgttagatttattattacttaagtatttttagagtaagcttcattggtaagcatttgcattttaaaacgtatgtaattgtatggatataaagttttgtgacagaatccttgtatatgatgtagagccgtaatattagtactaatataccatatttattcactcaacagatatttataaagtgcttactatatgcccagacataaggagggaactgataagcctaaatggtaaattgaagaaggtatgctatggaaatcctagggagatgctagtcttgagactagcagctttgattttcatttatccagggacaggatttgagacttcgagccctctataagttggagagttctgtgaccccttctcaaagctgaatccctttaaagtttacaatcccatcgacaatccagggagttgacaaggaagcttatctatttcagccagggctcttggttgggaaaaatagttacattgaatttacggtcatggccttcacctcacatactttatggtttgaatttatattactcatatagtctaaaagatccgaaactgaaatattaacttcacaagtaattctgagttggtgattccctggagacctggtagaagcaaatgtagaatcactctggagatatatgaccttaaccaaggctacccagaaatttcacagattgtagctacacctgagaaaataaccttaggaaaagctaggaacagaaagtattagtagtcaacctgaggaaagttagcatacaaaataaatggcatgattagattctcaagaacttctgataatagaagtatttgataaagactataagtatgtctaaaatgatatttttaaaattcctaatcataactttatgccagaaaatttaaaacttaaaatacacaatatttaagaaaaatatactcagcaatgagcattcgttgcagttatttcatattagccaaaaacaagaaacaatctagatgtctatgaggagaactaataaatgatagtgtattcatgcagtggaatactacatggtagttagaatgattgaacgggagctccatgtcaagcatgagtaaatctcgctttgagtgaaaaagtaatttgtaggattttacaaacagtatagccatttgtacagtttagtgatacacatgcagtaaaaaacataaaacactgcaaaaaatggtaaatatataatttaggggtttagttacctattggaaaggaaggaaggaaagagaatgggatcatgtaggatcatatattaggcttcagcttcatccgaagttttaacagtgttaaaatttgatgaagatggaatgtggaagcacatttgtttcttatatcttatatacttttctgagcatttaaatttttgtaacaaaaatatattttaaaatactttgcattaaaaagcaattgagaaagtgtataaacatgctaaacctgcatatttcttattttgaatcaaactatgtttaaatcttttaataaattattttatgctactttctccttccacctttcatagtcaaagtttgtggggaaaatatataagaacgaaatcatttaatatgatatgctgattctggggtcaattcttgttggcggtttccagatcctagtagcacagtgaaatgttttctacccccaaggtcttttctctcgtggtaactgagcctttccatctctgttgattcctgtctcatggagtatgtttgggggcattttactctcttagggcctggtgggaaggggatggtttctcttctctttgggtctctgtctttctgagctccactcctaccccgagggtttgtctcttacacttgcactctctcagagtcaatctcttgcttgttctcttatttggcatctccttcctttctctttttctatctagagctcactcttctgggatagtctctgtccttctgtgctgtatgtgcgtgtgcctgcctttctcttttttccctcccctctcccaagtccccatcagtttctttcttactctccccatgggtaggtctttttctgtctctcttgctctctttccatttcttttctaatttacctacttatgttccatttgtcttatttaggtaaagctacttcttcttctaatccaagcagcccagctccagactggtacaaagattttgttacagatgctgatgctgaggttttagagcattctgggaaaatggtacttctctttgaaattcttcgaatggcagaggaaattggggataaagtgtaagtgctttaccatatttattatataaattaaccttttgattatgtttttattgcttaaacaatgtatttgaacaaatctgttgcttttccttccttcctaaagatgtgatttatttggtcattgtagtgctaggccaatacaagcaactatcttttttgtaagccactagttctgattgcatattcaggttatttcttcagtgtaaatttctgcttctacctattgcaacttgaacttatttccttgggtagagctcttagttgaaatttgtgtttctccatcttcaaaatcatttttcggtttatgtagtgtgacttctaccgtgttgctttactgagatttccccctgtaaagtcactagtgaccttctaatcctcaaatctagtggacatctctcaggctttattttattttacctgcttgattattctttcttcttcttcttcttttttttttttttttcattatgagacagggtcttgctctgttgcccaggctggagtgcagtggcacaatcacagcttactgcagtcttgacctcccaggctcaggtgatcctcccacctcagcctctccagtagctgggactacaggcgcacaccaccatgcccagctagtgtttttatttttagcagagatagggtttcaccgtgttgcccaggctgatctcgaactcttgagctcaagcaatttgtgcgcctcagcctcccaaagtgctgggattacaggtgtgagccaccacacctggcctgattattctttctttatcatttattctttgttttttgttccacttctaacatttttgccaccattcctttctttgcatcttcaccccccttcaaattacttttccaaaaacattatttttttttttttgagacggagttttgctgttgttgcccaggcgggagtgcaatggtgcgatctcggctcatcgcaacctccgcctcccaggttcaagtgattctcctgcctgagcctcctgagtagctgggattccaggcacgcaccaccacgcccagctaattttgtatttttagtagagatggggtttctccatgttggtcaggctggtctcgaactcctgacctcaggtaatctgcctgcctcagcctcccaaagtgctgggattacaggcgtgagacaccacgcccggcctccaaaaacatatttttaaagttttgaacaagacttactgtctaggctgctaggtcccaacatctgattataaacgatttttaaaagtatctgagatgcttttttttttttttttttgagacggagttttgctcttgtcacccaggctggagtgcagtggcgcaatctcagctcactaaaatcacctccacttcctgggttcaagtgattctccagccttgcctcctgagtagctgggattacaggcacacaccaccacgcccagctaattttgtttttttaatagagacggggtttcaccacgttggcctagctggtcttgaactcctgacctcaggtgatccacccgcctcagcctcccaaaatgctgggattacaggtgtgagccaccgcgcctagcttgagatgcttttaataaaaattttaaataaggctaaaataaaataatcttttatgtttaaaaaaatctcaaaatatggtctgaaacaaaagagttcttcatgttgtctgcaactggaaaaggttaatagagagaaccattagtatagacatttaatcctaacaacttttttccttttctactgtaagacttctctgagttcagtggttcccagaaccagccttaattgctaactgactaaaatcaacctctttccagtatagtaacccagattgcagattaattccaatttaataattagtatttctaagactttaattttttcacttacgggaactttcaagaacttaatttgtagcacagaaagaattgattcaattatgtttttgattttgggaaagataaactactgaggggtcaaagcataggccttggtcatttgagctgagcaccaggagtcaattcattttcttaccaacattctagaagtagttaactgggagatagtagactccaacagtgtggagctcaggaagtcatacaataaaaaacacttaagtggttaactccaacagccgtttcatagcttcaattgttttcagttctactaaatctgaagatatgtagcagggaatgttgaaggatcttcaggagtcataagtaccttcttctcctatagtatagcttttagaataaaaataaaacttaaagcatacttgccacaggtatattgtttcttatatactgatctactttgtttgcatatataaagggcaatagaagacctcttatattctctttctagattttatttcttttctagtgtgtaagtatgttataaattctgtccagtgggttagaccagaatagtcattttagaactatttctcagagcccctgcaaattggtgaccgaaaggagagggtaagggaacagtaacatttttcctccttctcccgtaatgcctaaaacagcttgcttttataatttattttatttgaactctacacaaaacttgatgtgaccaaatagttttcatggctaaaaaggagttagaaaattactagggcagagaatgaggaatttgcagacatacttgaaatgtaatgacaaagtgttatagaatgcatgtaattttaaattactgaaatacttgtaatagggaaactttttacattctctaaaacagtgtcttttatagagcagaagttttaaattttgatgaagtctaatttatcaacttttaaaacaatgatactttgtgtcatgtgtaaataattttttacctaacccatgttatgaagattttcttctgtgttcttctaaacattctgttcttacagtttttacagttagatttatgctccattttaagttattttttgcataaggtatgcagtttaggttgaagttcactttttttcatgtggatgttcagttttgctaagaccattgtttttgtcatgtggatgttcagtttcgctaagaccattgtgtaggtttttttttttttttttttgagacagagtctcgctctgtcacccaagctggagtgcagtggtgcgatctccactcactgcaagctccgcctcctgggttcacgccattctcctacctcagcctcccgagtagctgggactacgggcgcccaccacagtgcccagcttattttttttgtatttttagtagagacggaatttcaccgtgttagccaggatggtctcgatctcctgacctcgtgatccacccgtctcggtctcccaaaatgctgggattacaggcgtgagccactgcgcccggctaccaagaccattggttaaaagactatccttttaccattgaaatgcctgggccctacaattaattatcctatgtggctctctatctggactctattctgttctattgatctgtgcctgtccctttactacactgtcttggttactgtaactttgtaagtaatgaaatcatgaagagtcagccctccaactttgtttttctttttcagaattgtcttccctcctctgaggtggcattctcatatacattttacaatcaccttgtaatttctacaaaaaaatcctgctgggatttttgttacaattgtgttaaatttgtagatcgatttaggaagaagtgatatctttactaggaatcttctaatccataaacactaatctgtttttttagccttgttttcagccagtccctcatatctctggacttgattgaagattttcttgaattagctagtagggagaagacagaagataaagataaaccccttatttataaaggtgagctacaaatatttctgtgtcgtaattttaaaaatactgatttaaacataccatacaaacattttagcaacaaaagaaacaaaactacccagtctcacaactctatcatatcaaaatttttttgcaatgtctatttgtccttatccatatatatgtatagtctttttcaaaataaaattgtattgtttatatttgaggtttacaacatggtgttatgggatacatatagatagtaaaatggctactgtagtgaagcagatgaacatatctatcatctcacatagttttttttggtgacaagagcagctaatatcaacttaagaaaaattcctaatacagcagtctttgttgttgaaattgttggataaattaaaactttttggtttctaaagcagttttattgagagataattcacatcctgtacaattcacccatttaaagtgtagaactcaatggttttaatatattcacagagatgtacaaacatcactagagtcagtttttgaacattttaatcactaccaaataaaactctgtaccctttaactattactcccctatccagcccaaaactccctcacataagcaaccactaatctcctttatgtttctaatagattcatatattctggaccagtcacataaatggaaacatgtaatatgtggtcttgatagatattagggttgttctcacctttcagctgttgtgaatagtgctgttgtgtacatttgttacacaggttttcatttatttaaacaaacggcaataccaaactgttttctacactgcctgtactatttcagtcctaccagcaatgtacaagcatttcagtttctccacattcttgtcaacacttgttatttttcatttttgtttttgttataaccatcctaatggttgtgaagtggtatcttatgattttaattttcatttctctaatgactaataatgttgaacatcttttaatgtacttgttgactatttctttatcttctttggaaaaaatgtttattcaggtcctttgcccatttttgaattggattgcttatctttttgttgttgaaatgtgttttaaaaaatatattctacatactaggcccctatcatatatatgatttgcaaatattttctctcattctgtgggttatcttttgctttcattaaaaaaaaaatagttccggtgatctgtatcactttcttttatttatttatttttaatttttcgtagagatgaggtctccctctatttgcccagactggtcttgaactcctgggctgaagcagtcctccctcgttggcctcccaaagtgctgggattaaggtgtgagccaccatacctggccatctgttgctttcttgagtgtgtcctctgatgcgcaaaaatattttattttgttgacatccaatttattttttcttttgttgcttgtgcttttactgtcatagctgagaaaccatttcgaaataaaaagtcgtgaagctttaacccctgtgtttgcttaaaagagttttatagttttagtccttgcacttaggtctttgatccattttgagttaatttttatgcatgatatgaggtaaaggctcaacttcagtcttttgctgtggttatccatttgtcccaggactgtttgttgaaaagaatattctttctttattgaatagtttttgtcactcttattaaaaaggaattgatgatggagacacatgtttgtttcctgaccctcaattctattccattgatctatatgtcagtcgctgtgctaatactgcactatttcattaccattgctttgaaagtgatgttgaaattggaaagtgtggctattccagatctcttggaattcaacatcaaccttagaatctcctataaatttctacaaagaagtcagcttagatgctaatagggattgtgttgaatgtatagttaattttaggaagtactgccatcttaatattatgtcttatccatgaacatggggtgttttgctgtttatttaggtctcttatttatttcaccaatattttatagtttgcagagtatacattttacacttttgttaaatgtatttgtacatattttatttctgaggctgagtgaaatttgttcttagtgaattctttaggattttttatatacaagatcatgtcatctgcaagtacagataatttcctttctaatctgaatggcttttatttgtttgcttatccagttgccctggttaagacctcaagtacaatgttgagtgaaagtggcaagagctggcatccttgtcttgtctctaatcatagtgtgaaggaatccagtttttcaacattttgtatgatgttagttttgtggatactatttatcaagttgaggaaattatcttctctttctagtttgttaaatgtgtttgtcatgaaagagtgtgacatactatcttgatttctctgcagctattgagatgatcatgtcatgttttttttttccccattctattaacatagtgtattactttgattttcacatgttaaaccaaccttgcatacctgggataaatcccacttgtcatggtgtataattctttttatatggtgctggatttagtttgctagtgttttttgttgttggcaatggaatgttttaattggctttttttgtcctgattatgaaagtattattatatcttgcatatataatattggctgtataatattctgtcatatggctgtacataacttatttaatcatttgattgctttctctaatttttcaactttttttttttttagagacagggtcttgctctgtcacccaagctgaagtgcagtcgagcaatcttggctcactacagcctctgcctcctgggttcaagcgattcttgtgcctcagcctcctgagtagctgggattacaggtgtgtgccaccatgcctggctaatttttgtattttttgtagagatggggttttgacatgttggctgggtcttgaactcctggcctcaagtgatccacccgccttggcctcttaaagcactgggattacaggcgtgagctaccacacctggcctaatttttcaacattttaaatttttgtacataagtttatatctgcgttttaaacttttttgcttaagatagattcctaagaggagaaatcatttaccaacaggtatgatcttttttaggacttttgaaacattgtcaacttattttccagaacagttggattagtactcctagtaggaatccttgaatgatcactacaccattgccataataactaaaacctttcttaatagatgaataatgatatcttgtatttgttttaatttgcatttattttataaccagtaacatagattgtctctgctaatctctttttgcttttactgctgactgatggctatgtttctgtctgcctgcaatgctctctccacccgcactatcttcttcacctgattaattcctatccattcttcatctttcatgtccagtgacactcctcagtactgacttccctcctcctgactccaatgtctgattttttccttttaatttttgtgggtgcatggtaggtgttatgtattcatgggttacatgagatattttgatacatgcatgcaatagataataattacatcagggtaaatgggatatctatcacctcaaacatttatcctttgtgatacaaaaaatccatttatactcttagttatttaaaaatatacaatttttaattatttttgacggtagtcaccctgttgtgctagcaattactagtttttattcattccaactatatatttgtacctgctaaccatcagtacttccaccccaaccacccactacccttcccagcctgtggtaaccatccttctactctgtatctccatgagttcaattatttttatttttagatcccacaaataaatgacaacatgcaaagtttgtctttctctgcctagcttatttcacttaatgacctccagttccatccatgttgttgtaaatgacaggatctttctcttttatggctgaatactattccattgtatataagtatcacattttcattatccattcatctgttgatggacacttaggttgtctccaagtcttggctattgtgaacagtgctacaatagacagtgcagatatgtcttcgatataccgatttccattattttgggtatatacctaggagtgggattgctggatccttttttttttttttttttttttttttttttttttttttttggtggggggagacaaggtcttgctctgtcacccaggctggagtgcagtggtgtgatcttggctcactgcaacttccacctcctgagttcaagggattctcccacctccgcctccccagtagctgggactacaggcatacactaccacgcccagctaatttttgtatttttttggtagagacagggtttcaccatgttggccaggctggtctcaaactcttgacctcaggttatctgcctgccttggcctcccaaagtgctgggattatataagtgagccactgcgtctggctgggattgccggattctatggtagctctatttttaattttttgaggaacctctgaactgttctccatagtggttttactaatttgtgttcccaccagcagtgtacaagagttcccttttctccaaatcctctctagtatttgttactccctgactttggataaaagccaagttaactggggtgggaagatatctcatagtttgatttgcatttttctgataatgaatgatgttgagcaccttttcctatacctgtttgccattggtatgtcttcttttgagaaatgattattattttgtccattttaaaatcagattattaaattttttttcctgtagagttgtttgagttctttatatattccggttattaatcgcttgtcagatgggtagttttcatatattttctcccatcctgtgggttgtctcttcactttgttgactgtgtcctttgttgcgcagaagctttttaacttgatgaaatcacatttgtctgtttttgcttttgttgcctctgcttgttgggtattactcaaaaaatctttgcctagtccaatgtcctggagagtttccccaatgttttcttgtagtagatttgcagtttgaggtctaagatttaaatctttaatccattttgacttgatttttatatatggcgagagataggggtctagtttttttctcctgaatatgtatatccagttttccccagcaccatttgctgaagagactgtcttttccccagggtatattcatggcaactttgtcaaaaatgagttcactgcagatttatacatttatctcagggttctctattgtgttgatctatgtgtttttatgccagtaccatagtgttttggttactatagttctgtagtataaagtcaggtaatgtgattcttacacttttgttcttttggcttagtatagctttggctattttgggtcttttgtggttccatataaatttttagggttgttttttgtatttctgtgaagaatgtcactggtattctatacagattgtaatgaatctgtagattgctttgggtagtatggacattttaataatatcgattattccaatccctgaacctggaatatcattctatgattttgtgtcttcagtttctttcagcatctttttatagttttcattgtagagatctttcacttctttggttaattcctaagtattttatttatagctattgtacatgggattactttcttgatgtcttaaaaaattttcttttaatttgtaagtttctttatttctctttcaggttgtttgctgttggtatatagaaatgctactgatttgtgtatgttgggtttatatcctgccacttcacagaatttctttatcatttctaatagttttctggtggagttttcagatttttccaagttaagatcagatcatctgcaaacaaggataatttgatttttttctttccaattttgatgccccttatttcttgttcttgtctaattactctagctaggacttccactactatgttgaataagtgatagaagtgggcatccttgtcatgttcttgatcttagaggaaagccttttagtttttctttctttagtatgatactagctatgggtctgtcatagatggcttttattatttttgaggtatgttccttatgtacttagtttttttagtgttttttcataaagggatgttgaattttgtcaaatgctttcttaccatgaattgaaatgatcatatggttttgttttttgttttttttttgagacggtctcactctgttgcccagactggaatgcaatggcgtgatcttggctcaccgcagtctctgccttgcaggttcaagtgattctcctgcttcagcctcctgagtagctgggattacaggcgtgtgccaccgcgcctaactaatttttgcatttttagtagagacgaggtttcaccatgttggccagacaggtcttgaactcctgacctcgagcggtccacctgcctcggccttccagagagctgggattacagacgtgagccaccacaccccggcgatcatatgggttttgtctttcatgctgttgatatgatgtatcacatcaatttgtatatgttgaactattcttgcatccctggagataagccccagttggtcatgatggatgatcattttattattgaattccgtttgctactgttttgttgaggatttttacattagtattcaccagtgatattggcttatagtttaatttttttatgtgtgtttatctggttttgttatcagggtaatactggccttgtaaaatgagtttggaagtattctgttctctacttttcagaatattttgagtaggatttgtcttatttcttatttaaatgtttgatagaattcagcagtgaagctattgggtcctgggattttccttgctgggtgactttttattatggcttcaatctcattactttttattggtctgttcagattttggacttcttcacggttcaatcttggtaggttgtgtgtgtctagaaatttatccatttcttctaaagttttccaatttatcggcatatagttgctgataatagcaactaatgattctttgaatttctgctgtaacagttgtaatatctttattttcatctctgattttatttttttgggtcttctctcttttttgcttagtctgtctcaaagtttgtcagttttgtttattttcttcaaaaaacctgttttttgtttcattgatcttttgtattgttttctttatttcaagtttatttatttctgctctgatctttatttctcttctactaattctgggcttggtttgttcttgcttttctaattcttctcttctcttcttttttgttttttttttctttttttttgagacaaggtctcgttttgttgcctaggctggaatacagtggcgcaatctcggctcactgcaacctctgcctctcaggttcaaatgattcttccgcctcagcctcctgagtagctgagattacaggcgcccgccaccatgcccagctaatttttgtatttttagtagagacagggtttcactgtgttggccaggctggtctcaaactcctgacctcaggtgatccacccgcctcagcctcccaaagtgctgtcattacaggcatgagccaccgcgaccagcctctgattctttaagatgccttgttacattatttgcagtttttctacttttttgatataggcatttatagctataagctttcctcttagtactgctttccctgtgtcttatgttttttggtatgttgtgtttccattatcattttttaaagaaaatttttgatttccttcttaattccttcattggcccaccggtcattcaggaatgtgttgtttaaattctatgtatttgtatagtttccaaaataccttgttattaatttctccttttattccactgtggtgagagaagatacttgatattatttcaggttgtttttgatgttttaagacttgttttgtgacctaacatatggatgatccacatgctgaggaaaaaaatgtgtattctgtagctgttggatgaaatattctgtaaatatgtattaggtccatttggtctatagtgtagataaagtgtgatgtttcttagttgattttctgtgtgtagtgttgaagtctccagctattattttattggggtctatctctctctttggctgtaacaatatttgctttgtatatgtgggtgctcccagggttgagtgcatatatattttaaattgttatatcctcttgtagaattgaactgtatcattatatagtgtccttctttgtctcttcttacagtttttatcttgaaatctattttgtcctatataagtatagctgttcctgctctttttggtttccattggcatggaatatccttttttatccctttattttcagcctatgtgtatttttacaggtgaagtgtgttcttgtaggcaacagatcattgggtattttttaaaatccattgagcccctctgtcttttgattggagagtttagtccatttacattgaatgttattattgattagtagggacctactcctgccattttgttatttgttttctagttgttttttgggctcgtcttctttccttccttcttatcttccttttaatgaaggtgattttctctagtggtatggtttagtttcttcctttttgtttgtttgtttatccattatatgttttttggtttgtggctcccatgaggcttggaaattctatcttaaaacccattattgtaagctgataacaactttacactgtttttataaacaaagaaagaaacaggcaaaaagaaaactaataaaaattctacaccttaactttgtccactttttagctttttgttgtttctgtttatatcttattgtactatgtcttgatatgttgttgtagttatttttgttgcttcaacatttagtctttctacttataataagagtaatttatacaccacagttacgctgttataatattctgtatttttctatgtacttactgtttttagtgagttttgtacctttagaggatttcttactgctcattcatgtccttttctttctgattaattacttcctttagcctttcttgtaggacaggtttggtgtggataaaatccctcagcttttgtttgtctggaaagtttttatttttcttttatgtttagaggttattttttccatttatataattctagggtgaaagttttttccttgagcactttaaatatttcatgctactcttctcctggcctgaaagatttccactgaaaagtctgctgccagacatattggagatccattgtatgttacttgtttcttttctcttgctgcttttaggatcctttctttatccttgacatttgggagttattaagtgccttgaagtagtcttttttgggttagatctgcttgatattctataaccttctacttgaatattagtatctttctttagatttgggtttctctgttattatccctttgaataaactttctacgccagtctttctctctacctcctgtttaagaccgatatctcttagatttgctttttttgtagctattttctatgccttgtaggcctgctttattcttttttattcttttctcttttgtctcctgtgactgtgtattttcaagtagcttatcttcaggctcactaattctttcttttgctttatcaattttgctattaagagactcttatgcattctttagtatgtcagttgcattttttgactccagaatgtctgctttgttcattttaattattccagcctcttcattaaatttatctgattggagtctgaattcctcctgtgttatcttgaatttcattgtttcctcaaatcagctattttgtgttctctctctgaaaggtcacatatctctgtctttcccggattttcccgattccctgtttagttcatttgatgaggtcatatttctctaaatggtcttgatgcttatggattttcgttggtgtcttggcattgaagagttaggtatttattgtagtctttgcagtctgggcttgtttgtacctgtcatttttgggaaggctttccaggtatttgaagggacttgggtgttgtgatctaactttttagtcactgaagctgtgtccacattaggggtcaccctaaggccagtaacgctgtagttcttgcagccttgtagaggtaccattttggtggtcttgtataagatccaaaagaattgtctgcattaccagatggagaatcttgttctcttcctttactttctcccaaacaaatggagtctctctgtgctgagttgcctggagctgggggtggggggtgggtgacacaagcacccctgtgactaccactgcgggtatagcacttggtcagatcttaagccagcagagcaatgggtcttgcccaaggcccactgtaaccactacctggttactgcctatgtttgctcaaggcccaagggctgtacattcagcaagtggtgaagcctgccagtactgggtctttcccttcatgttggcaaattctcttagtccctgggcgggtatagagatgctttctggagccagggcctggagccagaaatgttagaaatatacctagtgctttattctactatggctaaactggcacagaaataacaaaacaaagtccttcctactcttctctttcttttcctcaggcagaggagcctctcttcgtggccaccaccaggacaggcccgcagagagtactgccagtgtaccgccagtgttcacttaaggcctaagggctatttagtcagcttttggtgaatgctgccaggccagagactcacccttcagggcagtgggctccactctgccccaggctcagtccacaaattccattcaagagctaaggcctggaattggggacccaagagcccgtttgttgcttttgtccgctgtggccaacctggtagctacactgctagataaagtcccctttactcttccctctccttttctcaaacaggaagagcctctctttgtagccaccacaacttctaataagctgggtctcaccataacctaacacatttctgtctaatccatgccccacaatgtgtactacctggttattgctgctgatgattcagggcccaagggctctttggtcagcaggtgatgaatcctgccatgactgggtccctcgattcaaggcaatgggttgccttctggcccagggagctagggcctggaatgggggcttcacgattctgcccagggccctgtcctactgtgactgagctggtatccaagttgcaaaacaaagtgctttttctcttcccttttctctcctcaagtagaaagcagaggtctcttttggagctctaagctgcgctacctggaattggaggagtgaggagtggtggcataagcactctcttagccgccccagtggtatctgactaagtcaagtgcccccattttactggctccaagccctttacagcactaggacttgcccagaagttgcagtccttgtggcctagatagcctttcagttttatttagggccccagtgcactttagcccactgtggcgtgacttactaaaactcaacttctgatcactgtgatggatgattcccctctggtttgggcaggtttatatgctcccttcatgtgtgtaggctgagttccaattcaaagtcctatgatcactgcactctccttcccgcaagtgcactgattctctccctatgacacgtggccacttctgggggttgaggtagcagtggcattggcgattcaagattgtctttccccttctgtgcctctttcagtgatatgaagttaagatcaggtactataattgctcacctgatttttgtttcttatgatggtgcttttttgtgtagatagtcataacatttgctgtttatgctgggaggttgatcagtagcagcttctattcagccatcttattccacctccttccccagtactgccctgattgaatgagttggtatttgttcctgtttctgttttttggaattgtttgtaaagcattgagcttaattatttaaatgtttgttagaattcagcattgaagccatcttggcctgggctcttcttataggtagttttttttctttttagtattatggtaaatatatatataacataaaatttactattttgacagtaaaaaggcaacctaccatatgggaaaaatatttgcaaatcatacatctgataaggggttaatatcaaaaatacataaaggattcctacaacacaacaacaaaaataatatgatttaaatatgggcaaaagagttgatagacatttctctaaaaatgatatacaaatggccaagaagcacatgaaaagatgtctagcatcactaatccttagggaaatgcaaatgaaaactgtaatgagataccaccacacacccattaggatgggctactatgaaaaaacaataatgagagttggtgaggatatggagacattggaactcttgtgtactgttggttagaatgtaaaatggtatagctgctgtggaaaacagtgtggtgttcctcaaaaaattaaaaatagtattaccatgagatccagaagtactacttctgggtatatacccacaagaattgagttcagggtgtcagagaagtatttgtatttgtacgcccacattatagcagcattattcatgaccaaatcatggaagcaagtcaaatgtccatcaacagataactggataaacaaaatgtggtatatacatacagtggaacataatttagccttaataaggaaggaaactttgacacatggtggaacatgtatgaatcttgaagacaatatgccaagtgatctaagccagtctaaaaaggacaaatattacatgattcctattatgaggttcctagagtagtgaaatttgtagagacataaaatagaatggtgtttgccagggcctgtgggtaaggggaaatggggagtgtgagagaacagataactccacggggcttcccagagtgctccatgttgtatggggattatgtctgtctcataaatatatgtatcattggagacaggttcattactacccatttttgtatactctttgtctagcaccaagctagacatgtagtaggtccatagtaaatacttgttgaactggtaagggaataaattacccttatctgtaacttccctagtttttttatacagagaatgatgctctagttaggcattttcctaggtatatacttgcactttttatctttctcatttccccgctttctttgtttctagagtgagtttttggcatatctttaacatatatatgtgtagtatatatgtgtatttttacatttgactgtagttaaatataagcttaaatatattttttttctattatcactatacattttattagattctatgttctggcagtttttcattattgaaaagcctatgttacaaaaacataccaatttactaccatcaataaatggaaaatgcttatcttaatatgtattgtaactacattttcttcatctttaatgggtaaaaacagttgtcattgttttcattaataattttttgaccactagtagggttgtacttcttttatatgcttgctagtttatttctgattttgtaaattatctttagcaaatgtttactaatcagattggtctgcctttgagttactgctattaccactaccactaccattaccattaccactgtgtattgagcactgagcaagatttaaggggtactacaggaaatcatggtgtagaagaggaacagacacatatattatgtgccataatagaggcaggtgtaatttgtcatgggatcttgagtgataatattaagaactcagtaagcttttaattaccatgtgacaggcaccattctaagtagtttttaaaatattatctcattgaatcctcataacaaccctatgcaataggtactctgattatcttcattttacagataaagaaactgaggcacaaggagtttaattacttgccataagtgaaaatgttagtaaatggtgaaactgagattaaactcagggagtgtcactccaaagtctgtgttcttaactactaacctataatgactctatcagtttttaagtgttggattcatcgaggtggtattagagatattcatttgcattataataaaaggtgagtatgttgaaatgctttttaaaatagtcatatcattttccattcatttatgattatttattttaataattatcctgttcaagtgaacaattaatgcaaatgtgactccagcctcttacctttttatgcaagtatccatctcaaattctttttttcttggatgtgtatgcctttttttctaattgaaaaaaaaatcataaataaaatgactttcataagcattaatgaatttttaacaaggaaattctgggttttctatatcagtgaagatataggtaagaaacatggaaaagcatcttttttttaactaatgtactaaatttaaagagcttgctggaaagacataagtaaatctcagttttgttaactgttttattttaaggctctggggcatgatagaattttgcttggattggaaatagtagcattgtgtttacagttaaataattagaatagaaattatgtatgataaaatataaaagtgtcataagcccttaatctcttggtattttagtatcaatgcaagtcttgggtaaaatttcacctcacttcttcctggtgtagattaaaggaaaaaaaaaacttaaactcactgtctaaaattgacatgtcatatcattaactcataaagtcgtactcctttacacacacacacacacatacacacacaccacatttgaaatggaaacgtacactgaaatttgcagctaccccatagaataatttttggcacatagtaggcattcagtaaagatttgttcagtgaatgaataaaggcattctttatctctcatttttatttgatcattatcaagttgttgataaggagaaaaacgtggccatttacagatataacttaaaacatgcctcatgagcgaaatgtaagtttaatcatattcttttgacagttttaaggattctaatcaaggaaacccttttaagaaattctcatgtagatgaaataggctttaaaaatacctgtgctcatcactatctatttgaatgaaatctgtggttaatttatttataatgtaatgactccttgattaagaaaagtatataatgtattttgctatacaaatagaatatatataacccacttttaaatgatgagcaaggtggaaaatctgttcttaccagtaagcagagcgatatatcaaattccttttgtgttcttttgttaaattttcaggtgaggggaagtggcttcgaaacattgactattaccgtttagatggttccactactgcacagtcaaggaagaagtgggctgaagaatttaatgatgaaacta

SEQ ID NO: 10898 - DNA, 803 bp, Homo sapiens
gaagaggaaaggcaggtgcaaagcttttccaagattttcagatgttaagtagaatatggactcatccttggtgtttgcagctagactacattagcaaagaaaataagggttattttgatgaagacagtatggatgaatttatagcctcagattctgatgaaacctccatgagtttaagctccgatgattatacaaaaaagaagaaaaaagggaaaaaggggaaaaaagatagtagctcaagtggaagtggcagtgacaatgatgttgaagtgattaaggtctggaattcaagatctcggggaggtggtgaaggaaatgtggatgaaacaggaaacaatccttctgtttctttaaaactggaagaaaatatttataaagtgcttactatatgcccagacataaggagggaactgataagcctaaatggtaaattgaagaaggtaaagctacttcttcttctaatccaagcagcccagctccagactggtacaaagattttgttacagatgctgatgctgaggttttagagcattctgggaaaatggtacttctctttgaaattcttcgaatggcagaggaaattggggataaagtccttgttttcagccagtccctcatatctctggacttgattgaagattttcttgaattagctagtagggagaagacagaagataaagataaaccccttatttataaaggtgaggggaagtggcttcgaaacattgactattaccgtttagatggttccactactgcacagtcaaggaagaagtgggctgaagaatttaatgatgaaacta

SEQ ID NO: 10899 - DNA, 1860 bp, Homo sapiens
tgcctgagcctcggcccaacaaaatggcggcggcagcggtgtcgctttgtttccgcggctcctgcggcggtggcagtggtagcggcctttgagctgtggggaggttccagcagcagctacagtgacgactaagactccagtgcatttctatcgtaaccgggcgcgggggagcgcagatcggcgcccagcaatcacagaagccgacaaggcgttcaagcgaaaacatgaccgctgagcccatgagataaaatcagtggttctggaagtaactctgatatgatggaaaacagcaaggaagagggaactagctcttcagaaaaatccaagtcttcaggatcgtcacgatcaaagaggaaaccttcaattgtaacaaagtatgtagaatcagatgatgaaaaacctttggatgatgaaactgtaaatgaagatgcgtctaatgaaaattcagaaaatgatattactatgcagagcttgccaaaaggtacagtgattgtacagccagagccagtgctgaatgaagacaaagatgattttaaagggcctgaatttagaagcagaagtaaaatgaaaactgaaaatctcaaaaaacgcggagaagatgggcttcatgggattgtgagctgcactgcttgtggacaacaggtcaatcattttcaaaaagattccatttatagacacccttcattgcaagttcttatttgtaagaattgctttaagtattacatgagtgatgatattagccgtgactcagatggaatggatgaacaatgtaggtggtgtgcggaaggtggaaacttgatttgttgtgacttttgccataatgctttctgcaagaaatgcattctacgcaaccttggtcgaaaggagttgtccacaataatggatgaaaacaaccaatggtattgctacatttgtcacccagagcctttgttggacttggtcactgcatgtaacagcgtatttgagaatttagaacagttgttgcagcaaaataagaagaagataaaagttgacagtgaaaagagtaataaagtatatgaacatacatccagattttctccaaagaagactagttcaaattgtaatggagaagaaaagaaattagatgattcctgttctggctctgtaacctactcttattccgcactaattgtgcccaaagagatgattaagaaggcaaaaaaactgattgagaccacagccaacatgaactccagttatgttaaatttttaaagcaggcaacagataattcagaaatcagttctgctacaaaattacgtcagcttaaggcttttaagtctgtgttggctgatattaagaaggctcatcttgcattggaagaagacttaaattccgagtttcgagcgatggatgctgtaaacaaagagaaaaataccaaagagcataaagtcatagatgctaagtttgaaacaaaagcacgaaaaggagaaaaaccttgtgctttggaaaagaaggatatttcaaagtcagaagctaaactttcaagaaaacaggtagatagtgagcacatgcatcagaatgttccaacagaggaacaaagaacaaataaaagtaccggtggtgaacataagaaatctgatagaaaagaagaacctcaatatgaacctgccaacacttctgaagatttagacatggatattgtgtctgttccttcctcagttccagaagacatttttgagaatcttgagactgctatggaagttcagagttcagttgatcatcaaggggatggcagcagtggaactgaacaagaagtggagagttcatctgtaaaattaaatatttcttcaaaagacaacagaggaggtattaaatcaaaaactacagctaaagtaaca

SEQ ID NO: 10900 - DNA, 7245 bp, Homo sapiens
taaatgggttacgtaagagtatactgagattttttttttaaagtgtactgagatattgatcctttgtcacttgggaatacaattagaatctgaggcagctggtttgcctccgtaaatgagtagtctcttctctttttcctggtatgctatataagcattaacgttttttacatatgccataatgtgaatgggttggaaagcactgggggcagaatgtaggaggctacatgttgtgagcccaaaaacacacagggaaggccatcagttccaaaagacaaattttgaccacttgtctaggatttttgtttcattttagttgtgtgcagtcaaatataagtcatttgtatatggatatattttatatatttttgtagcttatatacgtgtatagtatattagaagcattctccagaactaatagataataaaaatttatttttttctttgcatctaaattaactccatataaaatggagtatatcataatgtatggacatacgtagctggtattgtataactttaaaaaaaatgactttcttacagtaaatataagaaaatctgaataggaagtattaaggggctagtctgcctccttagcgcagtaggcagcacatcggtctcataatctgaaggaagtattaaagggttaacaatgttgtacctggaatttgaaatggatattaaataattaattacctataattgagctacaatatgatttttgccacatattttattttcacgtcaaagagttactgtttgctttaatccttttgtagtagctgtctcgtttttctgagaagcagcatcttgaatgagtcatttaagtttagcttacatcatccccatttctgtgttttaaatgttttttattagaaggagagttcatgatcacgaaatgactatgtaaattacttcaaagtgttagatttattattacttaagtatttttagagtaagcttcattggtaagcatttgcattttaaaacgtatgtaattgtatggatataaagttttgtgacagaatccttgtatatgatgtagagccgtaatattagtactaatataccatatttattcactcaacagatatttataaagtgcttactatatgcccagacataaggagggaactgataagcctaaatggtaaattgaagaaggtatgctatggaaatcctagggagatgctagtcttgagactagcagctttgattttcatttatccagggacaggatttgagacttcgagccctctataagttggagagttctgtgaccccttctcaaagctgaatccctttaaagtttacaatcccatcgacaatccagggagttgacaaggaagcttatctatttcagccagggctcttggttgggaaaaatagttacattgaatttacggtcatggccttcacctcacatactttatggtttgaatttatattactcatatagtctaaaagatccgaaactgaaatattaacttcacaagtaattctgagttggtgattccctggagacctggtagaagcaaatgtagaatcactctggagatatatgaccttaaccaaggctacccagaaatttcacagattgtagctacacctgagaaaataaccttaggaaaagctaggaacagaaagtattagtagtcaacctgaggaaagttagcatacaaaataaatggcatgattagattctcaagaacttctgataatagaagtatttgataaagactataagtatgtctaaaatgatatttttaaaattcctaatcataactttatgccagaaaatttaaaacttaaaatacacaatatttaagaaaaatatactcagcaatgagcattcgttgcagttatttcatattagccaaaaacaagaaacaatctagatgtctatgaggagaactaataaatgatagtgtattcatgcagtggaatactacatggtagttagaatgattgaacgggagctccatgtcaagcatgagtaaatctcgctttgagtgaaaaagtaatttgtaggattttacaaacagtatagccatttgtacagtttagtgatacacatgcagtaaaaaacataaaacactgcaaaaaatggtaaatatataatttaggggtttagttacctattggaaaggaaggaaggaaagagaatgggatcatgtaggatcatatattaggcttcagcttcatccgaagttttaacagtgttaaaatttgatgaagatggaatgtggaagcacatttgtttcttatatcttatatacttttctgagcatttaaatttttgtaacaaaaatatattttaaaatactttgcattaaaaagcaattgagaaagtgtataaacatgctaaacctgcatatttcttattttgaatcaaactatgtttaaatcttttaataaattattttatgctactttctccttccacctttcatagtcaaagtttgtggggaaaatatataagaacgaaatcatttaatatgatatgctgattctggggtcaattcttgttggcggtttccagatcctagtagcacagtgaaatgttttctacccccaaggtcttttctctcgtggtaactgagcctttccatctctgttgattcctgtctcatggagtatgtttgggggcattttactctcttagggcctggtgggaaggggatggtttctcttctctttgggtctctgtctttctgagctccactcctaccccgagggtttgtctcttacacttgcactctctcagagtcaatctcttgcttgttctcttatttggcatctccttcctttctctttttctatctagagctcactcttctgggatagtctctgtccttctgtgctgtatgtgcgtgtgcctgcctttctcttttttccctcccctctcccaagtccccatcagtttctttcttactctccccatgggtaggtctttttctgtctctcttgctctctttccatttcttttctaatttacctacttatgttccatttgtcttatttaggtaaagctacttcttcttctaatccaagcagcccagctccagactggtacaaagattttgttacagatgctgatgctgaggttttagagcattctgggaaaatggtacttctctttgaaattcttcgaatggcagaggaaattggggataaagtccttgttttcagccagtccctcatatctctggacttgattgaagattttcttgaattagctagtagggagaagacagaagataaagataaaccccttatttataaaggtgaggggaagtggcttcgaaacattgactattaccgtttagatggttccactactgcacagtcaaggaagaagtgggctgaagaatttaatgatgaaactaatgtgagaggacgattatttatcatttctactaaagcaggatctctaggaattaatctggtagctgctaatcgagtaattatattcgacgcttcttggaatccatcttatgacatccagagtatattcagagtttatcgctttggacaaactaagcctgtttatgtatataggttcttagctcagggaaccatggaagataagatttatgatcggcaagtaactaagcagtcactgtcttttcgagttgttgatcagcagcaggtggagcgtcattttactatgaatgagcttactgaactttatacttttgagccagacttattagatgaccctaattcagaaaagaagaagaagagggatactcccatgctgccaaaggataccatacttgcagagctccttcagatacataaagaacacattgtaggataccatgaacatgattctcttttggaccacaaagaagaagaagagttgactgaagaagaaagaaaagcagcttgggctgagtatgaagcagagaagaagggactgaccatgcgtttcaacataccaactgggaccaatttaccccctgtcagtttcaactctcaaactccttatattcctttcaatttgggagccctgtcagcaatgagtaatcaacagctggaggtgagttgtgaagtacaaaagtagtttgacatgaattaaaggcaatttcaagtgccttgttgttgagggttccctatgcagaaatatcacattctccaaaagattacccctgaatagacgaataaatttttgttttatttgttgaccgttttgaaccaacatgatgttgtaaaatgtggtttgttcagagcacaaaggaatcagtcggtgaattaatgtagtttgaattattttaattaagaaacaatagggctgctgactcgcttgggaaatagcaccttcttcagttataaaatagttataataaattgctatcttactgtttgaaagtaagataaatatactcattaacttctattctagtgcattatagatgcacaattaaatatataatgcccaatattatgaaataaatgatttaaagctagaatcaattgtaaattaaataggaaagactgggtttttattataccaataatgacttaattgaatctgaaacacattataaaatgtgcttatggattcttctgcattattaaattattggtgtgataaaactcaaacttttttaatcttcctaacaagactctttgagcattgatatggtttactccactttattgatactgaattttgctgttctcttcaattatttaaagagttttaaaaccgactgctctaagttggcaaatggaaggattccctatactttaacactatgctgtctttctgccttatataacttatttcttgcattcttctaggacctcattaatcaaggaagagaaaaagttgtagaagcaacaaacagtgtgacagcagtgaggattcaacctcttgaggatataatttcagctgtagtaagctaattggcaattgtcttattccaacctccaatttgtaccctccaccccctactgccatttttttaaatttttaattgttccttcttataaattgatttgcaatagtaaaatactggtaaaatggatggataatgccaaaccgtaacccagcaattttacatagatgttggcacaagagagaaatgggtaaaatgtaagaattgagaaatcaaacatggaaatgtatgcattgtttatataaacattttaattaccagttgtacaaattaaatctaaattattgtttcattccagagatagccagcccaggtacagcagtgaacaacttagtaccctgttttgcatcatgtttttcttcagaaaagaataaaggaaaaggggggtttgaaaccttgggaaatcccgaatatcttaaaataccttaattatttttcctcaattgtacagtaataaggagtaaatagaaaatttttcttttagtggaaggagaacatgaatctctcagaggcccaagtacaggcgttagcattaagtagacaagccagccaggagcttgatgttaaacgaagagaagcaatctacaatgatgtattgacaaaacaacagatgttaatcagctgtgttcagcgaatacttatgaacagaaggctccagcagcagtacaatcagcagcaacagcaacaaatgacttatcaacaagcaacactgggtcacctcatgatgccaaagcccccaaatttgatcatgaatccttctaactaccagcagattgatatgagaggaatgtatcagccagtggctggtggtatgcagccaccaccattacagcgtgcaccacccccaatgagaagcaaaaatccaggaccttcccaagggaaatcaatgtgattttgcactaaaagcttaatggattgttaaaatcatagaaagatcttttatttttttaggaatcaatgacttaacagaactcaactgtataaatagtttggtccccttaaatgccaatcttccatattagttttactttttttttttttaaatagggcataccatttcttcctgacatttgtcagtgatgttgcctagaatcttcttacacacgctgagtacagaagatatttcaaattgttttcagtgaaaacaagtccttccataatagtaacaactccacagatttcctctctaaatttttatgcctgcttttagcaaccataaaattgtcataaaattaataaatttaggaaagaataaagatttatatattcattctttacatataaaaacacacagctgagttcttagagttgattcctcaagttatgaaatacttttgtacttaatccatttcttgattaaagtgattgaaatggttttaatgttcttttgactgaagtctgaaactgggctcctgctttattgtctctgtgactgaaagttagaaactgagggttatctttgacacagaattgtgtgcaatattcttaaatactactgctctaaaagttggagaagtcttgcagttatcttagcattgtataaacagccttaagtatagcctaagaagagaattcctttttcttctttagtccttctgccattttttattttcagttatatgtgctgaaataattactggtaaaatttcagggttgtggattatcttccacacatgaattttctctctcctggcacgaatataaagcacatctcttaactgcatggtgccagtgctaatgcttcatcctgttgctggcagtgggatgtggacttagaaaatcaagttctagcattttagtaggttaacactgaagttgtggttgttaggttcacaccctgttttataaacaacatcaaaatggcagaaccattgctgactttaggttcacatgaggaatgtacttttaacaattcccagtactatcagtattgtgaaataattcctctgaaagataagaatcactggcttctatgcgcttcttttctctcatcatcatgttcttttaccccagtttccttacatttttttaaattgtttcagagtttgttttttttttagtttagattgtgaggcaattattaaatcaaaattaattcatccaatacccctttactagaagttttactagaaaatgtattacattttattttttcttaatccagttctgcaaaaatgacctataaatttattcatgtacaattttggttacttgaattgttaaagaaaacattgtttttgactatgggagtcaactcaacatggcagaaccatttttgagatgatgatacaacaggtagtgaaacagcttaagaattccaaaaaaaaaaaaaaaaaaa

SEQ ID NO: 10901 - DNA, 3071 bp, Homo sapiens
aacaaaatggcggcggcagcggtgtcgctttgtttccgcggctcctgcggcggtggcagtggtagcggcctttgagctgtggggaggttccagcagcagctacagtgacgactaagactccagtgcatttctatcgtaaccgggcgcgggggagcgcagatcggcgcccagcaatcacagaagccgacaaggcgttcaagcgaaaacatgaccgctgagcccatgagtgaaagcaagttgaatacattggtgcagaagcttcatgacttccttgcacactcatcagaagaatctgaagaaacaagttctcctccacgacttgcaatgaatcaaaacacagataaaatcagtggttctggaagtaactctgatatgatggaaaacagcaaggaagagggaactagctcttcagaaaaatccaagtcttcaggatcgtcacgatcaaagaggaaaccttcaattgtaacaaagtatgtagaatcagatgatgaaaaacctttggatgatgaaactgtaaatgaagatgcgtctaatgaaaattcagaaaatgatattactatgcagagcttgccaaaaggtacagtgattgtacagccagagccagtgctgaatgaagacaaagatgattttaaagggcctgaatttagaagcagaagtaaaatgaaaactgaaaatctcaaaaaacgcggagaagatgggcttcatgggattgtgagctgcactgcttgtggacaacaggtcaatcattttcaaaaagattccatttatagacacccttcattgcaagttcttatttgtaagaattgctttaagtattacatgagtgatgatattagccgtgactcagatggaatggatgaacaatgtaggtggtgtgcggaaggtggaaacttgatttgttgtgacttttgccataatgctttctgcaagaaatgcattctacgcaaccttggtcgaaaggagttgtccacaataatggatgaaaacaaccaatggtattgctacatttgtcacccagagcctttgttggacttggtcactgcatgtaacagcgtatttgagaatttagaacagttgttgcagcaaaataagaagaagataaaagttgacagtgaaaagagtaataaagtatatgaacatacatccagattttctccaaagaagactagttcaaattgtaatggagaagaaaagaaattagatgattcctgttctggctctgtaacctactcttattccgcactaattgtgcccaaagagatgattaagaaggcaaaaaaactgattgagaccacagccaacatgaactccagttatgttaaatttttaaagcaggcaacagataattcagaaatcagttctgctacaaaattacgtcagcttaaggcttttaagtctgtgttggctgatattaagaaggctcatcttgcattggaagaagacttaaattccgagtttcgagcgatggatgctgtaaacaaagagaaaaataccaaagagcataaagtcatagatgctaagtttgaaacaaaagcacgaaaaggagaaaaaccttgtgctttggaaaagaaggatatttcaaagtcagaagctaaactttcaagaaaacaggtagatagtgagcacatgcatcagaatgttccaacagaggaacaaagaacaaataaaagtaccggtggtgaacataagaaatctgatagaaaagaagaacctcaatatgaacctgccaacacttctgaagatttagacatggatattgtgtctgttccttcctcagttccagaagacatttttgagaatcttgagactgctatggaagttcagagttcagttgatcatcaaggggatggcagcagtggaactgaacaagaagtggagagttcatctgtaaaattaaatatttcttcaaaagacaacagaggaggtgctgattgtcaggaagttccacaagataaagatggctataaaagttgtggtctgaaccccaagttagagaaatgtggacttggacaggaaaacagtgataatgagcatttggttgaaaatgaagtttcattacttttagaggaatctgatcttcgaagatccccacgtgtaaagactacacccttgaggcgaccgacagaaactaaccctgtaacatctaattcagatgaagaatgtaatgaaacagttaaggagaaacaaaaactatcagttccagtgagaaaaaaggataagcgtaattcttctgacagtgctatagataatcctaagcctaataaattgccaaaatctaagcaatcagagactgtggatcaaaattcagattctgatgaaatgctagcaatcctcaaagaggtgagcaggatgagtcacagttcttcttcagatactgatattaatgaaattcatacaaaccataagactttgtatgatttaaagactcaggcggggaaagatgataaaggaaaaaggaaacgaaaaagttctacatctggctcagattttgatactaaaaagggcaaatcagctaagagctctataatttctaaaaagaaacgacaaacccagtctgagtcttctaattatgactcagaattagaaaaagagataaagagcatgagtaaaattggtgctgccagaaccaccaaaaaaagaattccaaatacaaaagattttgactcttctgaagatgagaaacacagcaaaaaaggaatggataatcaagggcacaaaaatttgaagacctcacaagaaggatcatctgatgatgctgaaagaaaacaagagagagagactttctcttcagcagaaggcacagttgataaagacacgaccatcatggaattaagagatcgacttcctaagaagcagcaagcaagtgcttccactgatggtgtcgataagctttctgggaaagaggagagttttacttctttggaagttagaaaagttgctgaaactaaagaaaagagcaagcatctcaaaaccaaaacatgtaaaaaagtacaggatggcttatctgatattgcagagaaattcctaaagaaagaccagagcgatgaaacttctgaagatgataaaaagca

SEQ ID NO: 10902 - DNA, 4272 bp, Homo sapiens
gagcctcggcccaacaaaatggcggcggcagcggtgtcgctttgtttccgcggctcctgcggcggtggcagtggtagcggcctttgagctgtggggaggttccagcagcagctacagtgacgactaagactccagtgcatttctatcgtaaccgggcgcgggggagcgcagatcggcgcccagcaatcacagaagccgacaaggcgttcaagcgaaaacatgaccgctgagcccatgagtgaaagcaagttgaatacattggtgcagaagcttcatgacttccttgcacactcatcagaagaatctgaagaaacaagttctcctccacgacttgcaatgaatcaaaacacagataaaatcagtggttctggaagtaactctgatatgatggaaaacagcaaggaagagggaactagctcttcagaaaaatccaagtcttcaggatcgtcacgatcaaagaggaaaccttcaattgtaacaaagtatgtagaatcagatgatgaaaaacctttggatgatgaaactgtaaatgaagatgcgtctaatgaaaattcagaaaatgatattactatgcagagcttgccaaaagatgggcttcatgggattgtgagctgcactgcttgtggacaacaggtcaatcattttcaaaaagattccatttatagacacccttcattgcaagttcttatttgtaagaattgctttaagtattacatgagtgatgatattagccgtgactcagatggaatggatgaacaatgtaggtggtgtgcggaaggtggaaacttgatttgttgtgacttttgccataatgctttctgcaagaaatgcattctacgcaaccttggtcgaaaggagttgtccacaataatggatgaaaacaaccaatggtattgctacatttgtcacccagagcctttgttggacttggtcactgcatgtaacagcgtatttgagaatttagaacagttgttgcagcaaaataagaagaagataaaagttgacagtgaaaagagtaataaagtatatgaacatacatccagattttctccaaagaagactagttcaaattgtaatggagaagaaaagaaattagatgattcctgttctggctctgtaacctactcttattccgcactaattgtgcccaaagagatgattaagaaggcaaaaaaactgattgagaccacagccaacatgaactccagttatgttaaatttttaaagcaggcaacagataattcagaaatcagttctgctacaaaattacgtcagcttaaggcttttaagtctgtgttggctgatattaagaaggctcatcttgcattggaagaagacttaaattccgagtttcgagcgatggatgctgtaaacaaagagaaaaataccaaagagcataaagtcatagatgctaagtttgaaacaaaagcacgaaaaggagaaaaaccttgtgctttggaaaagaaggatatttcaaagtcagaagctaaactttcaagaaaacaggtagatagtgagcacatgcatcagaatgttccaacagaggaacaaagaacaaataaaagtaccggtggtgaacataagaaatctgatagaaaagaagaacctcaatatgaacctgccaacacttctgaagatttagacatggatattgtgtctgttccttcctcagttccagaagacatttttgagaatcttgagactgctatggaagttcagagttcagttgatcatcaaggggatggcagcagtggaactgaacaagaagtggagagttcatctgtaaaattaaatatttcttcaaaagacaacagaggaggtgctgattgtcaggaagttccacaagataaagatggctataaaagttgtggtctgaaccccaagttagagaaatgtggacttggacaggaaaacagtgataatgagcatttggttgaaaatgaagtttcattacttttagaggaatctgatcttcgaagatccccacgtgtaaagactacacccttgaggcgaccgacagaaactaaccctgtaacatctaattcagatgaagaatgtaatgaaacagttaaggagaaacaaaaactatcagttccagtgagaaaaaaggataagcgtaattcttctgacagtgctatagataatcctaagcctaataaattgccaaaatctaagcaatcagagactgtggatcaaaattcagattctgatgaaatgctagcaatcctcaaagaggtgagcaggatgagtcacagttcttcttcagatactgatattaatgaaattcatacaaaccataagactttgtatgatttaaagactcaggcggggaaagatgataaaggaaaaaggaaacgaaaaagttctacatctggctcagattttgatactaaaaagggcaaatcagctaagagctctataatttctaaaaagaaacgacaaacccagtctgagtcttctaattatgactcagaattagaaaaagagataaagagcatgagtaaaattggtgctgccagaaccaccaaaaaaagaattccaaatacaaaagattttgactcttctgaagatgagaaacacagcaaaaaaggaatggataatcaagggcacaaaaatttgaagacctcacaagaaggatcatctgatgatgctgaaagaaaacaagagagagagactttctcttcagcagaaggcacagttgataaagacacgaccatcatggaattaagagatcgacttcctaagaagcagcaagcaagtgcttccactgatggtgtcgataagctttctgggaaagaggagagttttacttctttggaagttagaaaagttgctgaaactaaagaaaagagcaagcatctcaaaaccaaaacatgtaaaaaagtacaggatggcttatctgatattgcagagaaattcctaaagaaagaccagagcgatgaaacttctgaagatgataaaaagcagagcaaaaagggaactgaagaaaaaaagaaaccttcagactttaagaaaaaagtaattaaaatggaacaacagtatgaatcttcatctgatggcactgaaaagttacctgagcgagaagaaatttgtcattttcctaagggcataaaacaaattaagaatggaacaactgatggagaaaagaaaagtaaaaaaataagagataaaacttctaaaaagaaggatgaattatctgattatgctgagaagtcaacagggaaaggagatagttgtgactcttcagaggataaaaagagtaagaatggagcatatggtagagagaagaaaaggtgcaagttgcttggaaagagttcaaggaagagacaagattgttcatcatctgatactgagaaatattccatgaaagaagatggttgtaactcttctgataagagactgaaaagaatagaattgagggaaagaagaaatttaagttcaaagagaaatactaaggaaatacaaagtggctcatcatcatctgatgctgaggaaagttctgaagataataaaaagaagaagcaaagaacttcatctaaaaagaaggcagtcattgtcaaggagaaaaagagaaactccctaagaacaagcactaaaaggaagcaagctgacattacatcctcatcttcttctgatatagaagatgatgatcagaattctataggtgagggaagcagcgatgaacagaaaattaagcctgtgactgaaaatttagtgctgtcttcacatactggattttgccaatcttcaggagatgaagccttatctaaatcagtgcctgtcacagtggatgatgatgatgacgacaatgatcctgagaatagaattgccaagaagatgcttttagaagaaattaaagccaatctttcctctgatgaggatggatcttcagatgatgagccagaagaagggaaaaaaagaactggaaaacaaaatgaagaaaacccaggagatgaggaagcaaaaaatcaagtcaattctgaatcagattcagattctgaagaatctaagaagccaagatacagacataggcttttgcggcacaaattgactgtgagtgacggagaatctggagaagaaaaaaagacaaagcctaaagagcataaagaagtcaaaggcagaaacagaagaaaggtgagcagtgaagattcagaagattctgattttcaggaatcaggagttagtgaagaagttagtgaatccgaagatgaacagcggcccagaacaaggtctgcaaagaaagcagagttggaagaaaatcagcggagctat

SEQ ID NO: 10903 - DNA, 463 bp, Homo sapiens
aaatggcggcggcagcggtgtcgctttgtttccgcggctcctgcggcggtggcagtggtagcggcctttgagctgtggggaggttccagcagcagctacagtgacgactaagactccagtgcatttctatcgtaaccgggcgcgggggagcgcagatcggcgcccagcaatcacagaagccgacaaggcgttcaagcgaaaacatgaccgctgagcccatgagtgaaagcaagttgaatacattggtgcagaagcttcatgacttccttgcacactcatcagaagaatctgaagaaacaagttctcctccacgacttgcaatgaatcaaaacacagtctaccctaaagtttgttcatcttttcttcccccacagataaaatcagtggttctggaagtaactctgatatgatggaaaacagcaaggaagagggaactagctcttcagaaaaatccaagtcttca

SEQ ID NO: 10904 - DNA, 13438 bp, Homo sapiens
attttactatctctttccctgtgccttgcctggtttggaaattctggccgtttattgtttaagcaaaacaaagctataatattgtaagattgcttaatttattaaatttttttgtggatatttaaacgaaggtgacaatctgttttcttataggtggtaagttttcttcatacagttcttttgtgtgacaaactggatttcagcacggcgttagtggtttgtcctcttaatactgctttgaattggatgaatgaatttgagaagtggcaagagggattaaaagatgatgagaagcttgaggtaacttattttaaatgttttctattattaaaatagtcacatgaaattcatatagtaaactatttttaattttttttaatttttaatgttttttaaccagtgatgcatatttcagtgggaatatttaatattcacatgtttttagtagctacttaaaaaaatctttatttccccacaaaaggtttctgaattagcaactgtgaaacgtcctcaggagagaagctacatgctgcagaggtggcaagaagatggtggtgttatgatcataggctatgagatgtatagaaatcttgctcaaggaaggaatgtgaagagtcggaaacttaaagaaatatttaacaaagctttggttgatccaggtaaggtattaatagacagtgacataaagaagcaagttgaataaaaaatgtgtttatattttaacaaatagtaattgcacagctactaagtatctggtctttgttgtggttatccttcaggtttttgccttttagaaaattcttagtatttcaatagaataaaatcacccttaatgtcgccagctgttcagaatttatttgctgagtctgaaagtgtttagggttttaggggataccttgtaaacacttaaaaatgcatcaaatgcctgtgttgcaatcaaagattcttccagctatccaaatattaggtgataacaagagctctctccatatcctgaaaacagtttgtgtctttccaaacttcatgtcattagaagaattgctgcttgcttatctccttttaaggggccatcagtatgaaaggttaatattttcaatactgttgatccttatgtgatagtaatctgatgtgagagccagatgttgatatatttgccacttggaaaagcaacacgttgtactgtctgcaaaactaaaattattttttaatctacgattattaatttgtgcaactttttcttcatatgtttatcttgtcatatcatatttaagacactattgaggttttatttttgttgagaaagtctgggtaattgtcattgtcaaagtgatagtaatctttagaatccttggctttgcctcttttttaaagataatgaggtagttaatacatagcaaaataactgccatcacaaatctaaggcctaataataagtttatctctttcccacgattaaataggtgtttataaatcttgtggctggtttattgttgaaaaattataagctagtgtctagtatcattgtagcagattttttccacaagatttccttgaaactgtttaatacaacagtttcaggtgcttagtgtacttatttgttcatgaaaaaaatgaagaaaaaaaaaattaaagcttctaacatgaagggtaacatttgtcattgccatattttatcatttagtgacatttaaaaaaaatttttggccgggcatggtggtgcactcctgtagtcccagctactcaggaggctgaggcagaagaatcgctcaaacctgggagctggaggttccagtgagccaagattgtgccactgcactcccatctgggtgacagagcgagactccatctcaaaaataaaaaacaaaaaaacaaaaaaaaacttttcattttggaataattttctgtttacatgaaagttgaaaaggtagtgcagagagttcccatataccctacatctggttcctcaattgttaacatcttacattgccatggtagatttgtcaaaactaagaaattgacacattattattaataacttcaaactgcatttgtattgcaccagtttttctatccagggttctacattgtatttagctgtcatgtctctaacagtcttctggtctatgacggtttctcaatctttattttttcattatctcatcagtcttaaggaggaccgtccaggtagatatcctgtagagtgttctctgatctgaatttatagtttttcttgtgattagactgagattagactgaggttttgaaagaatataccagaggtgacataccctttttgtcacatcatatctcatatcgggggtacatgataagcacttgctgttactgatgatgttaactttcatcacttggctagggtagagtttgtcaggtttctctcctgtagagctgctacttttacctgtccctcatctgttcattggaatccagtcactcaatctagcccacctgaatgggaggatggtggaaattaagctgtatctcctatagtgggtaatatctacacataaaatttggatttttttaaagaaaaaattatcttttcttacccatttatttagcctttgatttatataattatatactcatctatttttagttcgtgcattggactataaaccattactgcattttttttttttttttgctcaaattgtttcactttgaccattgggagctttttttaaggtgaggtcctctaccctttgatatgtccctatccttttggctttgagcactttattactttctggcattacaggatgctccaggttcatgttatattgtcctggccccagaatcagccatttcttgaagacatcatggttccttttactgaaaattgacatttacaaatgtaaacacacccatataatttgcaaatatatccttccattctgtgagttgtctttttacttttttatatcatcttttcagtactaatctttaaaattttgattacatttaatttacctatttttttcttgtgttgcttttgcatttagtgcatatccaagtattcattgcttaatcgaaggtcatgaattttttcacctgtgttttcttattttatagttctagctcttgtatttatgtttatgatctattttcagtttatttttgtatatggcatgaggtgggagtccaacttcattttttgtattttgatatccagttgttctaacaccatttgttgaaaagactattctttcttcattgaagagtcttgacaccattgttgaaaatcaattgaccatagatgtatgtgtttatttctaggctctcaatattattgtattgatctatatgtctgtccttatgccagtgtgacattgttttaattactgtagctttgtggtaagttttgcaatcaggaagaagtcctacagctttatttttctgtctcaaagttgttttgctatttgaggttccttgaaatttcatttgaatttgatgattggcttttatatttcctcaaagaaactagctgggattctgttagatattgcattgaatctgtagattaatttgaggaatattgccatcttaacaatattaaatcttcccctccatgaacatctaatttctctccgtttatttaggtctttaatttcttttaataatgaaatttgatttaggtcctttaatttctttagtgtaaaagtcttggacttattttcttaaatttattcctaaatattttattctttttgagccttttggaaataaaattgttttaattttattttcagataattctttgttagtgtatagaaatacaacagatttttgtatactgattctgtatcctgcaacttagttgagtccatttataagttctaatagttgtatgtgtgcgctcacgcgtgtgtgtgcgcgcgcacgcacgcgatttagttttctattaagaaaatcatagtctatgagtagaaatagttttactttttcctttccaatatgaatatcttcaacttctttttcttgcctaattgcccttcttagaaatttccatacaatgtcgaacgtaagtggtcagagcagttggttgtcatgtttttgatctcagggaaagctttcagttctccaccattaagtatgacattagctgtggatttctaataggtgtcttttatcaggttgagtaagttctacattgggttatattttttgtttgttttgataattaaaaaaataaatacctagattacccttgttaaaacttaagaggggctggtttctccattaggttttactggatgttcttcaggaaactgaagctctacttttattttcttttccagagtatatataagtattagagatagttcctctgccatagctgggtaaccatctgcaacaagaatattctaatatccatcatgtataacatggaatatattaaaactgttgttaagttttaaggtttagtgatagtatctagatataattttctttgccacctaagtctaaagtgtcaggatctgttcagtacttctaaatttattagaagggatctgttcagtataacacttaattttccagtacatgttttccattttatgcccaatttatcttctctgatttggaacaaattagtgatagtgaagaatcatataaatggcagcagagtatgtgaagactgaagtttgggtgtaatgttaaagaaaagtctaaattgaagttcaagatggaaacaaaatgtcagaaccagacagttttgggtatgagattcttaaggatgagctgaggttgtaaacttataaggtaggctattagatcagaagcctggaaaattgggagtatgtattaggattggaaacagtgtttagagctgaccagagttaagatagtagtgttcatctttcaacttagctgctctggttatctcttcctgcgtaacaattatcccaagccttagtagcttaaagtgacaagaatcagctgggtgcaatggctcatacctgtaataacaatactttgggaggccaaggcaggaggattgcttgaggctgggagtttgaggccagcctgggcaacatagtgagaccccatatctacaaaaaaataaaagaattaaccaggtgtggtggcacacacctgtagtctcagctattcaggaagctgacatgggatgattgcttgagtccaggagttcaaggaagcagtgaactatgatcactgagatcataatcatcacagagtgtgagacccagtttcttaaaaaagaaagtgacaacattttgttaactttcctagttttactgggtcagggatttaatagaggtttacttggacagttctaaacattttatcaacttttctctctaatatctttatggttttttatgtaaaaaaattcaccaataggtggcaatgtaacactgaaaaataatttgcatttgttactattataatagcatgtgacaaaacctttatttgacctttcttccctaacttaccatttgttttgaggcatatttttctacttaatgtacttaaacaatctggtggagttttctaattcacattactgtttttagaagaatgttccacattttgtagcttgagaggacataatttttatgtgtgtgcatgaatgtgcatatgcacaggattaactcaaggtactgtttgctttaagcaataagatatatctatgtaattttataaaataatgacaggtttccatagtgtattgaaccatcttaagttaacagactcttttagtcaggcttgaatttttgaacagaagaaattttcttcaagtctttctctaaattcctgttcttctgctctccagagcctcatggctgccattccccctgtagtttctgtataattatttataagtgtaggtattttgaaaccctcctatctgatatatatatgtcattgtttgggaattaagttttctagaaagtatataaggtaacaaacatttcattttatgtaagtatgtatgtatgtatttagggggcagggagatggggatctcattctgttacccaggctggagtgcagtagcatgattatagctcactgtagcttcaaatcctgggctcaagtgatcctcccagttcagccttctgaggagctaagactacaggagtgtgccgccatgcccaactacatttttttttttttttttggtagagacagggtcttactgtgttgcccaggctggtctcgaactcctgacaacacctagataattatttggagatgaggatctcactatgttacccaagctggtctcgaactcctgacacacaactaattttttggagacgagggtctcgttatgttgcttaggttagtcttggcctcctggcctcaagcaatccttctgcctcagcctcctgagtagtagctggcattacaggtgtgagccaccaagtccagctaaaacttactcctttcgaacattaaaaatacttatttttaattttttatgttagtaaatgttatatacatttctatcttataattcatattctatttaatatgatgaataacatgtttaatatatgaataacaattttaactttttcattgactcagggttattaatgagtgcatttacttttatttttattttatttaatttttttttttgagacggagtctcactctgtcacccaggctggagcgcagtggcgcgatctcggctcactgcgagctccgcctcccgggttcacgccattctcctgcctcagcctcccgagtagctgggactacaggcgcctgccaccacgcctggctaatttttttttcttgtatttttttagtggaaacggggtttcaccgtgttagccaggatggtctctatctcctgacctcgtgatccgcccgtcttggcctgccaaagtgctgggattacaggcgtgagccaccgcgcctggcttacttttattcttaattcttctagttcttcagatatccgtactaaccatagggctaccactctccttccattgccatgccaacaaatagttcttttaagttaaagaaattataaaagtaatacatatccttaagcaaaataaaaacagaagaaaatgttgtatattgaaaagtaaaagttccctacctcctagtctcattattgtttcatttatatccgtataggaattttttgtgcttacagaagcatgtattctccttatttggtattgcaacatttaggtggtcctcaaagccaccctcaggcttggtaactcataagaaggactcacagaactcagaaaatccattagactcatggttatggtttattacagcaaaaatatacaaatgggatcataatatggataactattctgcaacacactcctttttatttagtaatatatttgtcatatctttcaaggtttgcacatagagatatacatcattttttcagattatttatttttctataagttattggggtacaggtggtatttggttacatgagtaagttctttagtggtgatttgtgagatcctggtgcatccatcacccgagcagtatatgctacaccatatatgttgtcttttatcccttgccctcctcctactcttaccccaaagtccccaaagtccgttgtgtcattcttatgcctttgtgtcctcatagcctagcttccacatatcagtgagaacatttgatgtttgcttttctattcctgagttacttcacttagaataatagtcccaagtctcatccaggtaattgcaaatactgttaattcattcctttttatggctgtgtagtattccatcatatatatatatatatatatatatatatatatatatatatatatatatatatatatgccacaatttctttatccactcattcattgatgggcatttgggctggttccacaattttgcaactgtgaattgtgctgctataaatatgcatgtgcaaatatcttttttgaataatgacttcttttcctctgggtagatacacagtagtgggattgctggatcaaattgtggttctacttttagttctttaaggaatctccacactgttttccatagcggctgtactagtttacattcctaccagcagtgtagaagtgttccctgattgctgcattcacaccaacatctactgttttttgattatggccatgcttgcaggagtaaggtggtatcacattgtgtttttgatttgcatttcactgatcattagtgatgttgagcattttttcatatgtttgttggctatttgcatatcttcttttgagaattgtctgttcatgttcttagcccactttgtggtaagattgtttggtttttttcttactgatttgtttgagttcattgtagattctggatattagtcctttgtcagatgtatagatagtgaagattttctcccactccgtgggttgtctgtttactctgctgactgttccttttgccatgcaaaagctctttagtttaattaggtcccggctatttatctttgtttttattgcatttgcttttgggttcttgaccatgaaatccttgactaagccaatgtctagaagggtttttccaatctcatcttctagaatttttatagtttcaggtcttaggtttaagtccttaatccatcatgaggtgatttttgtataagatgagagacgaagatgcagtttaattctcctacatgtgggtagccaattatcccagcaccatttgttgaaaagggtgtcttttccccactttatgtttttgtttgctttgtcgaagattagttggctctaagtatttgggtttatttctgagtcctctattctgttccattggtctgtgtgcttatttttataccagtaccaagcttttttggtgactgtggcctttacagaatagtttgaaatcaggtagtgtgatgcctccagatttgttctttttgcttagtcttgctttggctatgcgggctcttttttggttccatatgaattttagaattgttttttctaactctgaagaatgatggtgttattttgatggggattgcattgaatttgtagattgcttttggcagtatggtcattttcaccatattgattctacccattcatgagcatgggatgtgtttccatttgtttgtgtcgcctatgatttctttcagcagtgttttgtagttttccttgtagaggtcttttgactcctttgttaggtatattcctatctttcttgtttatttatttatttatgtatttatttatgcagctattgtaaaaggggttgagttcttgatttgattctccacttggttgctgttggtgtatagaagagctactgatttgtgtacattaatcttgtatccggaaaccttgctgaattcttttatcagttctaggagctttgtggaggagtccttagggttttcaaggtaaacgataatcgtcagcaaacagggacagtttgacttcctctttactgatttggattccctttatttctttttttctttttctttttctttttttgagatggagtctcgctctgtcgcccaggctggagtgcagtggtgcgatcttggctcactgcaagctccgcctcccgggttcacgccattctcctgcctcagcctcccgagtagctgggactacaggcaccggccaccacgcccagctaattttttttgtatttttagtagagacggggtttcactgtgttagccaggatggtctcgatctcctgacctcgtgatctgcccgctcagcctcccaaagtgctgggattacaggcgtgagccaccgcacccggcccagatcccctttatttctttcgtctgattgctctggctaggacttccagtactatgttgaagaggagtggtgagggtgggcatccttgtcttctttccgttctcagagggaatgctttcagcttttctccattcagtattatgttggctatgggtttgtcatagatggcttttattacattaagatatgtcccttgtatgtcgattttgctgagggttttaatcatatagggatgctggattttgtcgaatgctttttctgaatctattgagatgatcatgtgatttttgtttttaattctgtttatgtggtgtatcacatttatttacttgtatgtgttaaaccatccctgcatccctgatatgaaacccacttgatcatggtggattatctttttggcatgttgttggatttggctagctaatatttttgttaaggattttagcatctatgttcattgaggataatggtctgtagttttcttttttggtcgtgatctttcctggttttgctattacggtgatgaatagggatgaattagggagggttacttctttctctgtcttgtgggatagtgtcaaaaggattggtaccaatgctttgaatgtctggtagaattctgctgtgaattggtctggtcctggacttttttttcttggtaatttttaaattgccatttcagtctcgctgcttgttactggtctgttcggggtatcaaattcttcctgatttaagctaggagggttgtatttttccaggagtttatccacctcttgtaggttttctagtttatgtgcgtaaaggtattcataatagccttgaatgatcttttgtgtttcagtggtgtcagttgtactatctcctgtttcgtttctcagtgactttatttggattttctctcttcttttcttggttaatcttgctaatgttctatcaattttattttatcttttcaaggaactagcttattgtttcatttatcttttgtattttttgttttgttttgtttcaatttcatttagtactgctctgatcttggttatttcctttcttctgctgggtttgggtttgttttgtttttgtttctctagttcctagtgaccttagattgtctgtttgtgctctttcggactttttgatgtaggcgttcagggctatgaactttcctcttagcactgcctcagctgtatcccagaggttttgataggctgtgtcattattgtattcaggtgggtgtattcagctcccacgcaaaccgaaaggctggtcttgtctcactcccatggtgtaccgcaccccctacccctccagcgccgaaacagccccgagtgtgtttgagtctggcttgaaaacttgtccccggctttccacctccaagctgcaaaagaaaagggctttagttcatcccccacctgtgaagtctgcaatctggatttgcgccctccccggagttctggccaggaggcttcttgccccattcaaattgttaaaaagttcagctagagaagtccttctccctgtggagttttaccctctgctctgatggccatcctcctgatggatccctgtgttgccaggcaggaatgggctgcttggggatccagcaagctcccagtgcctttctgctacttcctctacccctgtatttcgctcggcttggctttctaacttgactcaactccagctaaagtcaggaatttctccagcaaacagaccttcagcttctccagtgggggtgtgtctacctcattaattttaactctgtgacttattccattatcccatggtttaagccccatttaccagatcccctctgacaaatttttaggttgttttcaattttcctccgtaacaaaccgtgctgcagagaacattcttttatgtatctttgggtgcctgtggaagagtatctttgggaccaattcctagaaattgaaatatgggtcaaagggtttacacattttgcattttgataattattgtaaaattgacttccaaaatttttgatactaatttagactcccacagagtgtatgagagtacccatttcaacgcatcctcatggataccgaatattaagtggtaaaaccatttaaatcactgctgtaaaaggcatttttttctctgtagaaaatgttttcagattcaaagtaagggatgcataatttttaaatacaaagctagagattttagttttacaaaatattagtttttttttgttgttgttgttgttgtttttttttactatttgtgtagccccaactgaatactgaataacagttgttattatttgatctgtcatactgaagctgttacttttgaagtcatgtaaaagttgcattttctctaatgcttaccagatgggagatagtttgacagctgctttgttgaaatcagcaattaagtaatatgtgtgtatatgttaaccagcaagcaaatagagtatgtattatgccctggaaaaaatatatatcagctgggcgtggtggcttatgccggtaatcccagcacttgggaggccaaggcgggcagatcacttgaggtcaggagtttgagaccagcctgaccaacatggtgaaacctcgtctttactaaaaatgcaaaaaaattagccaggcatggtggcgggcacctgtaatcccagctactcgataggctgaggcaggagaattacctgaacccgggaggtggaggttgcagtgacccaagattgtgccactgcattccagcctgggcgacagagggagactccatctcaaataaaaaagaaaagaaaagaaaaaaaatatgtatgttattttaacaaataagcctttagtatttcttctaaaagagtccacagatgctgtggaacatatttgttcaggtacaaatgcattccatagtaataaaatgttgttattttttatattgcaatcccaaatattttctgagtttaagcttttaagatcttttatagcttaaaagctgttctccctaccctccatacccatgtaacaaccagtttcactttcttttatcagttaaaatttttccccagcaatgaatgttagttatttggactaagtgggaagtattatatggtctgttgtgacatatattattcttaaagtgtaacttttgaaatttgtcttttcatgtatatatacattgctcttagtctttgctgatagtttaagttgatatactaatgctgaaatagctttaaagacttttcaattttaaaagacatttttaaaaataggctatgtctgttgggggaactttttccctcttgttgtttttatttttgcttatttttgtaaactcagaggaccctgactaccatttatagtggtatttcaatgctctaccatttggatataattaatatagttagtgctgtattaaccaaatacgggagcagataaaatatgtttatacttacaacgatgtcattttatcttcctgtaagatcagcactttaaagggattaactttatttacttaaatggatcacattttcagttttattatatattaattgtgttatttttctgtttatttttgtaggccctgattttgttgtttgtgatgaaggccatattctaaaaaatgaagcatctgctgtttctaaagctatgaattctatacgatcaaggaggaggattattttaa

SEQ ID NO: 10905 - DNA, 583 bp, Homo sapiens
attttactatctctttccctgtgccttgcctggtttggaaattctggccgtttattgtttaagcaaaacaaagctataatattgtaagattgcttaatttattaaatttttttgtggatatttaaacgaaggtgacaatctgttttcttataggtggtaagttttcttcatacagttcttttgtgtgacaaactggatttcagcacggcgttagtggtttgtcctcttaatactgctttgaattggatgaatgaatttgagaagtggcaagagggattaaaagatgatgagaagcttgaggtttctgaattagcaactgtgaaacgtcctcaggagagaagctacatgctgcagaggtggcaagaagatggtggtgttatgatcataggctatgagatgtatagaaatcttgctcaaggaaggaatgtgaagagtcggaaacttaaagaaatatttaacaaagctttggttgatccaggccctgattttgttgtttgtgatgaaggccatattctaaaaaatgaagcatctgctgtttctaaagctatgaattctatacgatcaaggaggaggattattttaa

SEQ ID NO: 10906 - DNA, 583 bp, Homo sapiens
aacaaaatggcggcggcagcggtgtcgctttgtttccgcggctcctgcggcggtggcagtggtagcggcctttgagctgtggggaggttccagcagcagctacagtgacgactaagactccagtgcatttctatcgtaaccgggcgcgggggagcgcagatcggcgcccagcaatcacagaagccgacaaggcgttcaagcgaaaacatgaccgctgagcccatgagataaaatcagtggttctggaagtaactctgatatgatggaaaacagcaaggaagagggaactagctcttcagaaaaatccaagtcttcaggatcgtcacgatcaaagaggaaaccttcaattgtaacaaagtatgtagaatcagatgatgaaaaacctttggatgatgaaactgtaaatgaagatgcgtctaatgaaaattcagaaaatgatattactatgcagagcttgccaaaagaagatgggcttcatgggattgtgagctgcactgcttgtggacaacaggtcaatcattttcaaaaagattccatttatagacacccttcattgcaagttcttatttgtaagaattgcttt

SEQ ID NO: 10907 - DNA, 13988 bp, Homo sapiens
tcttttctaaaccagtaggtgatgtagaatttcaagttttaaatcacaatgtgaaaagtgcataatttttttgtttttagggactgaccatgcgtttcaacataccaactgggaccaatttaccccctgtcagtttcaactctcaaactccttatattcctttcaatttgggagccctgtcagcaatgagtaatcaacagctggaggtgagttgtgaagtacaaaagtagtttgacatgaattaaaggcaatttcaagtgccttgttgttgagggttccctatgcagaaatatcacattctccaaaagattacccctgaatagacgaataaatttttgttttatttgttgaccgttttgaaccaacatgatgttgtaaaatgtggtttgttcagagcacaaaggaatcagtcggtgaattaatgtagtttgaattattttaattaagaaacaatagggctgctgactcgcttgggaaatagcaccttcttcagttataaaatagttataataaattgctatcttactgtttgaaagtaagataaatatactcattaacttctattctagtgcattatagatgcacaattaaatatataatgcccaatattatgaaataaatgatttaaagctagaatcaattgtaaattaaataggaaagactgggtttttattataccaataatgacttaattgaatctgaaacacattataaaatgtgcttatggattcttctgcattattaaattattggtgtgataaaactcaaacttttttaatcttcctaacaagactctttgagcattgatatggtttactccactttattgatactgaattttgctgttctcttcaattatttaaagagttttaaaaccgactgctctaagttggcaaatggaaggattccctatactttaacactatgctgtctttctgccttatataacttatttcttgcattcttctaggacctcattaatcaaggaagagaaaaagttgtagaagcaacaaacagtgtgacagcagtgaggattcaacctcttgaggatataatttcagctgtagtaagctaattggcaattgtcttattccaacctccaatttgtaccctccaccccctactgccatttttttaaatttttaattgttccttcttataaattgatttgcaatagtaaaatactggtaaaatggatggataatgccaaaccgtaacccagcaattttacatagatgttggcacaagagagaaatgggtaaaatgtaagaattgagaaatcaaacatggaaatgtatgcattgtttatataaacattttaattaccagttgtacaaattaaatctaaattattgtttcattccagagatagccagcccaggtacagcagtgaacaacttagtaccctgttttgcatcatgtttttcttcagaaaagaataaaggaaaaggggggtttgaaaccttgggaaatcccgaatatcttaaaataccttaattatttttcctcaattgtacagtaataaggagtaaatagaaaatttttcttttagtggaaggagaacatgaatctctcagaggcccaagtacaggcgttagcattaagtagacaagccagccaggagcttgatgttaaacgaagagaagcaatctacaatgatgtattgacaaaacaacagatggtaagaattctgacgtctgactatttctaggttatgtttaattttcttgactttataataagtttgtatgacatctacgtcagtaattattcctactatggagggatggatagtcattgataattctggaagaaatgtaaaaaacccaggaatgtcaagtaaaagtaatatattttgttacaaaaatgcaacagctacctaaatgggaatccttgaagtttacatatgatctagtccatataattttatttctcatatattctggacatctacgtaggaatttttgccagagttttaccacatttgccaattgtattttatttaacttttaatttttgtgagtatataataggtatatatatttatggggtacataaggtatattgatacaggtatacagtgcataataatcacatcagggtaaaggatatctatcacctcaagcatttatcctttctttgtgttacaaacaatccagttatactcttctagttatttttaaatgtgcaataaattatttttgactgtagtcaccctgttgtggtatcaaatactagatcttattcattctaactatacttttgtacctattaaccatcccccattaccccactccctgctacccttctcagcctctggtaactaccattctactctcttatcatcatgagttcaattgttttagtttttagcttccagaaataagtgagaacatatgaactttgtctttctatgcctggcttatttcacttaacataatgatctccaattctatgcatgctattgcaaatggcagtatctcgttcttttttatggctgaatagtactccattgtatatatgtaccacatattctttgtttattcatctgttggttgatacttaggttgcttccaaatcttaatgttgtgaacagtgctacaataaacatgagagtgcagctacctcttcaatatactgatttcctttcttttgggtataggcctagcagtgggactggtgaatcatatagtacctctgtttttagttttctgaggaacctccaaaccgttctccatagtgcttgtactaatacacgttactaacaacagtgtacacaagttcccttttctccacatcctcaccaatattagttattgcctgtcttttggataaaggccattttaactggggtaagatgatatttcattatcttttttgtttggttggttggttttgtagagacggggtctcactatatttcccaggctggtctcaaactctcgggcttaaacgatcctctgacctcagcctcccaaagtgttgggattacaggcgtgagtgaccatgcccagcctctcattgtagtgttgatttgcattatctaatgactgatgatgttgagtgccttttcctatgcctgtttgccatttgtatgtcttctttcgagaaatatctattcagatattttgcccatttttaaatctgattattagattttttttcctatgcagttgtttgagctccttatatattctggttattaatcccttgtcagttggatagcttgcaaatattttctcgcattctgtgggttgtctcttcgccttgttgattgtttcctttgctgtgcagaagctttttaacttagtggtatcctgtttgtccattttttatttggttgcctgtacttgtgagatattactcaagaaatctttgccagttcaatgtcctggacagtttgcccagtgtttttctgtagtagattcatagtttgaggtctcagatttaagtctttaatccattttgatttgaatgttgtatatggcaagagcttggggtcttctttcattgttctgcgtatggatatccagcttccacagcaccatttattaatgagactgtcctttcttcaatgcatgttcatggcacctgtgcaaaaaatgagtttactggtgtgtggatttgtttctgggttctcacttctgttctcttggtctgtgtgtctgtttttatgccagtaccatgctgttttggttactgtagctctgtagtatcatttgaagtcaggtaatgtgattcctccagttttgttctttttgctcactacagctttgcctattgtgggtcttctgtggttccatgaaaagttcagaattttttttttgtttctgtgaagaatgtcattggtattttgataaggatgcattgtatctatggattgctttgggtagtatgggcattttaacaatattaatttatccaatccatgaacatggaagatcttttcatttttttgtaccctcttccatttctttcatcagcattgtgtagttttcattgtagacatctttcacttctttggttaagtttattcctaggtatttaattttgactgtggctactgtaaatgggattactttctcaatttctttttcagattattcactgctggcatttagaaatgctgctgattttgtatgctgccactttactaagtttgtttatcagttctaaaatatttttggtggagtctttaggtttttccaaataccagatcataacatttgcaaacaggataatttgacttcttcttttccaactgggatgccctttatttctttctcttgtctgattgctctagctatgacttgcagaactatgttgaataacagtggtaaaagctggcatccttgttgtgttccaatttttagaagaaagtctttcagtttttccccattgagtacgatactggctgtgagtctgtcaatatatggcttttattgtgttgaggtatgttccttctataaccgtattttgaggatttatatcatgaaaggatcttgaatattatcagatgttttttcagcatcagttgaaattatcatacagtttttgtccttcattctgttatttgatgtatcacattgattgatttgcatagttaaatcatccttgaagcccttggataaatcccacttggtcatgttcaacaacacctttttaatgtggtgttgaattgtgtttgctattattttgttgagaatttttgcatgaatgttcatctcagatattgccctgtagttttctttttttgatgtgtttgtctggttttggtattaaggtgttactggccttatagaatgtgtttgaagtattccctcctcctctacttgtcacagcagtttgaggaagattggtattagttcttctttaaacgtttggtaaaattcagcagtgaagacattggtttccaggcttttctttgctggaagactttttattacagctttaatctcgttacttgttactgctctgttcagattttggatttcttaatgtttcaatcttggtagattgtatgagtcttggaatttatccatttcttctaggttttccaattttttgcatgtagtttgtcataggagcctctaatgatcctttgaatttctttggtaacagttttaatatctactttttgatctctgattttatttacttgaatcttctcctttttcttaatctggctaatggtttgtcagttttgtttatcttctcaaaaaaccaactttttatttatttctgtgctgatctttattatttattttactaatttggggttttattttcttttgtttttctagttctttaagatgcattggtaggtgtttgttttttttttcttttctgatgcacgcacttagagctgtaaactttcctcttagtaatgcttttgctgtatcccataggtttttgtatgttgtgtttcctttatcattcgttttaagaagtttttcagtttttttcttaatgttttctttgacccactggtcattcaggagcatattgttcaattttcatgtgtttatatagtttcaaaaattcctcttgttattgatttctagttttattccattgtggtcagagaagaaacttgatatgatttcatttgtttgaatgttttaagacttgttttgtggcctaatatatggtctttccttgagaatgatttatgtgccaaggaaaagaatgtatattctgtgaccattggatgaaatgtcctgtaaatatctatttggtctatagtgcagaataagtccgttggttttttttattgattttctgtctggatgatctgtccaatgtgtaaagttgaggtgtcgaagtctccagctattattattttggggtctgtctctctatttagctctaataatatttgctttttatatctggtgctccagtgttgggtgcacatatatttacaattgttgtatcttgttgctgaattgacccctttatcattatataatgaccatcgttgtctctttttatattttttgtcttgaaatctgttttggctgatgtaagtatagctagtcctgctcttttttggtttccattttcatgaaatatcttttttcatccctttattttcactgtatatgtgtctttataggtacaatgtatttcttacaggaaacagatggttgggtcttttttaaaaatccattcagacactatatgtcttgattggagagtttagtccatttatattcactgttattctgtttttaaactttcattttaagttcatggatacatgtgcaggtttgttatataggtaaatctgtgtcacgggtttgttgtacagattattttgtcacccaggtattaagcctagcacccataagttatttttcctgatcatctccctcctctcagcctccaacctctggtcagccccagtgtctgttattgccctctatgtgttcatgtgttctcatcatttagttcccactttttagtgaaaacatatggtatttggtttcctgttcctgcattagtttgctaaggataatggcctccagctccatccatgttcctgcaaaggacatgatcttgttcttattattaggtttatagaagatattaataaaattaaataaatagattgacaacagtcttgaaaatgtgtgctgagatctgggctcagctttacaagccgagaatgagaaagtagatttttgatctctgagatttctaatagttgagtcagctactgttggaatgagaaaagctctagttgtctataacatgttgaatttgtcagactctttgtgatgagctgcgttcaataaaccaaatgcagaggcattagtagcaggctatggctctgctagctgaggtttggaaatcacaggatgcaacgcctcaatttttgctgtggaacttgataatggggcattccgtaatgaatgccgtatgaggggacgtgagtatgagtaggcagagggcacatgtatctagagcttcagtcactgtaggtatcaggaagaaaggcacatttagaatacacctttacacacgtggatttttttttttcacccctcctgaactttttctttatttttattttttatttccacattttctttatccagtctaccattgataggcatttagctttattccatgtttttgcttttgtggatagtgctgcaatgaacatatacgtgtgtcattataatagaacaatgtatgttcctttgaatttatacccagtaataggattgcagggttgaatggtagttctgtttttagctctttgaggaactaccacactgctttccacaatggatgaactaatttacactcccaccagcagtgtataagcattcctttttctctacaacctcaccagcatcttttgactttttaataatggccattctgactggtgtaaggtatctcattgtggttttgatttgcctttctctaatgatcagtgatgttcagctttttttcatatgattgttggccacgtgtgtgttttcttttgcaaagtgtctgttcatgtcctttgcccactttttaatggggttgttattttcttctatatttctttaagttccttatagataatggatattagttgctagatggatagtttgcaaaacttttctgcaattctgtaggttgtctctctactctgttgatagtttcctttgctgtgcagaagctctgctgtgcagagtttagttggatctcatttgtccatttttgcttttgttgcaattgcttttggcatcttcatcatgaaatctttgcccattcctatatccagaattatattgcttaggttgtcttccagggtttttatagttttcgggtttacatttaagtattgaatgcatcttgagttgatatttgtatatggtgtgtaaggagggggtccagtttcaatcttctccctgtggctagccaattaccccagcactgtttattgagtagggagtccttttcccattacttgtttttgtcaactttgtcaaagatcagatggttgtaggtgtgtggccttatttctgagctgtctattcagttccattggtctgtgtgtctttttgtaccagtaccacactgttttggttactgtagctctgtagtatagtttgaagttgtatagcataatgcctccagctttgttcattttgcttacgattgccttggctattcaaccttttttttgttgttccatatgaattttaaaatagttttgtctagtttatgaagaatatcattagtagtttgataggaatagcattgaatgtataaattgctttgggcagtatgaccatttcaacaatattgattcttcctatccatgagcatggaatgtttttccatttgttttgacatctctaatttcttttagcagtcttttggagttctcattgtagagaccttttacctccctggttagctgtattcctaggtattttattctttattgtggcagttgtgaatgggattgcatgcctgatttgcctctttgcttgacttttgttggtgtataggaatgctactgatttttgtacattgattttgtaccctgagatattgctgaacttgtttatcagcttaagaagcattttgggccaagactagagttttctagatacagaatcatggcatctgcatactgtgatagtttgactttctctcttcctatttggataacctttatttatttctgtttcctgattgctctgcccaggacttctaatactatgttgaataggagtggtgatagagggcatccttgtcttgtgccagttttcaagatgaatacttccagcttttgcccattcagtataatgttggctgtgggtctcctcctggcggaattccagaggcccgaggcaagagccagttgcttcttgccacttcaactcactcattcccctggagttcttgtgggccaggaatgagtcctggtgtgcggtagccccattcagggttcccagcttcctcctccaaccaagcttctgtttcttccctccgcccactctcattgccttctctctgaagatctgttaggagtgtgccagtcatccttgtctttcggtggcagcttttccaccttgctgcatctagtcatccatcttgcccaaccccattattctttttttttttttttttttttttttgagacggagtctcgctctgtcgcccaggctggagtgcagtggcgcaatctcagctcactgcaagctccgcctcccgggttcaggccattctcctatcttagcctcctgagtagctgggactacaggtgcccgccaccacgcccagctaattttttgtatttttagtagagacggggtttcaccgtgttaaccaggatggtctcagtctcctgaccttgtgatcctcccgcctcggcctcccaaagtgctggggttacaggcgtgagccactgtgcccagcctccaaccccattattcttgataagttaggacttactcctgccattttgttatttgttttctggttgttttgtgatccctgtcttccttcttttcttcctatcatccttttagttaaagcaattttctgtggttgtatgttttaatttcttttattattatttttttgagacggagtttcactgtgttgcccaggctggagtgcagtggcatgatctcagcttactgcaatctctgccttcccgggtttgagcgattctcctgcctcagcctcctgagtagctggaattataagcacccgccaccatgcgcagctaattttcacatttttactagagacagggtttcaccatgttggccaggctggtctcgaactactgacctcaggtgatccatccaccttggcctcccaaagcgctgggatcacaggcctgagccaccgcgcccggcatgatttcttgcttatagttttttgtttatctgttgtatgtttgtttttttgaagttaccatgaggcttgcaaataatgtaatgcatcattttaagctgatgataacactgattgcataaacaagcaaacaaagtaacaaacaagcaaagagaaaactaatgttctattgccagtgagttttataccttcatgtaacttttcgttgtttgttaacatccttttctttcagattgagaaactccctttaatatttcttgtaggacaggtttgatattgaaattcctcagcttctgtttgtgtgggaaagtctttatttctccttcacatttgaagcatattttcaccagatatgatgttctagggtaaaagttttttgtttgtttgtttgtttgttccttcaccccttttaaatatctcatgtcactctctcctgggctgtaagttttctactgaaaagtctactgccagatgtattggagctcctttgtatgttatttgtttcctttctcttgctgcatttagtatactttctttatccttgacctttgagagtttgattattaaatggtaggaggtagtcttcattaggttaaatctgcttggtgttccataaccttctttttcttgaatattgatagttttctctaggcttggggaattctctgttgttgtccctttgaataaactttatacccctatctgtctctctgcctcctctttaaggccaataactcttagatttgcccatttgaggctattttctagatcttgtagatgtgcttcattgttttttgttcttttttcttttgtctcctctgatggtacattttcaaatagcctgtcttcaagcttactaattctttcttctccttgatcggttctgctattaagagactcttaatacattcttcagtatgtcaattgcattttttgactccagaatttctgcttgattcttttaaattatttcaatatctttgtgaaatttatctgatgtgattatcagtttcttctccatattatcttgaatttcattgaatttcctcaagacagctcttttgaattctctgtcacatatattcacatgtatctgtctctctaggattggtccctgaggccttatttagttcgtttggtgatgtcgtgtttcctggatggtcttgatggttgtggacattgattcgtgtctgggcattgaagagttaggtatttattataatctttgtagtctagccttgtttgtacccatccttcttgggaaggctttctaggtattcaaagggagttggatattgtgatctaatggtcactgcatctgtatctgcattagaaggcatcccaaaccgggtaatgctgtgactcttgtagtcttggagactcatagaggtaccgccttggtggtcttggataagatctggaagaattgtctggattaccaggcagagactcttgttctcttcccttactttctcccaaacagaatctctctctgtctgtgctaagctgtctggaaagctggtggagaggtgacacaagcacccctctggctcccttcacggggaccacactgggttagacctgaagcctgcatagcaatgggtctcacccaagatccacagtaactactggcctccgcctttgtttgctcaaggctctaaggctccacattcatcaggtggcaaagccagctcctcttgtgtccttcccttctgggctgcagatttcccccagccctaggccgatcccaagatgctatctaagatccagggcctggagtcagaatctttaggaatctgcctggagctctattctacttcggctgagctggcacccaagccataagacaaaatctttctacccttccctccgcttttcacaagcaaaggagtctctccctgtgaccactagcaccccaggcccacagcaggtattgcctggctactgctgatgttcactcagggcccaagggctcttcagtcagcttgtgttaaatgctaccaggactacgtctctcccttctgggcagtgggctcccctccagcccagggaaggtccacaaatgccatccaaaagccaaggcctggaattagggtccccgagggtctgcttggtaccctagcccactgtggctgagctggtacctaagctgtatgtcaaagttctctttactctttcgtcttcttttctcaagcaggagtctcttcccatagtgtccacagctgggaatgtgctatgtcacacctgaaggtagcatgtctctgagtctcactgaaggcccactgcaagtactgcctgggtaccactgctggttattcagggcccaagggctcttcagacaacagatgttgaatcctgtcaggattgagtcatttccttcaagagaatgagtttcctctggcccaggttatgtctggaaatgtcatccaggagctagggcctggaacaagggcctcaggactctgcctggtgccctgtcctactgtggctgacgtgatattcaagctgcaagacaaagtcttctttactcttccctctcctctcctcacctcaagcaaaaggaaagagtctctcctggagctgtgagctgtgctgcctggggtttgcgaaggtgtggcacaagcaatctcctggccaccctggctggtgtctcactaggtcatgtgccccccccccccgccccccgtccactggctttcagcccagcacagtacaggacttggactcttggtggcctagattgcctttcaggtttatttaggcccccagaactctttagtccacagtggcaaagcttgtcggaactcgggttctgcctgctgggataggtgatttccctctggctgtggctggtgtaaatgctccctctgtgggtgccagctgagttctgcctggtgtttcttttcactgtgacagggcagccctgagttccaatgcagagtcccataatcactgtactcttttcctgcaagcacatagattctctctccctgccacacggctgctgccaggggatgagtgaggggtggcattggcagttcaagactgtctttcctaccccctttagtgcctctttcagtgatatgaagttaaaatctggtacagtgattgctcacctgatttttggttctcatgaaggtgattttattgcagatagtttttcaatttgctgttccttcggggaggacgatcagtggaggcttctattcagccatcttgctctgcctccagtcacatttgccattgttaaacaacctcgaaatagtagtatacttatcagtgtgtttaatttgagaataaaaggtagagctatggatgatacatatcaaaggttcctactaagttatataattctttaaaagggtactgtattccaggatccttgatcatgtttcccaacacagtcgtttgccagccttctgccttatacttggaaatttctacgcttgacaccagggaatctatttctgtggcatatattttacttagaaagcactgcagggttatgtggttttacaatatattagtacatttgagatattcctggtcagaattattcctactgcaagtgcctttccctttggtgtttgtcactaaaatgtttgtctgtcatcatgtgaaatattcaaaagaatgacaaagaaaggagtcttaacaaaaagtgttgtaactaatacttgagactaatcacagtacagaacacattactatggcaactaagctaaatgctgcttgcaatataatagtcaagacattaagagaatttagccctaaatgatcttactaactggtttctacagtaatggtcctgtgaatgccatcacattagtaatggtgttaacaataatgtgttttccttttggtatggtacccccttaacaaattgattttaagtcaaaacttgatacctcttttgagacaggtcatgcacttgtaatgactcccattttttctctatagttaatcagctgtgttcagcgaatacttatgaacagaaggctccagcagcagtacaatcagcagcaacagcaacaaatgacttatcaacaagcaacactgggtcacctcatgatgccaaagcccccaaatttgatcatgaatccttctaa

SEQ ID NO: 10908 - DNA, 580 bp, Homo sapiens
tcttttctaaaccagtaggtgatgtagaatttcaagttttaaatcacaatgtgaaaagtgcataatttttttgtttttagggactgaccatgcgtttcaacataccaactgggaccaatttaccccctgtcagtttcaactctcaaactccttatattcctttcaatttgggagccctgtcagcaatgagtaatcaacagctggaggacctcattaatcaaggaagagaaaaagttgtagaagcaacaaacagtgtgacagcagtgaggattcaacctcttgaggatataatttcagctgtatggaaggagaacatgaatctctcagaggcccaagtacaggcgttagcattaagtagacaagccagccaggagcttgatgttaaacgaagagaagcaatctacaatgatgtattgacaaaacaacagatgttaatcagctgtgttcagcgaatacttatgaacagaaggctccagcagcagtacaatcagcagcaacagcaacaaatgacttatcaacaagcaacactgggtcacctcatgatgccaaagcccccaaatttgatcatgaatccttctaa

SEQ ID NO: 10909 - DNA, 14103 bp, Homo sapiens
ggaagaggtaaggataattatttagagatatttgttagttacgattaaccaagtagagcatatgtctttagattgcttctggacacatgtatgtgtcgaaggctactgatacccagttgtcattatacttcagtttcgttgttttccagtttgagaacaggtgttcattgtttctgttattgttgtggttcacttcagtggtttacctaaagtcagacaactgaagacttccaacagatagatattaaactgtctttatattgccccaaaggtgtttgaggtggatgttaagggcatgaactccatggttgtgaaatctctcaaaacttggtatctagagtctgctaagcattattatagcaactcataacaaggtcctttgcctgatacacaggtccacaactgtggttttgggaattttttgacctactgtaaaaaaaaactgaatccagtaaaatatattgattatactggcaaaatgagggtaagtttagtatctcaaagcaagttgtagaagttacttcatgccatatgttagcttagagaagaatgaaacatatttagatccttgaaactccctacttctcttgagatctgattacttctgcatctttgttttgtctttgttgactggggccatgatcattttgcagcagtgtattccccgcagcatgccacagcaaccatgtaaaaaacgagaaatttaatcttcagccaaggaaacctggcagtaaatgagaattagttttaatttttatttttttgcatctgtgttccttatgtggtagagaattagtttttgaagttccttttagaaaaatattctaggcacataaatagcatctcattatatcactgtattgaagttgctatagggaaatagctaattgtagggatgccgtttcgagaattttattcacttttatatttatgtctcacatctagggaactagctcttcagaaaaatccaagtcttcaggatcgtcacgatcaaagaggttggttgatgttgaagggacaaaaagttattttctttttcaggttattttctgtttctaaaaccatgtttttttctgaactcatgtcaaccactattctgagttaactattctatacaaatatacatatttgaaaatgattagcataatataatgaatccctttgtatctatcacctgatttcaacaattattattcattctaactttgaattctaaagggtttttaaggatttattatatattagtggcccttgcaatatgtagtttatttcattagacaatatatgtccttgaaaaaggacaaaataattgttgaatgcctatgaggcagtgggttttttgggttatatgaaattgtctaggatgggaagttagtcatcatagttgtaagttataaggagaaaaaagagtggtaaaaaacacttttttctgctaaattgtcaactcaagtcatacataaaaactgaaacttttctaacataatgtagtacccaatatactatgcagtataattgttattagaagtttgccgcttagtctattggactttcattgtttctaaccagtgggaatgtctcttaaaaaccaagcttgtttgatattaatttattctctgaagtagtgattcttaaagaagagtgtcctccagggtctccctggtagctttttcagaatgcgtatgccttggtcctgctccagacctactgaatcataatcttcagtgatatggtatagacatacatgcttccctaggtgattctgatgtgcttccttgttgagacccactgctcaatctcaacatgttatttatgttctttgggtattgttccagttgtcagaaacattcataattctatgaacttaattctttcataggaaaccttcaattgtaacaaagtatgtagaatcagatgatgaaaaacctttggatgatgaaactgtaaatgaagatgcgtctaatgaaaattcagaaaatgatattactatgcagagcttgccaaaaggtaatgtgtgttaatttttcatgaagttaaagttgaaatgaatttttaaacatcatttttataaaattggaacttgattactgttaactatgtacaaacgaccaaacatggcattttcctagtggttgtctagaaatatatttgtatgccaatgataatatgtgttattgaagttaaaaatttggaatattcagttggttttgtaaagaatgaaatctatttttttctttcctttgagttttagacaaggggctttagtttccaaattatacttcagtgtgtaagcaggtttaaaaatttaatatattaggttttggttcagtcaatgttaatgtgcttgctttatacaaaaatgtaatgactgttcctgaaaacttaaaaatcatgtacagtctagtttagtcttattgcattcttaaattccctaaggctaaaagctgaagttaactatcatagatagatttagttgtatttcttgctgttatcttttttaaaaaactttgtcacatacctctcaactgttgaagttctaaccataaaaccttgttaataagaatagggaacaatagccaaatgaatatcttggactcttcatagctcaagtctgagagcaatataattggatgatgagaatgacagggaacttggttcaaagagtcaaattttagattttttttctttgttaaataatatgttgtagtctcttggcacatttttcaaattcattctcatagatcttttacagcagtgcttattaaaccttgttccctgtctatgtttttatgacatattttcaaattatggaagtttaaaaaatacagtaggtaggagggatgggactttccttgactaggataaattagaagttacaaaaggtgataaatgaaatgaggaaaggaaattaatgaaagaagagagataggggcctaccgcttacttagttttgcaaatcatttatgacaattttatgtaatggttttggtggccaagggcagaaacaactaacatgggagtctaagtcccataggtggtgacttactttggatttttacattctcagtggttgtcactgggagtgtttatgatgtaagaaataggaattcaaacttttgttttaattgtactgtggaagaaagtcagcatatgatgttactaacctgaactatgcctaattctgtcagaccaaaacaaaaacagacccgtttcataaggttaaatttgggtgtttatattattgttgtaatatttattgagtatgtataagtaccaggctcttacagaattaactcctttaatcctcaaaacaacactgtaaggtagttattattttgcttgtagagataaaggaacaaattcagaacccaaggaactttttcagctttaaattgagaagctaagatttcaacccaggtctgcttgaatccaaagcctagtgagtgctcttttcactctgctgctttgcttccaattctccctagaagaaatctagggagaattcagtttttttttttttttgtcgttgttgttaatttaaaatctttagttcttttcaaatgctggggcttctctgagtgtctacatgcaatgattgctgtgaataacttttttttggtggggattatttaattttactacaatctgtaaaatctcaatcatctgtgtcctccccccccccaccctttcagagactcagaaactcatttaacaactagatgctataacttgtcaaaatttgcttgttgaataacatagagccatatttcagagaaagcccctggtgactacctgcttttttttccttaattgttgccaatgatagccagttactaagcccagcaatgtaggtaaacattgaaacctaaaccctttttactatgcctgtcttatttgctcttgagagaactaatgaaaacttaaattgacagcctctctcttcaattcacatgttttatagttaaggaaggacattctttctaaaatattaacatagggatcaacaaatgatctcattctacaatttattgttagggtacttcagctaaagtatcttaatctgttaaaactctttaaggactttacagagtagtgaaactttgacataccagttgggaaatgctgcagtatagatacaggagtaatagaatgaacttcatttcccccaccaatacccctcccttgcaatataaaactacccttaaaaatctttctgagtttatgatttggattatgaaaataggatgtctttaaaaattttttccctctgaaccacacatattttatgaattctttatggaacttagcatagatgttcatattcataacagcttttgtgataggcactataaaaattcagaactgggttgaggctttctgtttgattcacacatttgttttgtaatcactccataatacctccctttcctgtttttatgaactatatttcaacaaataaactgttgacacctggcccttttactatttccctgttttatttacttttgtgaggtccttacaccaatatctaaagcttgaaagaaacaaactatgtaccagcaatgttggctttatctgaactgaagtcttgtacttcacttgcacatttaatatgtgtaatggttttttaaatgaaatcattctaggtacagtgattgtacagccagagccagtgctgaatgaagacaaagatgattttaaagggcctgaatttagaagcagaagtaaaatgaaaactgaaaatctcaaaaaacgcggaggtaaatacaagtgaaaatgaaacatgaatttaaattgctgtttatgaccatattggaaaatcggatgtgcttactaaaaatacctccacttttctgccttttgtttattaaaagcactacttaaatataacttctgtttctctctgagctctgaagcagaaaaggttaagcaccatttatcgaaacacctttgccttcagtggctattaagttatctcaagaagcgtagcatttccttcttccacatgttctataatacatatatgccataatactatgttttccccccaaccctaaaataattttagattcatgcaaaatcttgtctgtggcctacaggtaactttatatatatttagagttggatagagtgacgtacatctgcattagtattagttggggtattataaatgcaagtcccttgactccactcctcacaaattagaatttctgttgatgaggtcaagaatgtactccagtttgttcttgtgtacactgaagtttcaaatccactaatctaagaatggcaacatggacataagtaggaaggagtagggagctagagctgataaccctccctctgtcttccagaggcacctctccctttgtctgtctatcttcccttaaacacacaaacggtggggagtggtggctcacacctgtaataccagcactttaggaagccaaggcaggagaattacttgagtcctggagttcgagaccagcttgggcaatatggtgagaccccatatctacaaaaaataaaaatatcagctggacatagcggcgcatgcctgtagtcctagctattctggaggctgaggtgggaggatcacttgagcccaggtgatcgaggctgcagtgagccgtgattgcaccactgcactgcagcctggatgacagagtgagaccctgtctcaaaaaaattaaaacacacacacacacacacacacacacacacacacacacacacacactctaatattggctaaccatctataaaaagtttgcatcagaaggattcatttagaaataatagtggactatgtgtcccacttgtttgtgtgtgattcttaaatggtgcctatatatattttggggcagcttaataaagccagaattcataactataaaaggaatgaatctccaaatgatagaacatgacactaaatttctaagtagaagtgtagtgaaagcatatccatttaatattgatcagattatataattgtgaaattatagtgaagttcttatattggtgaaattttgtgtggatttttattttaatgctatgattatcttgctggaaccagtaaaatatatctatttttataacatattttatatattcattttccgattaaataatttgtaaggttgttggcaaaaataaaggaaatattatatagtcttttgtccacaaaggggtagtcaactccttttgagcataaggaatctttctgagaatctagttcatggtagggaaactgccattgcagcaacagagctcattaaagctaaggtagtagtcttaaaatttaagagaatcctcaattataaagtgatggtaaagatcagtagtaagagtttctttcctctgatcataggttctctagagaagacaaataactaagtgttctgcattgtgtacacttagtgtacagagtgtctaaatggtgttatttttgggaagggaccctgtagcagtcagtgtctgaaatgtggataagggctgaaagaataaaagaaccactgttgttgacgagggtattcctagtgccactttggtatgctgctgacatttggtctcagctgataagtttcaggaacattttattgaatgatctgtgtaggaatgttttggtatcacgcttaagggaatacatgcatttatagccatcagtagcacttaaatctttcacatctattttcatcttaatgatttgttacatttttaagctgtcagaaatcacacaggaaatttaacactaggtttactttatatacacatatatagataaattggtgatctgaaatactgaattggtgtagttaatatttaaactttttaagaaagctggttccaaattgaagcctaacttaggaaactgtcaagaatgtaaactttcttgtattacaagaaatgtaagacattacaagaatgtaagacaatatataaagtcttatattgatttggaataatattataacacaaagatacggttaaagttaacatttcaggagctgattttttaaaaaattttcagtatcataccctattttgacattctcttcccagtttaattgttagaaagtatattttacacctaacttttttacatgacacaataattttgttctatttaaaaccattaaaatctattgagctcagaaatgaaaatgcctcttttccatttataccctgtgttacaattttaaatatatttcataattaaaaataaaaaatttaaacatgtatacagcaacaagtacataaagtaacatttcaacattttaccatatttgcttcagatctcacttaagtaaaatattggttcagtcctactctcatccatttccccttcttcccaccccacaggtaatgattatattgaagttttatgcatgtgcatgtgtgtgcatgtttttctatgttttttatatatgtattcataaaacatttttcatttaaaagtataacaaaataatatgctgtatatatcatttgggaacgtttttcatttaacattgtttttgaattgtattcatgtcagtaaatgtacatctagtttgtttatttttcactgctctatagaattatgttatatcaataagccactattcatttcccacataggaagttattcccaatttttcattttctaattttctaattagtgctgtggtgaatatccttatatttgattccttgtgcacatgtgggagaaaatctccaaagaattacctagttttgtttaattcttgagcgatgtatgcaccaaagcacatagaagatacttagtaagtattacttaacactggatgaacattcagattctacattttatttatcttgttagtttatctgaatgaaatcattgtttgaaatgaaaaagtatggtgtggtgtatttgtttctgttaaaacaaatacagaatatatgaatacccaagatcaaactggtgtttgtaaataatgtgattataatacattaggcttgtaatgcctgctattaggtaggttgagataggaggattgcttgaactcaggcgtttgaggctacagtgatttataattgtgccattgtactccagtctgggtgatggattgagaccccatctttaaaattaaaaaaataaataaataaaaatattagcaacataaatagtaaaccttcaagtttacttttctaaaaaagtatgatggtgttcttatacattaacgtttttagcttctggctaggtgtggtggctcacacctgtaatcccagcattttgggaggctgatgccagaagattgcttgagcccaggagttggagaccagcctgggcaacacagtgagacccagtctttaaaaagaattagctgggtgtagtggtgtatgcctatagtcccagctactcaggaggctgaggtaggaggattgcttgagcctgggaggtagaggctgcagtgagctgaatttgcaccattgcattccagcctaggtgacagagtgagactctagctcttaaaaatttttttaaagtttctacaaataaaaatattcatgataatatttgggtccatggcgctttggaccttaaacctaacagaaacccaaaagagaaaattaaaagggtgaaaaatatatgtgatgttttgttttttatttaaggatggagccaatttgttttttagttgtctcctttttatttgtgaatgtaagcattttgagtgacttctgaattataatctaccatcttattttgatcaaggtcttggttgcacatcaggatcatctttgaaactttaagaaaatgcctgagagattttaattcagtggtttaggggtgggaatggctgtttttaaaaagattcttcagatgactctaatgtttagctcagggtgtgaaacactgccttagcagaactagggacaagagggaggctggagaggtttctgtaggttttcttcagtctgtttatcaggagacagtacagaatgggactctgcctttttcccccagtcgttctgatgttttgctgccaaaatagatatacctgcaatgtcttgtttgtctttatttggaaatagtagacagtattgatatggagtggatagtggagtacacatagaaaaaaggcagtttaatgacaatttatgtatagtgttgaagtaaatattagcaaggaaattggtaatatcataaaattaccaagtttttacataccatattgataggatctgtgcagacaattccaatgagaataaaaacctttatggcatacttaagtgtaggattgcaaaagaatctgttccgtatatgttacttacttccccattctttaaggactgatactgaatttatttgcaaagcaataacaaaataagagctcttggcccctagttttagaactttttatgggttctcttaatgttatttcaagttgtaaaaaatggcatttgcatctgtaaaaggaaacaattaggatttgtaacttggaatttgccaaggttgtcatgtgcttagtaagtcgataaaatattaaccttttttacttgtgtccaatatgccatttttctaaggattatgaggtatttcatgtctaatacaaaagttacaaaatgctgactaaagtaagtatctttttctgtgtataaatgtgtgaataatagccactcctttctcctagaagatgggcttcatgggattgtgagctgcactgcttgtggacaacaggtcaatcattttcaaaaagattccatttatagacacccttcattgcaagttcttatttgtaaggtatgtaatgatctgttgatatttcataccgtaaatatttgaatgcttaccatataccaggcctttgagggcacagtcttgaagaaagatgaaaatggtatctgcccttggaagacttctactatagtggggaaaatagacgtacaaagcctaagtgtcatgataggggagatactgtgattatgggagcacaccggaagcctgtgtaaataggatttggatggctttctagtggaaagctgtatgtgaaatatgaataagaatcagcctggtaagtgagattggttcatcatgttctgggaagaggcaacatagtattcagatactggtagttgagggagagcttggtgtgtttgaaaatctcaagagtggatgtgtgtaatgtttgtgttttataatctttccccttatatatcctacttccccaaatgtaaactatctatgtggagcagggttttgacataacttggagatgatagaattaaaaatgttttttatgtgttgattataattttaacagtctgtgccacttttttgttagtaataccttggagttaattttaaatatctataaatgtgggcctggcatggtggctcatgcttgtaatcctagcactttgggatgctgaggcaggtggatctcctgaggtcaggagttcgagaccagcctggctaacatggtgaaaccccgtgtctactaaaaatacaaaaaattagccgggcatggtggcgggtccctgtaatcccagctacttgggagactgaggcaggagaatcgcttgaacccgggaggtggaggttgcagcgagtcgagatcgcgccattgtactccagcctggacaacaagagggaaatttcgtctcagtaactacctacctacctataaatgtcaaggttatggttttcttaactcatattcctgctaagattaatcctatgttagtttgtttcccaataaaaagctgcctttgaaatgcagtggcaggccatgttttccttggaattctagctctagatcttttcttgcatgaatttttgatagattcagacatgcttaaatgaactgtactttgttctttagcaatttgtatccctcctttccttgaattcagttcagccaggggcctatctagggtatgtattagagagtttcattttaaattgtgacagtagaatctaatattgctggatttgtgacatgtatttgcctttctgttttcttatctatgtgattgtcttttttcaagaaccagtctgttgagcctaggccatttcactaatcggtagtttgtatcagtgagcaccttttccctttctgcagtcccactggaaagactttgaagtcagtcaaacttggatttgaataacagctttgcctcttactagttgtatgactttagatttatttacatattaatgaaagttagccttttctctcataatatgtcctaccttgcatggtaggtatttggtatttaaagataatatagattaattgtttagctgtatacatagtagctgtttgtatatggtggctattaaaattgttaagtacccaaatctaatacatttttatgtagagctttagtagctagatgtatgagaccagaaattagctttactaaaatcttttgtaaacttttttttttttttttttttttttttgagacggagtcttgctctgtcgcccaggctggagtacagtggcgcgatcttggctcacgacaacgtccacctcctgggtcaagtgattctcctgcctcagcctctcgagtagctgggattacaggtgtccactaccacacctggctaatttttgtatttttagtagagacggggttttaccctgttggccaggctggtcttgaactcctgacctcaagtgatccacccatctcagcctcccaaagtgctgggattacaggcatgagccaccaaacacccagccaaaaatcttttatacacttttaaataaggaatagtggtacttgagtgtatggaaatctgtttcaaggcattaattcttgagatagttagatgtctggaaaatacagacattgggtagtgggtagcagtgtttattttatttatttatttatttttgaggcggagtgtcactctgttgcccaggctggagtgcaatggcgtgatcttggctcactgcaacctccgcctcagggttcaagtgagtctcctgcctcaacctttagaatagctgggattacaggcgcttgccaccacgcccggctaatttttgtatttttagtagagactgggtttcgccatgttggccaggctggtcttgaactcctgacctcaggtgatccaccctcctcgtcctcccagagtgctgggattataggcatgagccactgtacccggctgcagtagtgcagtgtttttgctttgagtctctgaaacatgcacacatactcccttttttaaaaaaaaattgtttgtatttttaaaatttttgtgggttcatggtaggtgtatatatttatggcatacatgagatgttttaatactggcgtgcaatgtaaaataagcacattgtggaaaatggggtatccatcccctcaagcatttatcctttgagttacaagcaatctaattacattctttaagttatttaaaaatgtacaattaagttgctattgactgtagtcaccctattgtgctattaaatagtaggtcttattctttgtatttttttgtactcattaaccatccccacctcctccctatcccctcactacctttcccagcttcttgtaactgtccttcatgacatccttcattagttcatccatgagttcaattgttttgatttttagatcccacttataagtgacaacatgcagtgtttgtctttctgtgcctggcttatttcacttaacataatgatctccagttccttccatgttgttgcaaatgacaggatctcattcttttttatggctgaatagtactccattgtgtatatgtaccgcattttatttatttacttatctgttgatgggcacttaggttgcttccaaatctttgctattgtaaacagtggcccaacaatcataggagtgccagtatctctttgatatactcatttcctttcttttgtgtatatactcagcaggtggattgctggatcatacggtatctcaatttttagtttttttgaggaatctcccaactgttttctatagtgattgtactcatttacattcctaccaacagtatacaagggttcccttttctccacatccttgccagcatttgttattgcctgtcttttggatataagccattttaactggggtgagatgatatcttattatagttttgattaacatttctctgataatcaatgatggtgagcagcttttcatatgcctgtttgtcatttgtatgtcttctttggagaaatgtccagtctaatcttttgcccattttttgattggattatttgattttttcctatagaattgttggagctctttatatattgtggttattaatccattgtcagatgggcactttgcaaaatgttctcccattctgtgggttgtcttttcattttgttgattgtatcctttgctgtgcagaagctttttaacttgatgtgatctcatttgccaatttttgctttggttgcctgagcttgtgtaatatgctcaataaatctttgcccacaccagtgtcctggagattttccccagtgtttttaattacttaaaaaaataaagtttttgtcctttatgaatgttatcaatttcgaattaaatttccccttcctcttttcttttaatagaattgctttaagtattacatgagtgatgatattagccgtgactcagatggaatggatgaacaatgtaggtaggtaatatagatgagctaacattcagtgtttcctacttttgggaggaattgttacataatcatttatgaggtttgtctttcatagtatcgtcattgatgtctttaatgaaaggttgttcttttccataaaaccctggatttatgtctagtttaagtttctaataaagagtaagcagatgacctaaattaccactaaaattactggcagtaaaatttaaattgcattataacaaagagattaaaatgagttttgttgggaataatgtttatttttatttttttacatatcttttcagtttcctgaaagaagggaataatgttttaatctttaaaacatttcaggtggtgtgcggaaggtggaaacttgatttgttgtgacttttgccataatgctttctgcaagaaatgcattctacgcaaccttggtcgaaaggagttgtccacaataatggatgaaa

SEQ ID NO: 10910 - DNA, 593 bp, Homo sapiens
ggaagagggaactagctcttcagaaaaatccaagtcttcaggatcgtcacgatcaaagaggaaaccttcaattgtaacaaagtatgtagaatcagatgatgaaaaacctttggatgatgaaactgtaaatgaagatgcgtctaatgaaaattcagaaaatgatattactatgcagagcttgccaaaaggtacagtgattgtacagccagagccagtgctgaatgaagacaaagatgattttaaagggcctgaatttagaagcagaagtaaaatgaaaactgaaaatctcaaaaaacgcggagatgggcttcatgggattgtgagctgcactgcttgtggacaacaggtcaatcattttcaaaaagattccatttatagacacccttcattgcaagttcttatttgtaagaattgctttaagtattacatgagtgatgatattagccgtgactcagatggaatggatgaacaatgtaggtggtgtgcggaaggtggaaacttgatttgttgtgacttttgccataatgctttctgcaagaaatgcattctacgcaaccttggtcgaaaggagttgtccacaataatggatgaaa

SEQ ID NO: 10911 - DNA, 4932 bp, Homo sapiens
aaacgcggaggtaaatacaagtgaaaatgaaacatgaatttaaattgctgtttatgaccatattggaaaatcggatgtgcttactaaaaatacctccacttttctgccttttgtttattaaaagcactacttaaatataacttctgtttctctctgagctctgaagcagaaaaggttaagcaccatttatcgaaacacctttgccttcagtggctattaagttatctcaagaagcgtagcatttccttcttccacatgttctataatacatatatgccataatactatgttttccccccaaccctaaaataattttagattcatgcaaaatcttgtctgtggcctacaggtaactttatatatatttagagttggatagagtgacgtacatctgcattagtattagttggggtattataaatgcaagtcccttgactccactcctcacaaattagaatttctgttgatgaggtcaagaatgtactccagtttgttcttgtgtacactgaagtttcaaatccactaatctaagaatggcaacatggacataagtaggaaggagtagggagctagagctgataaccctccctctgtcttccagaggcacctctccctttgtctgtctatcttcccttaaacacacaaacggtggggagtggtggctcacacctgtaataccagcactttaggaagccaaggcaggagaattacttgagtcctggagttcgagaccagcttgggcaatatggtgagaccccatatctacaaaaaataaaaatatcagctggacatagcggcgcatgcctgtagtcctagctattctggaggctgaggtgggaggatcacttgagcccaggtgatcgaggctgcagtgagccgtgattgcaccactgcactgcagcctggatgacagagtgagaccctgtctcaaaaaaattaaaacacacacacacacacacacacacacacacacacacacacacacactctaatattggctaaccatctataaaaagtttgcatcagaaggattcatttagaaataatagtggactatgtgtcccacttgtttgtgtgtgattcttaaatggtgcctatatatattttggggcagcttaataaagccagaattcataactataaaaggaatgaatctccaaatgatagaacatgacactaaatttctaagtagaagtgtagtgaaagcatatccatttaatattgatcagattatataattgtgaaattatagtgaagttcttatattggtgaaattttgtgtggatttttattttaatgctatgattatcttgctggaaccagtaaaatatatctatttttataacatattttatatattcattttccgattaaataatttgtaaggttgttggcaaaaataaaggaaatattatatagtcttttgtccacaaaggggtagtcaactccttttgagcataaggaatctttctgagaatctagttcatggtagggaaactgccattgcagcaacagagctcattaaagctaaggtagtagtcttaaaatttaagagaatcctcaattataaagtgatggtaaagatcagtagtaagagtttctttcctctgatcataggttctctagagaagacaaataactaagtgttctgcattgtgtacacttagtgtacagagtgtctaaatggtgttatttttgggaagggaccctgtagcagtcagtgtctgaaatgtggataagggctgaaagaataaaagaaccactgttgttgacgagggtattcctagtgccactttggtatgctgctgacatttggtctcagctgataagtttcaggaacattttattgaatgatctgtgtaggaatgttttggtatcacgcttaagggaatacatgcatttatagccatcagtagcacttaaatctttcacatctattttcatcttaatgatttgttacatttttaagctgtcagaaatcacacaggaaatttaacactaggtttactttatatacacatatatagataaattggtgatctgaaatactgaattggtgtagttaatatttaaactttttaagaaagctggttccaaattgaagcctaacttaggaaactgtcaagaatgtaaactttcttgtattacaagaaatgtaagacattacaagaatgtaagacaatatataaagtcttatattgatttggaataatattataacacaaagatacggttaaagttaacatttcaggagctgattttttaaaaaattttcagtatcataccctattttgacattctcttcccagtttaattgttagaaagtatattttacacctaacttttttacatgacacaataattttgttctatttaaaaccattaaaatctattgagctcagaaatgaaaatgcctcttttccatttataccctgtgttacaattttaaatatatttcataattaaaaataaaaaatttaaacatgtatacagcaacaagtacataaagtaacatttcaacattttaccatatttgcttcagatctcacttaagtaaaatattggttcagtcctactctcatccatttccccttcttcccaccccacaggtaatgattatattgaagttttatgcatgtgcatgtgtgtgcatgtttttctatgttttttatatatgtattcataaaacatttttcatttaaaagtataacaaaataatatgctgtatatatcatttgggaacgtttttcatttaacattgtttttgaattgtattcatgtcagtaaatgtacatctagtttgtttatttttcactgctctatagaattatgttatatcaataagccactattcatttcccacataggaagttattcccaatttttcattttctaattttctaattagtgctgtggtgaatatccttatatttgattccttgtgcacatgtgggagaaaatctccaaagaattacctagttttgtttaattcttgagcgatgtatgcaccaaagcacatagaagatacttagtaagtattacttaacactggatgaacattcagattctacattttatttatcttgttagtttatctgaatgaaatcattgtttgaaatgaaaaagtatggtgtggtgtatttgtttctgttaaaacaaatacagaatatatgaatacccaagatcaaactggtgtttgtaaataatgtgattataatacattaggcttgtaatgcctgctattaggtaggttgagataggaggattgcttgaactcaggcgtttgaggctacagtgatttataattgtgccattgtactccagtctgggtgatggattgagaccccatctttaaaattaaaaaaataaataaataaaaatattagcaacataaatagtaaaccttcaagtttacttttctaaaaaagtatgatggtgttcttatacattaacgtttttagcttctggctaggtgtggtggctcacacctgtaatcccagcattttgggaggctgatgccagaagattgcttgagcccaggagttggagaccagcctgggcaacacagtgagacccagtctttaaaaagaattagctgggtgtagtggtgtatgcctatagtcccagctactcaggaggctgaggtaggaggattgcttgagcctgggaggtagaggctgcagtgagctgaatttgcaccattgcattccagcctaggtgacagagtgagactctagctcttaaaaatttttttaaagtttctacaaataaaaatattcatgataatatttgggtccatggcgctttggaccttaaacctaacagaaacccaaaagagaaaattaaaagggtgaaaaatatatgtgatgttttgttttttatttaaggatggagccaatttgttttttagttgtctcctttttatttgtgaatgtaagcattttgagtgacttctgaattataatctaccatcttattttgatcaaggtcttggttgcacatcaggatcatctttgaaactttaagaaaatgcctgagagattttaattcagtggtttaggggtgggaatggctgtttttaaaaagattcttcagatgactctaatgtttagctcagggtgtgaaacactgccttagcagaactagggacaagagggaggctggagaggtttctgtaggttttcttcagtctgtttatcaggagacagtacagaatgggactctgcctttttcccccagtcgttctgatgttttgctgccaaaatagatatacctgcaatgtcttgtttgtctttatttggaaatagtagacagtattgatatggagtggatagtggagtacacatagaaaaaaggcagtttaatgacaatttatgtatagtgttgaagtaaatattagcaaggaaattggtaatatcataaaattaccaagtttttacataccatattgataggatctgtgcagacaattccaatgagaataaaaacctttatggcatacttaagtgtaggattgcaaaagaatctgttccgtatatgttacttacttccccattctttaaggactgatactgaatttatttgcaaagcaataacaaaataagagctcttggcccctagttttagaactttttatgggttctcttaatgttatttcaagttgtaaaaaatggcatttgcatctgtaaaaggaaacaattaggatttgtaacttggaatttgccaaggttgtcatgtgcttagtaagtcgataaaatattaaccttttttacttgtgtccaatatgccatttttctaaggattatgaggtatttcatgtctaatacaaaagttacaaaatgctgactaaagtaagtatctttttctgtgtataaatgtgtgaataatagccactcctttctcctagaagatgggcttcatgggattgtgagc

SEQ ID NO: 10912 - DNA, 100 bp, Homo sapiens
aaacgcggagatctcacttaagtaaaatattggttcagtcctactctcatccatttccccttcttcccaccccacagatgggcttcatgggattgtgagc

SEQ ID NO: 10913 - DNA, 1295 bp, Homo sapiens
gttggattcatcgaggtggtattagagatattcatttgcattataataaaaggtgagtatgttgaaatgctttttaaaatagtcatatcattttccattcatttatgattatttattttaataattatcctgttcaagtgaacaattaatgcaaatgtgactccagcctcttacctttttatgcaagtatccatctcaaattctttttttcttggatgtgtatgcctttttttctaattgaaaaaaaaatcataaataaaatgactttcataagcattaatgaatttttaacaaggaaattctgggttttctatatcagtgaagatataggtaagaaacatggaaaagcatcttttttttaactaatgtactaaatttaaagagcttgctggaaagacataagtaaatctcagttttgttaactgttttattttaaggctctggggcatgatagaattttgcttggattggaaatagtagcattgtgtttacagttaaataattagaatagaaattatgtatgataaaatataaaagtgtcataagcccttaatctcttggtattttagtatcaatgcaagtcttgggtaaaatttcacctcacttcttcctggtgtagattaaaggaaaaaaaaaacttaaactcactgtctaaaattgacatgtcatatcattaactcataaagtcgtactcctttacacacacacacacacatacacacacaccacatttgaaatggaaacgtacactgaaatttgcagctaccccatagaataatttttggcacatagtaggcattcagtaaagatttgttcagtgaatgaataaaggcattctttatctctcatttttatttgatcattatcaagttgttgataaggagaaaaacgtggccatttacagatataacttaaaacatgcctcatgagcgaaatgtaagtttaatcatattcttttgacagttttaaggattctaatcaaggaaacccttttaagaaattctcatgtagatgaaataggctttaaaaatacctgtgctcatcactatctatttgaatgaaatctgtggttaatttatttataatgtaatgactccttgattaagaaaagtatataatgtattttgctatacaaatagaatatatataacccacttttaaatgatgagcaaggtggaaaatctgttcttaccagtaagcagagcgatatatcaaattccttttgtgttcttttgttaaattttcaggtgaggggaagtggcttcgaaacattgactattaccgtttagatggtt

SEQ ID NO: 10914 - DNA, 100 bp, Homo sapiens
gttggattcatcgaggtggtattagagatattcatttgcattataataaaaggtgaggggaagtggcttcgaaacattgactattaccgtttagatggtt

SEQ ID NO: 10915 - DNA, 14180 bp, Homo sapiens
agaagacagaagataaagataaaccccttatttataaaggtgagctacaaatatttctgtgtcgtaattttaaaaatactgatttaaacataccatacaaacattttagcaacaaaagaaacaaaactacccagtctcacaactctatcatatcaaaatttttttgcaatgtctatttgtccttatccatatatatgtatagtctttttcaaaataaaattgtattgtttatatttgaggtttacaacatggtgttatgggatacatatagatagtaaaatggctactgtagtgaagcagatgaacatatctatcatctcacatagttttttttggtgacaagagcagctaatatcaacttaagaaaaattcctaatacagcagtctttgttgttgaaattgttggataaattaaaactttttggtttctaaagcagttttattgagagataattcacatcctgtacaattcacccatttaaagtgtagaactcaatggttttaatatattcacagagatgtacaaacatcactagagtcagtttttgaacattttaatcactaccaaataaaactctgtaccctttaactattactcccctatccagcccaaaactccctcacataagcaaccactaatctcctttatgtttctaatagattcatatattctggaccagtcacataaatggaaacatgtaatatgtggtcttgatagatattagggttgttctcacctttcagctgttgtgaatagtgctgttgtgtacatttgttacacaggttttcatttatttaaacaaacggcaataccaaactgttttctacactgcctgtactatttcagtcctaccagcaatgtacaagcatttcagtttctccacattcttgtcaacacttgttatttttcatttttgtttttgttataaccatcctaatggttgtgaagtggtatcttatgattttaattttcatttctctaatgactaataatgttgaacatcttttaatgtacttgttgactatttctttatcttctttggaaaaaatgtttattcaggtcctttgcccatttttgaattggattgcttatctttttgttgttgaaatgtgttttaaaaaatatattctacatactaggcccctatcatatatatgatttgcaaatattttctctcattctgtgggttatcttttgctttcattaaaaaaaaaatagttccggtgatctgtatcactttcttttatttatttatttttaatttttcgtagagatgaggtctccctctatttgcccagactggtcttgaactcctgggctgaagcagtcctccctcgttggcctcccaaagtgctgggattaaggtgtgagccaccatacctggccatctgttgctttcttgagtgtgtcctctgatgcgcaaaaatattttattttgttgacatccaatttattttttcttttgttgcttgtgcttttactgtcatagctgagaaaccatttcgaaataaaaagtcgtgaagctttaacccctgtgtttgcttaaaagagttttatagttttagtccttgcacttaggtctttgatccattttgagttaatttttatgcatgatatgaggtaaaggctcaacttcagtcttttgctgtggttatccatttgtcccaggactgtttgttgaaaagaatattctttctttattgaatagtttttgtcactcttattaaaaaggaattgatgatggagacacatgtttgtttcctgaccctcaattctattccattgatctatatgtcagtcgctgtgctaatactgcactatttcattaccattgctttgaaagtgatgttgaaattggaaagtgtggctattccagatctcttggaattcaacatcaaccttagaatctcctataaatttctacaaagaagtcagcttagatgctaatagggattgtgttgaatgtatagttaattttaggaagtactgccatcttaatattatgtcttatccatgaacatggggtgttttgctgtttatttaggtctcttatttatttcaccaatattttatagtttgcagagtatacattttacacttttgttaaatgtatttgtacatattttatttctgaggctgagtgaaatttgttcttagtgaattctttaggattttttatatacaagatcatgtcatctgcaagtacagataatttcctttctaatctgaatggcttttatttgtttgcttatccagttgccctggttaagacctcaagtacaatgttgagtgaaagtggcaagagctggcatccttgtcttgtctctaatcatagtgtgaaggaatccagtttttcaacattttgtatgatgttagttttgtggatactatttatcaagttgaggaaattatcttctctttctagtttgttaaatgtgtttgtcatgaaagagtgtgacatactatcttgatttctctgcagctattgagatgatcatgtcatgttttttttttccccattctattaacatagtgtattactttgattttcacatgttaaaccaaccttgcatacctgggataaatcccacttgtcatggtgtataattctttttatatggtgctggatttagtttgctagtgttttttgttgttggcaatggaatgttttaattggctttttttgtcctgattatgaaagtattattatatcttgcatatataatattggctgtataatattctgtcatatggctgtacataacttatttaatcatttgattgctttctctaatttttcaactttttttttttttagagacagggtcttgctctgtcacccaagctgaagtgcagtcgagcaatcttggctcactacagcctctgcctcctgggttcaagcgattcttgtgcctcagcctcctgagtagctgggattacaggtgtgtgccaccatgcctggctaatttttgtattttttgtagagatggggttttgacatgttggctgggtcttgaactcctggcctcaagtgatccacccgccttggcctcttaaagcactgggattacaggcgtgagctaccacacctggcctaatttttcaacattttaaatttttgtacataagtttatatctgcgttttaaacttttttgcttaagatagattcctaagaggagaaatcatttaccaacaggtatgatcttttttaggacttttgaaacattgtcaacttattttccagaacagttggattagtactcctagtaggaatccttgaatgatcactacaccattgccataataactaaaacctttcttaatagatgaataatgatatcttgtatttgttttaatttgcatttattttataaccagtaacatagattgtctctgctaatctctttttgcttttactgctgactgatggctatgtttctgtctgcctgcaatgctctctccacccgcactatcttcttcacctgattaattcctatccattcttcatctttcatgtccagtgacactcctcagtactgacttccctcctcctgactccaatgtctgattttttccttttaatttttgtgggtgcatggtaggtgttatgtattcatgggttacatgagatattttgatacatgcatgcaatagataataattacatcagggtaaatgggatatctatcacctcaaacatttatcctttgtgatacaaaaaatccatttatactcttagttatttaaaaatatacaatttttaattatttttgacggtagtcaccctgttgtgctagcaattactagtttttattcattccaactatatatttgtacctgctaaccatcagtacttccaccccaaccacccactacccttcccagcctgtggtaaccatccttctactctgtatctccatgagttcaattatttttatttttagatcccacaaataaatgacaacatgcaaagtttgtctttctctgcctagcttatttcacttaatgacctccagttccatccatgttgttgtaaatgacaggatctttctcttttatggctgaatactattccattgtatataagtatcacattttcattatccattcatctgttgatggacacttaggttgtctccaagtcttggctattgtgaacagtgctacaatagacagtgcagatatgtcttcgatataccgatttccattattttgggtatatacctaggagtgggattgctggatccttttttttttttttttttttttttttttttttttttttttggtggggggagacaaggtcttgctctgtcacccaggctggagtgcagtggtgtgatcttggctcactgcaacttccacctcctgagttcaagggattctcccacctccgcctccccagtagctgggactacaggcatacactaccacgcccagctaatttttgtatttttttggtagagacagggtttcaccatgttggccaggctggtctcaaactcttgacctcaggttatctgcctgccttggcctcccaaagtgctgggattatataagtgagccactgcgtctggctgggattgccggattctatggtagctctatttttaattttttgaggaacctctgaactgttctccatagtggttttactaatttgtgttcccaccagcagtgtacaagagttcccttttctccaaatcctctctagtatttgttactccctgactttggataaaagccaagttaactggggtgggaagatatctcatagtttgatttgcatttttctgataatgaatgatgttgagcaccttttcctatacctgtttgccattggtatgtcttcttttgagaaatgattattattttgtccattttaaaatcagattattaaattttttttcctgtagagttgtttgagttctttatatattccggttattaatcgcttgtcagatgggtagttttcatatattttctcccatcctgtgggttgtctcttcactttgttgactgtgtcctttgttgcgcagaagctttttaacttgatgaaatcacatttgtctgtttttgcttttgttgcctctgcttgttgggtattactcaaaaaatctttgcctagtccaatgtcctggagagtttccccaatgttttcttgtagtagatttgcagtttgaggtctaagatttaaatctttaatccattttgacttgatttttatatatggcgagagataggggtctagtttttttctcctgaatatgtatatccagttttccccagcaccatttgctgaagagactgtcttttccccagggtatattcatggcaactttgtcaaaaatgagttcactgcagatttatacatttatctcagggttctctattgtgttgatctatgtgtttttatgccagtaccatagtgttttggttactatagttctgtagtataaagtcaggtaatgtgattcttacacttttgttcttttggcttagtatagctttggctattttgggtcttttgtggttccatataaatttttagggttgttttttgtatttctgtgaagaatgtcactggtattctatacagattgtaatgaatctgtagattgctttgggtagtatggacattttaataatatcgattattccaatccctgaacctggaatatcattctatgattttgtgtcttcagtttctttcagcatctttttatagttttcattgtagagatctttcacttctttggttaattcctaagtattttatttatagctattgtacatgggattactttcttgatgtcttaaaaaattttcttttaatttgtaagtttctttatttctctttcaggttgtttgctgttggtatatagaaatgctactgatttgtgtatgttgggtttatatcctgccacttcacagaatttctttatcatttctaatagttttctggtggagttttcagatttttccaagttaagatcagatcatctgcaaacaaggataatttgatttttttctttccaattttgatgccccttatttcttgttcttgtctaattactctagctaggacttccactactatgttgaataagtgatagaagtgggcatccttgtcatgttcttgatcttagaggaaagccttttagtttttctttctttagtatgatactagctatgggtctgtcatagatggcttttattatttttgaggtatgttccttatgtacttagtttttttagtgttttttcataaagggatgttgaattttgtcaaatgctttcttaccatgaattgaaatgatcatatggttttgttttttgttttttttttgagacggtctcactctgttgcccagactggaatgcaatggcgtgatcttggctcaccgcagtctctgccttgcaggttcaagtgattctcctgcttcagcctcctgagtagctgggattacaggcgtgtgccaccgcgcctaactaatttttgcatttttagtagagacgaggtttcaccatgttggccagacaggtcttgaactcctgacctcgagcggtccacctgcctcggccttccagagagctgggattacagacgtgagccaccacaccccggcgatcatatgggttttgtctttcatgctgttgatatgatgtatcacatcaatttgtatatgttgaactattcttgcatccctggagataagccccagttggtcatgatggatgatcattttattattgaattccgtttgctactgttttgttgaggatttttacattagtattcaccagtgatattggcttatagtttaatttttttatgtgtgtttatctggttttgttatcagggtaatactggccttgtaaaatgagtttggaagtattctgttctctacttttcagaatattttgagtaggatttgtcttatttcttatttaaatgtttgatagaattcagcagtgaagctattgggtcctgggattttccttgctgggtgactttttattatggcttcaatctcattactttttattggtctgttcagattttggacttcttcacggttcaatcttggtaggttgtgtgtgtctagaaatttatccatttcttctaaagttttccaatttatcggcatatagttgctgataatagcaactaatgattctttgaatttctgctgtaacagttgtaatatctttattttcatctctgattttatttttttgggtcttctctcttttttgcttagtctgtctcaaagtttgtcagttttgtttattttcttcaaaaaacctgttttttgtttcattgatcttttgtattgttttctttatttcaagtttatttatttctgctctgatctttatttctcttctactaattctgggcttggtttgttcttgcttttctaattcttctcttctcttcttttttgttttttttttctttttttttgagacaaggtctcgttttgttgcctaggctggaatacagtggcgcaatctcggctcactgcaacctctgcctctcaggttcaaatgattcttccgcctcagcctcctgagtagctgagattacaggcgcccgccaccatgcccagctaatttttgtatttttagtagagacagggtttcactgtgttggccaggctggtctcaaactcctgacctcaggtgatccacccgcctcagcctcccaaagtgctgtcattacaggcatgagccaccgcgaccagcctctgattctttaagatgccttgttacattatttgcagtttttctacttttttgatataggcatttatagctataagctttcctcttagtactgctttccctgtgtcttatgttttttggtatgttgtgtttccattatcattttttaaagaaaatttttgatttccttcttaattccttcattggcccaccggtcattcaggaatgtgttgtttaaattctatgtatttgtatagtttccaaaataccttgttattaatttctccttttattccactgtggtgagagaagatacttgatattatttcaggttgtttttgatgttttaagacttgttttgtgacctaacatatggatgatccacatgctgaggaaaaaaatgtgtattctgtagctgttggatgaaatattctgtaaatatgtattaggtccatttggtctatagtgtagataaagtgtgatgtttcttagttgattttctgtgtgtagtgttgaagtctccagctattattttattggggtctatctctctctttggctgtaacaatatttgctttgtatatgtgggtgctcccagggttgagtgcatatatattttaaattgttatatcctcttgtagaattgaactgtatcattatatagtgtccttctttgtctcttcttacagtttttatcttgaaatctattttgtcctatataagtatagctgttcctgctctttttggtttccattggcatggaatatccttttttatccctttattttcagcctatgtgtatttttacaggtgaagtgtgttcttgtaggcaacagatcattgggtattttttaaaatccattgagcccctctgtcttttgattggagagtttagtccatttacattgaatgttattattgattagtagggacctactcctgccattttgttatttgttttctagttgttttttgggctcgtcttctttccttccttcttatcttccttttaatgaaggtgattttctctagtggtatggtttagtttcttcctttttgtttgtttgtttatccattatatgttttttggtttgtggctcccatgaggcttggaaattctatcttaaaacccattattgtaagctgataacaactttacactgtttttataaacaaagaaagaaacaggcaaaaagaaaactaataaaaattctacaccttaactttgtccactttttagctttttgttgtttctgtttatatcttattgtactatgtcttgatatgttgttgtagttatttttgttgcttcaacatttagtctttctacttataataagagtaatttatacaccacagttacgctgttataatattctgtatttttctatgtacttactgtttttagtgagttttgtacctttagaggatttcttactgctcattcatgtccttttctttctgattaattacttcctttagcctttcttgtaggacaggtttggtgtggataaaatccctcagcttttgtttgtctggaaagtttttatttttcttttatgtttagaggttattttttccatttatataattctagggtgaaagttttttccttgagcactttaaatatttcatgctactcttctcctggcctgaaagatttccactgaaaagtctgctgccagacatattggagatccattgtatgttacttgtttcttttctcttgctgcttttaggatcctttctttatccttgacatttgggagttattaagtgccttgaagtagtcttttttgggttagatctgcttgatattctataaccttctacttgaatattagtatctttctttagatttgggtttctctgttattatccctttgaataaactttctacgccagtctttctctctacctcctgtttaagaccgatatctcttagatttgctttttttgtagctattttctatgccttgtaggcctgctttattcttttttattcttttctcttttgtctcctgtgactgtgtattttcaagtagcttatcttcaggctcactaattctttcttttgctttatcaattttgctattaagagactcttatgcattctttagtatgtcagttgcattttttgactccagaatgtctgctttgttcattttaattattccagcctcttcattaaatttatctgattggagtctgaattcctcctgtgttatcttgaatttcattgtttcctcaaatcagctattttgtgttctctctctgaaaggtcacatatctctgtctttcccggattttcccgattccctgtttagttcatttgatgaggtcatatttctctaaatggtcttgatgcttatggattttcgttggtgtcttggcattgaagagttaggtatttattgtagtctttgcagtctgggcttgtttgtacctgtcatttttgggaaggctttccaggtatttgaagggacttgggtgttgtgatctaactttttagtcactgaagctgtgtccacattaggggtcaccctaaggccagtaacgctgtagttcttgcagccttgtagaggtaccattttggtggtcttgtataagatccaaaagaattgtctgcattaccagatggagaatcttgttctcttcctttactttctcccaaacaaatggagtctctctgtgctgagttgcctggagctgggggtggggggtgggtgacacaagcacccctgtgactaccactgcgggtatagcacttggtcagatcttaagccagcagagcaatgggtcttgcccaaggcccactgtaaccactacctggttactgcctatgtttgctcaaggcccaagggctgtacattcagcaagtggtgaagcctgccagtactgggtctttcccttcatgttggcaaattctcttagtccctgggcgggtatagagatgctttctggagccagggcctggagccagaaatgttagaaatatacctagtgctttattctactatggctaaactggcacagaaataacaaaacaaagtccttcctactcttctctttcttttcctcaggcagaggagcctctcttcgtggccaccaccaggacaggcccgcagagagtactgccagtgtaccgccagtgttcacttaaggcctaagggctatttagtcagcttttggtgaatgctgccaggccagagactcacccttcagggcagtgggctccactctgccccaggctcagtccacaaattccattcaagagctaaggcctggaattggggacccaagagcccgtttgttgcttttgtccgctgtggccaacctggtagctacactgctagataaagtcccctttactcttccctctccttttctcaaacaggaagagcctctctttgtagccaccacaacttctaataagctgggtctcaccataacctaacacatttctgtctaatccatgccccacaatgtgtactacctggttattgctgctgatgattcagggcccaagggctctttggtcagcaggtgatgaatcctgccatgactgggtccctcgattcaaggcaatgggttgccttctggcccagggagctagggcctggaatgggggcttcacgattctgcccagggccctgtcctactgtgactgagctggtatccaagttgcaaaacaaagtgctttttctcttcccttttctctcctcaagtagaaagcagaggtctcttttggagctctaagctgcgctacctggaattggaggagtgaggagtggtggcataagcactctcttagccgccccagtggtatctgactaagtcaagtgcccccattttactggctccaagccctttacagcactaggacttgcccagaagttgcagtccttgtggcctagatagcctttcagttttatttagggccccagtgcactttagcccactgtggcgtgacttactaaaactcaacttctgatcactgtgatggatgattcccctctggtttgggcaggtttatatgctcccttcatgtgtgtaggctgagttccaattcaaagtcctatgatcactgcactctccttcccgcaagtgcactgattctctccctatgacacgtggccacttctgggggttgaggtagcagtggcattggcgattcaagattgtctttccccttctgtgcctctttcagtgatatgaagttaagatcaggtactataattgctcacctgatttttgtttcttatgatggtgcttttttgtgtagatagtcataacatttgctgtttatgctgggaggttgatcagtagcagcttctattcagccatcttattccacctccttccccagtactgccctgattgaatgagttggtatttgttcctgtttctgttttttggaattgtttgtaaagcattgagcttaattatttaaatgtttgttagaattcagcattgaagccatcttggcctgggctcttcttataggtagttttttttctttttagtattatggtaaatatatatataacataaaatttactattttgacagtaaaaaggcaacctaccatatgggaaaaatatttgcaaatcatacatctgataaggggttaatatcaaaaatacataaaggattcctacaacacaacaacaaaaataatatgatttaaatatgggcaaaagagttgatagacatttctctaaaaatgatatacaaatggccaagaagcacatgaaaagatgtctagcatcactaatccttagggaaatgcaaatgaaaactgtaatgagataccaccacacacccattaggatgggctactatgaaaaaacaataatgagagttggtgaggatatggagacattggaactcttgtgtactgttggttagaatgtaaaatggtatagctgctgtggaaaacagtgtggtgttcctcaaaaaattaaaaatagtattaccatgagatccagaagtactacttctgggtatatacccacaagaattgagttcagggtgtcagagaagtatttgtatttgtacgcccacattatagcagcattattcatgaccaaatcatggaagcaagtcaaatgtccatcaacagataactggataaacaaaatgtggtatatacatacagtggaacataatttagccttaataaggaaggaaactttgacacatggtggaacatgtatgaatcttgaagacaatatgccaagtgatctaagccagtctaaaaaggacaaatattacatgattcctattatgaggttcctagagtagtgaaatttgtagagacataaaatagaatggtgtttgccagggcctgtgggtaaggggaaatggggagtgtgagagaacagataactccacggggcttcccagagtgctccatgttgtatggggattatgtctgtctcataaatatatgtatcattggagacaggttcattactacccatttttgtatactctttgtctagcaccaagctagacatgtagtaggtccatagtaaatacttgttgaactggtaagggaataaattacccttatctgtaacttccctagtttttttatacagagaatgatgctctagttaggcattttcctaggtatatacttgcactttttatctttctcatttccccgctttctttgtttctagagtgagtttttggcatatctttaacatatatatgtgtagtatatatgtgtatttttacatttgactgtagttaaatataagcttaaatatattttttttctattatcactatacattttattagattctatgttctggcagtttttcattattgaaaagcctatgttacaaaaacataccaatttactaccatcaataaatggaaaatgcttatcttaatatgtattgtaactacattttcttcatctttaatgggtaaaaacagttgtcattgttttcattaataattttttgaccactagtagggttgtacttcttttatatgcttgctagtttatttctgattttgtaaattatctttagcaaatgtttactaatcagattggtctgcctttgagttactgctattaccactaccactaccattaccattaccactgtgtattgagcactgagcaagatttaaggggtactacaggaaatcatggtgtagaagaggaacagacacatatattatgtgccataatagaggcaggtgtaatttgtcatgggatcttgagtgataatattaagaactcagtaagcttttaattaccatgtgacaggcaccattctaagtagtttttaaaatattatctcattgaatcctcataacaaccctatgcaataggtactctgattatcttcattttacagataaagaaactgaggcacaaggagtttaattacttgccataagtgaaaatgttagtaaatg

SEQ ID NO: 10916 - DNA, 100 bp, Homo sapiens
agaagacagaagataaagataaaccccttatttataaagataaagaaactgaggcacaaggagtttaattacttgccataagtgaaaatgttagtaaatg

SEQ ID NO: 10917 - DNA, 2900 bp, Homo sapiens
acaaaaagatagtaccatgagttgtcaaggacctgaacaactggaagcctcatataatgctggtgggaatatgaattggaataactactttatagaacaatttgttcagtttaacagtgcatgtaaataccctatgactcagcaattccactcttagatatgtacctgacagaaatgcttttatcaaaagacacgtataatatggtttataggagcattatgcaaataatgctttatattttaattatgtttgttttgagcatatactttaatactaatacttagtattaagaatatctaaaaaaggtattgggtagtttatctcaatatggacttgcgtattgaagttctttaaggtttcatgtgtgttgtgtgtgtgtgtatgtatgtatgtatgtgtgttttttaacctacatagtttataccattctatatgcttgattcttttgtatagctctatgccatcttttgcttatgtgggatagatattaataactggaataattttggaccagcatttacccatataccttcaagtatgtcctctaatgaaagatgctacagtttattctctgtaatgactatgtgttatagaggtataaagatgaaacttgtcatcataatcccactgaccacagagaaccactattaacattgtgtttatatgttttgtttttaatgcatttgcaattgtatttagtaaggctctatattctgcttttcttccgcataacatagtattttggatttttaatggtaacatagccagagtgtaatttacttctctatgttatacatattgtttaattttcaaccttatgctactgtaaaataacactgtgataaatacattttcttcaaaattggtcaacttttgtgataatttctatagtctgtattcatagatgtgtggtagctccaaattgacataaaacatgaatttagtatctctatttattttataccaggatttttctttagtatataatatgattggtagactaaattgtaaactttttcccatcatttaaatttagagtttctttgcattctagtgtatagtgaatgctataaatgtaattagtatggcattttagtcattaattttctttcatgaaagaaaagaaaaacattttgtgttgattattgagagcttattatattccagggatttttgtcactctgtaagttaccagcaataagcaaattattaaataaattactgtacaatcatccaatgaaatactatgcagctaccaagcatgatgtttaccaagaaatttggggaaatgttcataatacatattgtatatacagttactatcctgactgcaaaatttaaaaagtatatatttagaaaaaaagaaaactgtaggaaatatatcatgatttgaatggaggttgtttctggggagtggaactgagtaattcttttccttagagttgtttttattttcaaaaagtgtttatccaatctttttcaaattaaattttcattaatatcaaagtaatatatttacatatttttaaaaaacagatagttttacaaggcttcaaataaaaaccagtcccgtgaccaaacctctttctacctgtgatttctactttctggaggtaaccaatttcaactcttggcaattcttacttacttacatacatcctttctaaagtgtaaggtagtaatttaccacaagcacaggcacacttttcctcattcgttttcccagtataatttttcataatatttgcctaaattaatttgcagtattttctttattgtggctacgtaaatatttgtaagccacttgaatactgtgattgtttttcctttttcgtgtacttgtttattatattttgctgaagtattcattcgtttttaccatttgcttagttttctatatacctatcaccaattcattcctaaattatcctgtagaaatattgtaaatcctggccaggcatggtagcacatgtctgtaatcccagcactttgggaggccgaggtgggcagattaccttaggtcaggagttcaagaccagcctggccaacatggtgaaaccctatctctactaaaaatacaaaaattaaccaggcatggtggtgttcctgtaatcccagctgctcaggaggctgaggcaggagaatcacttgaacctgggaggcagaggttgcagtgagtcgagattgcgccattgcactcccgcctgggtgacagagtgagtctccgtctcaaaaaaaaaaaaaaaaaaaaaaaaaaagggaaagaaagaaagaaaccttataaatgcttgtgttccaacaaatcaggtaatctatcagtttctttttttttttctttagacacccttcctggagccccgtgtctgtcttcttgcttctgttttatctacctcagtaccttgcatctgtctaacgcctctccttacattctttatgctgtattataaatgttgagtcacccctacatattcacctacttttgcattttccttcattttgatgtacttagtgcccctagctgtacccaatacaatatagactttcaggttacatataaattctctaaatttattcagaaatctgtagataaaaccttgactacattgtaaatatttgatttttcatttcatctttattcttaaatcagacgattttattttccaacaataggattcttcctgggcatatgtattatcatcctgactccttagataatatattattttcttcagtaagtaagaaatgaattctctgaactcttgatagttaaaaaaaaactaagtatcaaaaagtcatattgtaattaaaatatttgtaaagtactaattactgaagcatttattctatattttcattttcagaggacgattatttatcatttctactaaagcaggatctc

SEQ ID NO: 10918 - DNA, 100 bp, Homo sapiens
acaaaaagatagtaccatgagttgtcaaggacctgaacaactggaagcctcatataatgctgaggacgattatttatcatttctactaaagcaggatctc

SEQ ID NO: 10919 - DNA, 386 bp, Homo sapiens
ggatataatttcagctgtagtaagctaattggcaattgtcttattccaacctccaatttgtaccctccaccccctactgccatttttttaaatttttaattgttccttcttataaattgatttgcaatagtaaaatactggtaaaatggatggataatgccaaaccgtaacccagcaattttacatagatgttggcacaagagagaaatgggtaaaatgtaagaattgagaaatcaaacatggaaatgtatgcattgtttatataaacattttaattaccagttgtacaaattaaatctaaattattgtttcattccagagatagccagcccaggtacagcagtgaacaacttagtaccctgttttgcatcatgtttttcttcaga

SEQ ID NO: 10920 - DNA, 86 bp, Homo sapiens
ggatataatttcagctgtaagatagccagcccaggtacagcagtgaacaacttagtaccctgttttgcatcatgtttttcttcaga

SEQ ID NO: 10921 - DNA, 2744 bp, Homo sapiens
aggcggtacctggacgggttcgtcccgggctgtttcgcgtccggcctgaggcggctggggccgcgcaggtagtgtccctgcacttcttgcccgggcgcgtgaggccagctccgctgcgcttgtctccagcttccagccctcctcccctaagccgccgccatcatgctgctgcctgtgttcaccctgaaactgcgccacaaaatcagcccccgaatggtggccatagggcgctacgacgggactcacccgtgcctggcggccgccacccaaacgggcaaggtttttattcataatcctcatacacggaaccagcatgtcagtgcatccagggtcttccagagccccctggaatctgatgtttctcttctcagcattaaccaggcagtcagctgtctgactgcaggcgtattgaaccctgagcttggctatgatgcccttttagtggggacacagactaatcttttggcttatgatgtctacaataattcggatttgttctacagagaggtagcagatggggcaaatgcaattgtgctggggacattgggagacatttcttcccctcttgcgattattggtggcaattgtgctctgcaaggtttcaatcatgaaggaagtgatctcttttggacggttactggagacaatgttaattccttggccttgtgtgactttgatggtgatggaaagaaagagcttcttgttggatctgaggattttgatatccgagtttttaaggaagatgagattgtggcagaaatgacagaaacagagatagtcacctctctttgtcccatgtatggcagtcgatttggttatgccctttccaatggcacagttggagtttatgacaaaacatcccgatactggagaattaaatcgaaaaatcatgccatgagcattcatgcttttgaccttaattctgatggagtgaatgaactgataactggttggtccaatgggaaggttgatgctcgaagtgaccgaactggggaggtcatctttaaggacaatttttcttctgcaattgccggtgtggtagagggagattaccggatggatggccacatacagttaatctgctgctcagtggatggggaaatccggggctacctgcctggcacggctgagatgaggggcaacctcatggacaccagtgcagagcaggacctgatccgagagctgagtcagaagaagcagaatctgttgctggaactccgtaactatgaggaaaatgccaaggctgaattggccagtccactgaacgaggctgatgggcatcggggcataatcccagccaataccaggctccacaccacgctctcagtcagcctggggaatgagacccaaactgctcatacagaattacgcatttccacttctaatgacaccatcatccgagcagtattgatttttgcagaaggaatttttacaggtgaaagccacgtggtacatcccagcattcacaacctctccagttccatctgcatccctattgtgcctcccaaagatgtccctgtggatctgcacttgaaggcattcgtgggttacagaagcagcacccagtttcatgtatttgaatcgacaagacagctccctcgattctccatgtatgcgctgaccagcctggaccctgccagtgagccaatcagttatgttaactttaccattgcagaacgggcacagagggttgttgtatggctcggtcagaactttctgttaccagaagacactcacattcagaatgctccatttcaagtgtgtttcacatctttacggaatggcggccacctgcatataaaaataaaacttagtggagagatcactataaatactgatgatattgatttggctggtgatatcatccagtcaatggcatcattttttgctattgaagaccttcaagtagaagcggattttcctgtctattttgaggaattacgaaaggtgctagttaaggtggatgaatatcattcagtgcatcagaagctcagtgctgatatggctgatcattctaatttgatccgaagtttgctggtcggagctgaggatgctcgtctgatgagggacatgaaaacaatgaagagtcgttatatggaactctatgaccttaatagagacttgctaaatggatataaaattcgctgtaacaatcacacagagctgttgggaaacctcaaagcagtaaatcaagcaattcaaagagcaggtcgtctgcgggttggaaaaccaaagaaccaggtgatcactgcttgtcgggatgcaattcgaagcaataacatcaacacactgttcaaaatcatgcgagtggggacagcttcttcctaggtgaggaaaatacaggtcatgaagttcctggcaaagattttctgttaaaaacctatgctggtttgctttggatcacaccctggtgaaccccgggtgctaagaatgaaaataaccttggtgagttgtacaaattaaagacaaagaactacatgtgaagatagacttgctttctatttttaaatcagtagtagtactgttgctgaataatactaggtttttatggaataggatgaatgcttttgaagtattagggcttcagagtccaattttgcttatttatggtatataaatacatatttttttcttgaaattgcaattgagtttgtacttttcaaatagattatctactttttcattaaaatgtaaagatgttaaactttgtgttgattgattataaaatcaccaccaaatcagaa

SEQ ID NO: 10922 - DNA, 3942 bp, Homo sapiens
cagttggagtttatgacaaaacatcccgatactggagaattaaagttagtataatttagcctttgatattcaggcgcttgatagttattgtgagacttctgtgctaattattaaaattctttttcagtcgaaaaatcatgccatgagcattcatgcttttgaccttaattctgatggagtgaatgaactgataactggttggtccaatgggaaggtaagtttgaatagcaaagttcaggtataattcagagtagtaattgtccaaggtgtattggctgtaggacttagaacagtaacattgggatgtaaacttcagttcgttccttggcaatgtttttacatttaacttaataatcttgacacattcttcctgctatcattgtcaagagctgcacagtgagagagtgtaagtcttataagcggtgtttgggggaaatcttcggggagattctgtctaaatctcttatttgaagtgctgagaatccatcagccagattgattctaggtagtacaacagtaaaaaaggagttttaaggaattgtttgaatagctcttttccaatacatcttcaaaactgcctgaaaacttagcactaataggaagaatcatgttagcatattgttttctgagctataactttaaaataaaatccttttgcttgctttccttttttaacttcaaatcagaattttttacagtcttttggcaagtcaggattgtcttcttagaagctgcctaggtagctgccagatctccatggataccatttgccctcgctttcttgtctgtcagtgttggattgcctgaaggggatcagcaaattcttatcttttcttctttgatttatctttacttttctctagcaccttgtaagcattcctttggtgttacgtgaagaacggattctaaaaagctgttatgttggtttctgcttcttcacttagttttgtcattagtatgggtactaaaaattataagactgtatagttgcttattaagaaatatgaaagtctgtgaaatgggtgtcttagttggtttgggctgctgtaacaaaataccatagggtgggtggcttataaacaacagaaatttatttcttatagttctggaggctgggaagcccccatcaaggtgttggcagtttcagtgtctggtgagggaccacttcctcataggagccttacagggtggaaggggcaagggatctctctgggccttcttttatagggcactaatcctgttcatgggggctctgcccttatgacctaatcacctctcacaagctctacttgccaataccattcattaccttggctaataggattcagcataggaatttgtgggggcaaaaacattcagatcatagcagtggatcatattttgagggaatataaattattatgactgacttaagaattagaaaactactagacttgaaaacttgtcaggttaccttgaaatataattgttgacctagatgtttttatagttaaatgcttttgaaattttaagggatttctattatgtaatgcgttcctgagcatgaaaaagataagaaaattatataagtggaaaaaccgattatctacatctaacagaaatatacaaaaaggaaatatacagatccaacttgtgaatacaggtgtgaaaatattaaataaatgctgctagacaattaactttgtcttttgtatgtcatttgatgagttggagggccatcctttcctttcagggtaaaacctcccagttggattaagcaaaagatcagaatatccacagaaatattaatttgtagtcctgcttcttagttagcaaatgagccttcttatttgctaaatattgtggaaatgcagtggtagaagccattaggtagctaggctttaactagaaagaagcaagttcaggtcagtctgagttagagggctacattaatgtgctttgttaaaaatgcaggtcattcgttctttcacaggctttagcattcataattttcaggcttccatgatgttattaatagcattaatacttgacagtgatatactgtagacaaggggtaggctgtaacctaaattactttatgttttggttgcaaagttttgcccagaagattgtttatgaaaagacaaaactagtgagtagcattggtcatcgaaatgattgctatgctagattttctgtagctagccttttgttgataatacctgtgtccttgcctggaacataatcatctttttttttttttttgagactggagtctcgctttgtcacccaggctggagtgcagtggcgcaatctcggctcactgcaacctccgcctcccgggttcaagcgattctcctgcctcagcctccctagtagctgggactacaggtgcgtaccaccacacccagctaattttttgtatttttagtacagacagggtttcaccatgttagccagaatggtctcgatttcctgacctcgtgatccgcctgcctcggcctcacaaagtgctggcattacaggcgtgagccactgtgcccggcctcataatcttcattttaagtgatggtcacttattatcacttttgagatgcatttgtttctgatcagtcatttatttatttgttctctctcttggaaatgggagacttagaggataggagagctctctaaagtatctgaatagtttttatgtggaagaggaactcttaacagggttgttgtaaaaggttgcatggtggaagactgggctaactccgtagtttctgaacttcagattcaacatactttatacatttatatataataaagatacaatttttatatagagctaacatttattacgtacttctgtgtgtcaggccctgttgatatatgttaacttcattaggcctcagttatacccaatgggatatagtactgttaatttctccatgttctggttattgaaccccagatgaaaagaccaagcacagaatggttaagaaacttgcaagatgctgtggatagtacgtggcagagctagattctgaacctgagcggtttggccattaagcccatgcccttttgcactgtgctgtgtgtactatatgtactggctcttagcagacccgtttcttcaagtgaagcattgtgtgaaggcctatgaaaaacagcttttatttaaaaagaaggaagcacagctggttgaggctctttagggtccctcttggccccagcagtcataggtatctcctgagaagttgtagggcttcatagaatactcttgaaaactgctagactaaatgacctttaaagctgatttttatttttaaattttgtggtttttaaacatgtagcataagcaacttttaaatttgtgttttatttgtaggttgatgctcgaagtgaccgaactggggaggtcatctttaaggacaatttttcttctgcaattgccggtgtggtagagggagattaccggatggatggccacatacagttaatctgctgctcagtggatggggaaagtaaattgggatgagaaaaatccttaaaaagtcacgttttccatttgattgggtcaaaatatcaggaaatttcacctgaagtatttgtaccgagatcctgtagttctaataaattcaccaaagttggggagaacttaggtttttgtttttaagagcaggtaattgatgacctaaaagtatacctggttatacttgcggttttttccttctgttcagtccggggctacctgcctggcacggctgagatgaggggcaacctcatggacaccagtgcagagcaggacctgatccgagagctgagtcagaagaagcagaatctgttgctggaactccgtaactatgaggaaaatgccaaggtaggtgtaggtcctaatgtgaccaggtaatggaggctgaaatgttgagactgaccgggaggatcagcaaatatggaagaatgagagtgtcattg

SEQ ID NO: 10923 - DNA, 473 bp, Homo sapiens
cagttggagtttatgacaaaacatcccgatactggagaattaaatcgaaaaatcatgccatgagcattcatgcttttgaccttaattctgatggagtgaatgaactgataactggttggtccaatgggaaggttgatgctcgaagtgaccgaactggggaggtcatctttaaggacaatttttcttctgcaattgccggtgtggtagagggagattaccggatggatggccacatacatccggggctacctgcctggcacggctgagatgaggggcaacctcatggacaccagtgcagagcaggacctgatccgagagctgagtcagaagaagcagaatctgttgctggaactccgtaactatgaggaaaatgccaaggtaggtgtaggtcctaatgtgaccaggtaatggaggctgaaatgttgagactgaccgggaggatcagcaaatatggaagaatgagagtgtcattg

SEQ ID NO: 10924 - DNA, 3171 bp, Homo sapiens
caacctctccagttccatctgcatccctattgtgcctcccaaagatgtccctgtggatctgcacttgaaggcattcgtgggttacagaagcaggtgaccctttgcaagtcacagttcatttcaggacagcacttagaggagggcaagatgtataaattttccatatgcccagtggattcttgggggcctgagaaaccatttaatggttctgtctacccaaagtttctcatgaccttttatttcctcagtttgaaacctgtaaaaagaaaatggaaaaactgatatgtaagtttaagatggttctttttttttttttttttttgagacagattctagctttgtcacccaggctggagtacagtggggcaatctcagttcactgcaacctctacctcctgggttcaagcaattcttctgcctcagcctcctgagtactgggaccacaggtgcccaccaccacgcccagctaatttttgtatttttagtagagacaggagttcaccatgttggccaggctggtcttgaactcctgacctcaggtgatccacccgccttggcttccgaaagtgctgggattacaggcatgagccaccacgcctggctaagatcattattttctgtttttagtcaggtgatctcataatcaaaaaatgtttaattgatgatttgtcaatttgtagttttggccactaaaactacaagagttaggatgcacctttatattacagtcatacataacctcagctagtgaagaaaaactgctctatttgtggaagataagatactttttacatcccctttatgatattttaaacccttagtgcatgcaggtatatatgtagactcatgctgtctttaaatcccaaacctaatatattactgtagtactttaaccctcaagtgttttgggggttccttcttaagtgaaacccttaaatatcaattgatgacccagaagtggctttattttctgggccttgcattttgaaagaacattctatacaaaacaattctcttgtgtttcattgattggccatagcacccagtttcatgtatttgaatcgacaagacagctccctcgattctccatgtatgcgctgaccagcctggaccctgccagtgagccaatcagttatgttaactttaccattgcagaacgggcacagagggtgagtatctcgcttttctctttcaatgcttttacacagtagaatcctttagatgttatttcatagaaagggaaaattacattaatgtgttatattggtagcagtaaatatgatatgaaagaattctctaacttgggggtggcttgtaacctgtaataaaaatattgctaaaataccttctctcactttgaaaaagcatctgagcaatcctcagttattggtgaattcttaccagtgtttaattcctctctttccgttatggtcttagtgtggttgtcctggtgtagtatttcaagaggaacctgcagcaagatgaaaagagagtgggacttggagctaagaacgtttttggctttaagtgctacgttaactcattaaattcttagtgatcttggggaagtcccctcaccagtgtgagcctcagttttcttatctaataagtaaggataatcttacccaccttattgcgggggcccgaggattacatgattggtgtaacagtagcaccttgtacatttgaaaggactaataccagtggactttaaccttggctgggctttggaattcttggtgggactttttaatcatgtagattctcaggcccctgcctggcctgtggaaccacagactctataggtgggcccttccagaaggcctcatgggtggttctcatgtggaacctgtgttgcaagccactgcatggtgttactgctattaacattaaaacttatattttccttattgtgtggatatatctgtggtgtttgcccatgtatacttcattttacatttcttaaagaatagaatggaatggttttaagcacgctacattgtccaggttatacccacagaagagctgttgtgtaacagaatcagcatcatacctgaatcatttgtacattgcatataagactatgtctaagtagaagatgctatgaaatcatgtctgctgtggggccaggcataattatgaatgttacttaagagcataggtgaggtgagaaaagggaatgtgactagtgttttagtattttcttggtgtgggatgaagtataattcttttttttttttctcaacaaagcagtaaaactagaaagaaggagaactcttccctcaagaatggctgtaccttcatatctagaggcacattaaaaaaaagaacgtctgtaccttaaaaatggaggtcatttcattgtgttcattttcaaggttgttgtatggctcggtcagaactttctgttaccagaagacactcacattcagaatgctccatttcaagtgtgtttcacatctttacggaatggcggccacctgcatataaaaataaaacttagtggagaggtaatgtttaatatcacggggcatagatttcttttttgaatttatttattcaaacacttagaccatggaatgagaggggcatagatttctcatgtggtgtttaccattcagtccaaagtgaggtgggggacatcaatgtcaaggtcataaaaccacgttttgttttatttttttcacatggtttaacttagtctgttagtgttaccattttagacactggggtataatttggaatagctgttttctgcctccttcccttcatctcttccttgtctaatttggaaagaattgggaatacagaggtcaacaaaaacattttcaatgtttggatgattttgtcatttaatttctaaggccagaggatttaccttttagctagctgctggaaataatgcagtttgtaatttctttgagagctaaactttcctttttcaacactgcatatatatatatatgcacaataattttgttgagtatggggaaattcaggtactattttagctaagtttgtctaacatctgaggatgctaaacttgtctattttttctctgggtagatcactataaatactgatgatattgatttggctggtgatatcatccagtcaatggcatcattttttgctattgaagaccttcaagtagaagcggattttcctgtc

SEQ ID NO: 10925 - DNA, 588 bp, Homo sapiens
caacctctccagttccatctgcatccctattgtgcctcccaaagatgtccctgtggatctgcacttgaaggcattcgtgggttacagaagcagcacccagtttcatgtatttgaatcgacaagacagctccctcgattctccatgtatgcgctgaccagcctggaccctgccagtgagccaatcagttatgttaactttaccattgcagaacgggcacagaggcagtaaaactagaaagaaggagaactcttccctcaagaatggctgtaccttcatatctagaggcacattaaaaaaaagaacgtctgtaccttaaaaatggaggtcatttcattgtgttcattttcaaggttgttgtatggctcggtcagaactttctgttaccagaagacactcacattcagaatgctccatttcaagtgtgtttcacatctttacggaatggcggccacctgcatataaaaataaaacttagtggagagatcactataaatactgatgatattgatttggctggtgatatcatccagtcaatggcatcattttttgctattgaagaccttcaagtagaagcggattttcctgtc

SEQ ID NO: 10926 - DNA, 9632 bp, Homo sapiens
gatggggcaaatgcaattgtgctggggacattgggagacatttcttcccctcttgcgattattggtggcaattgtgctctgcaaggtttcaatcatgaaggaagtgatctcttttggacggtatgaagaagaaaacattctttttggtacccttaagcatttttacttttaatgttcttttttaaccaccaactctactgagtaataatatttataattctgtgcattaaaaaaggatatgaataattcgaatagcattcattcgtgttttgtgtaatcctctccttcatgtagctaatatatttggagtaaatggagaaacgatggcatgctaatggtttggggttttattttcaggttactggagacaatgttaattccttggccttgtgtgactttgatggtgatggaaagaaagaggtatgtgggggaggagatatctctcttgtgtgttcagccaaatgaattttgccatgacagtgacattagtgttgacagaagtgtaagcttctcctggctgattttggtgctctgttgcctaaatgctcagccagttggccccattcgtctttctcttctcttttgaacaataaatcacttgtgcttgtgtaataaatacaaagatcaaagccatggtgtttcagagacacaggagagggcagagagggtagaagagttgggatttcagtcatattcacggtcttatgaattgctcctgatgctttgaaaccatattagtatatagttttcaattttggccaactgttttgaggaatctaaatgttttagagattggcttttagcctttgaaattattcttatggttaccctagaaattagcttcttgagcagttagtaggtgtgacgtgctgtgttgggcaccgacttgcccctctcttgtccatggacactggactctggtgtttgaacagggcttccatctgtaggcagagaaagttgctgatccagggagccttttcaggtactcagggaaataacgtattctggcaagatgtgcagctcccatggcaggataaaagctgcagtagcccctgttccttcattgattgaatctgctgatcctcccattagagggagcatttctgagcatcaaacgattatgaggttgtcaatcttgggtggcagaagcagcatgcaaagtactgtgcaattttttgttttgtttacagaaattttgttgtttgcacttactcacctgaacatgtatgatatttccccttcagcttcttgttggatctgaggattttgatatccgagtttttaaggaagatgagattgtggcagaaatgacagaaacagaggtaagaagctccacctcgaactatggtaaccttgagcaagatagatcagtactgtcagatgaaacatcaagtgagagtgctggggcatctccaaacccaggtggttttaggataaaagcttggggagggggtcagacagagctgtatgttatggtaagaaaagcaataaaaatcctaattaagatatattttgaaaagactgattaaatagagaaaaattattgcatatagttgaatacataaaggcatttcttttaatgagttaatacatgcaaataataataatggcaatcatttattatgtacctattgtatgccaggtagtgctctaagtactttatatgaagtaacatattgaatccttacaacaaccctaataggaagataaattattattatttctatagatgaggaaaatggtgttctggttttttgtttgtttgtttgtttgttttgaggcagagttttactccatcacccaggctggagtgcggtggtgcgatctcggcttactgcaagctccacctcccaagttcaagtgattcgcatgcctcagcctcctgagtagctgggactacaggcacgcaccaccacgcctgggtaatttttgtgtttttaatagagacggggtttcaccatgttggccaggctggtgttgaactccagacctcaagtgatccgcccaccttggcctcccaaagtgttgggattacaggggtgacccaccgcgcctgtattttttgttaagttacttgtacgtagtcttggctatgaaatggcatggtcagcatttgaacctttatgccccttcctcctcatcatgtgtattcagtagggctgaagtgcataaatgagatgtctatatttttttcttcctgcaaattcagtacttctttggcacatttctgtaggtaaacttaaaaattatagaacttgtgattagaatcactcatgtaactgaacctgagatatttcttaatatcccaggttgtttaggcctgatgtttaggcctggtgcagtggctcatgcctgtaatcccagtgctttgggaggccaaggtgggaggatcacttgaggccaggagtttgagacccgcctgggcaacataacaagactccatctctacaaaaaatattaaaaaattagccagaaggtgatggcacacgtctgtagtcccagctgcttgggagactgaggcaggaggatcccttgagcccaggagcttgaggctacagtgagctatgatcacgccactgcattccacccaggggcaacgagaacaagactctgtctcaaaaataaaatttttaagaagtaacagtgttaagagttaggaaaataaagacaaaaataaagcaaaaagcactatctaaagattacctgtatcctttatggttttgacattcttaggatatttatttgctgctggttttccaggattgggcaagactcaaacagaaaaaaataagatattcttaattaaggaataagaggataaaggagcaatagcttgtgaacgttgtaagtggacagaaagaaaccagtaaaagagagtcttagagatcagaatggtgggattttgcaaaatttagttatgtggtatttaggagtctgtatcagaaaagctcgagggcactagtctcaaaactgaccttggccacttgtctttaaattacttgcttcatgtcactcataaaagctgcctaagaaggtcagacttcttttctcctaactataaaaggagacaaaaagcaaaacctacacattgacatacagtgctaccaatgattttaactaagttatcctatagcaagagtcatcagtttttatttagtcctactatactttttatatattcacagttatcatgatgtaagatgatagttgtggacagagaagaaatgaagaggagaaatgggtgccaaaaggagcagtctgaggatgtgtgtttatacagggagtctgttttttattttattatttttttgagatggagtttcgctcttgtcgcccatgctggagtgcagtggcgtgatcttggctcactgcaacctccgcctcccaggttcaagtgattctcctgcctcagcctcccgagtagctgggattacaggcacctgccaccgcgcccagctaatttttgtatttttagtagagatggggtttcgtcatgttggccagactggtcttgaactcctgacctcaggtgatccacccgcctcagcctcccaaagtgttgggattacaggcatgagccaccatgcctggcccgggagtctgttttgtgtgtatgtgcttatatgtgctttctgaagagagggcccggagccttcattacattcttaaaggggtttgcaacctcccccaccaccaaaaaaaaacaacttgagaatccctggctgatagatggtgtgtcccgaattctcatatccctttcattctaatttgtggtaaatcttttctcctttggtgggaatcattcagattttgttggatttttattgcttgttaatattagatttgaggagactgaattctttgaaacatctctttcctaaatcctagaaaagaggacaagaacctggaatagagttagggatttgaggggacttgttgatcttctagtccacaaaaggaagaaactggtgaactaaggaagcagtaaaagagctgaggaatctggggctaaatttatgaaaatatggacttcataacattgttcacttgcagggccattttcctgttctctttgttaggttttgctcctagctcaaatatcatttcccagatcagcaaaatcatgattcatttggcagttgaacagtatgaagtattgtcagaagaatgccttgagctaaataattctggaatcctacacagcactttgtattcatagttaagtgaagtgggtggttttgtagaaaagctgtaggtgtaaaggaaattatataactattctctgctttatacaatttatttcttaatatctcttgtattaggaacagaattagaaagtagatctgcaggatcatggatatcattaagctttggttttaactttaaaggaaagttttgttcagtacctaaaattttatccttttaaggatgtcaaatccttgaacagtcctataaatatttctgtatcatatatgcattctgtatattgttatatactacacaaatccacgtgcctgggtttttacttttcaaaggattatgtgttctttcttttacctctagcaaacaaattatgtcatagaaagaaaagtgtatacatgaagtaagatattcaattgtgtattgttataagtcttttaaaaattgagactgtaggatgttataagttaagtaataatcattaaagcctcttgggtgaacatatataatatctattgtatatgcatattttcgatcttgtgtagttagcttatgttttccttagtccttcagttttcatgtgttttttaaaaataattttgtgaaacttgccacataaggttgctctaaaacaccaaaccctgtgagtttatttaaatctgattatacaactctgaagtagatgacatgtatcgtagagaagaggaatacattccccactaatggattggaagcgcttttaaatctaattttaacatagttgtaacaaggagtgtgaagtcttataaagccgtacttgacagtaaactgagtcttaatgaaaagatgttgtgtttttgtggattgttttgcagatagtcacctctctttgtcccatgtatggcagtcgatttggttatgccctttccaatggcacagttggagtttatgacaaaacatcccgatactggagaattaaagttagtataatttagcctttgatattcaggcgcttgatagttattgtgagacttctgtgctaattattaaaattctttttcagtcgaaaaatcatgccatgagcattcatgcttttgaccttaattctgatggagtgaatgaactgataactggttggtccaatgggaaggtaagtttgaatagcaaagttcaggtataattcagagtagtaattgtccaaggtgtattggctgtaggacttagaacagtaacattgggatgtaaacttcagttcgttccttggcaatgtttttacatttaacttaataatcttgacacattcttcctgctatcattgtcaagagctgcacagtgagagagtgtaagtcttataagcggtgtttgggggaaatcttcggggagattctgtctaaatctcttatttgaagtgctgagaatccatcagccagattgattctaggtagtacaacagtaaaaaaggagttttaaggaattgtttgaatagctcttttccaatacatcttcaaaactgcctgaaaacttagcactaataggaagaatcatgttagcatattgttttctgagctataactttaaaataaaatccttttgcttgctttccttttttaacttcaaatcagaattttttacagtcttttggcaagtcaggattgtcttcttagaagctgcctaggtagctgccagatctccatggataccatttgccctcgctttcttgtctgtcagtgttggattgcctgaaggggatcagcaaattcttatcttttcttctttgatttatctttacttttctctagcaccttgtaagcattcctttggtgttacgtgaagaacggattctaaaaagctgttatgttggtttctgcttcttcacttagttttgtcattagtatgggtactaaaaattataagactgtatagttgcttattaagaaatatgaaagtctgtgaaatgggtgtcttagttggtttgggctgctgtaacaaaataccatagggtgggtggcttataaacaacagaaatttatttcttatagttctggaggctgggaagcccccatcaaggtgttggcagtttcagtgtctggtgagggaccacttcctcataggagccttacagggtggaaggggcaagggatctctctgggccttcttttatagggcactaatcctgttcatgggggctctgcccttatgacctaatcacctctcacaagctctacttgccaataccattcattaccttggctaataggattcagcataggaatttgtgggggcaaaaacattcagatcatagcagtggatcatattttgagggaatataaattattatgactgacttaagaattagaaaactactagacttgaaaacttgtcaggttaccttgaaatataattgttgacctagatgtttttatagttaaatgcttttgaaattttaagggatttctattatgtaatgcgttcctgagcatgaaaaagataagaaaattatataagtggaaaaaccgattatctacatctaacagaaatatacaaaaaggaaatatacagatccaacttgtgaatacaggtgtgaaaatattaaataaatgctgctagacaattaactttgtcttttgtatgtcatttgatgagttggagggccatcctttcctttcagggtaaaacctcccagttggattaagcaaaagatcagaatatccacagaaatattaatttgtagtcctgcttcttagttagcaaatgagccttcttatttgctaaatattgtggaaatgcagtggtagaagccattaggtagctaggctttaactagaaagaagcaagttcaggtcagtctgagttagagggctacattaatgtgctttgttaaaaatgcaggtcattcgttctttcacaggctttagcattcataattttcaggcttccatgatgttattaatagcattaatacttgacagtgatatactgtagacaaggggtaggctgtaacctaaattactttatgttttggttgcaaagttttgcccagaagattgtttatgaaaagacaaaactagtgagtagcattggtcatcgaaatgattgctatgctagattttctgtagctagccttttgttgataatacctgtgtccttgcctggaacataatcatctttttttttttttttgagactggagtctcgctttgtcacccaggctggagtgcagtggcgcaatctcggctcactgcaacctccgcctcccgggttcaagcgattctcctgcctcagcctccctagtagctgggactacaggtgcgtaccaccacacccagctaattttttgtatttttagtacagacagggtttcaccatgttagccagaatggtctcgatttcctgacctcgtgatccgcctgcctcggcctcacaaagtgctggcattacaggcgtgagccactgtgcccggcctcataatcttcattttaagtgatggtcacttattatcacttttgagatgcatttgtttctgatcagtcatttatttatttgttctctctcttggaaatgggagacttagaggataggagagctctctaaagtatctgaatagtttttatgtggaagaggaactcttaacagggttgttgtaaaaggttgcatggtggaagactgggctaactccgtagtttctgaacttcagattcaacatactttatacatttatatataataaagatacaatttttatatagagctaacatttattacgtacttctgtgtgtcaggccctgttgatatatgttaacttcattaggcctcagttatacccaatgggatatagtactgttaatttctccatgttctggttattgaaccccagatgaaaagaccaagcacagaatggttaagaaacttgcaagatgctgtggatagtacgtggcagagctagattctgaacctgagcggtttggccattaagcccatgcccttttgcactgtgctgtgtgtactatatgtactggctcttagcagacccgtttcttcaagtgaagcattgtgtgaaggcctatgaaaaacagcttttatttaaaaagaaggaagcacagctggttgaggctctttagggtccctcttggccccagcagtcataggtatctcctgagaagttgtagggcttcatagaatactcttgaaaactgctagactaaatgacctttaaagctgatttttatttttaaattttgtggtttttaaacatgtagcataagcaacttttaaatttgtgttttatttgtaggttgatgctcgaagtgaccgaactggggaggtcatctttaaggacaatttttcttctgcaattgccggtgtggtagagggagattaccggatggatggccacatacagttaatctgctgctcagtggatggggaaagtaaattgggatgagaaaaatccttaaaaagtcacgttttccatttgattgggtcaaaatatcaggaaatttcacctgaagtatttgtaccgagatcctgtagttctaataaattcaccaaagttggggagaacttaggtttttgtttttaagagcaggtaattgatgacctaaaagtatacctggttatacttgcggttttttccttctgttcagtccggggctacctgcctggcacggctgagatgaggggcaacctcatggacaccagtgcagagcaggacctgatccgagagctgagtcagaagaagcagaatctgttgctggaactccgtaactatgaggaaaatgccaaggtaggtgtaggtcctaatgtgaccaggtaatggaggctgaaatgttgagactgaccgggaggatcagcaaatatggaagaatgagagtgtcattgccagggtgtggcctttttgccattgtcagaattgagaggggatatatgctttcgtcttgaaatttcatttccaggtagttaaactgtagaaatgttttcctgattgtttaaggacatttcctgcagcactatttatttatagcagtgaaaacagctggaagaaacttagatgttcgtcagcagtagggagtatgtgctaaggaatattaagcagctcaaagaatgaatacttggactgatatggaaggatatctgtcgtcttaccaagtgacaaaaggcaagaacaatatagaatgtcttttatctttttcaaaaacaaacatgttaaaaacagacaactgtaaaaactgtgtgtgtgcatacagcaaactggctgaaatattcctttaatttgtcctgtaatgcattactgtatttgaatttgatgtaacaagggaatttgtttgcttactttaaaagaacaatacttcaaaaatgttaaagtcatgatgggatacagtggaccatacccatagaaagatgcaagggtattttcccacagggccagatagagcaagggagcactaatgaggtga

SEQ ID NO: 10927 - DNA, 845 bp, Homo sapiens
gatggggcaaatgcaattgtgctggggacattgggagacatttcttcccctcttgcgattattggtggcaattgtgctctgcaaggtttcaatcatgaaggaagtgatctcttttggacggttactggagacaatgttaattccttggccttgtgtgactttgatggtgatggaaagaaagagcttcttgttggatctgaggattttgatatccgagtttttaaggaagatgagattgtggcagaaatgacagaaacagagatagtcacctctctttgtcccatgtatggcagtcgatttggttatgccctttccaatggcacagttggagtttatgacaaaacatcccgatactggagaattaaatcgaaaaatcatgccatgagcattcatgcttttgaccttaattctgatggagtgaatgaactgataactggttggtccaatgggaaggttgatgctcgaagtgaccgaactggggaggtcatctttaaggacaatttttcttctgcaattgccggtgtggtagagggagattaccggatggatggccacatacagttaatctgctgctcagtggatggggaaatccggggctacctgcctggcacggctgagatgaggggcaacctcatggacaccagtgcagagcaggacctgatccgagagctgagtcagaagaagcagaatctgttgctggaactccgtaactatgaggaaaatgccaagaacaatacttcaaaaatgttaaagtcatgatgggatacagtggaccatacccatagaaagatgcaagggtattttcccacagggccagatagagcaagggagcactaatgaggtga

SEQ ID NO: 10928 - DNA, 10158 bp, Homo sapiens
gatgagattgtggcagaaatgacagaaacagaggtaagaagctccacctcgaactatggtaaccttgagcaagatagatcagtactgtcagatgaaacatcaagtgagagtgctggggcatctccaaacccaggtggttttaggataaaagcttggggagggggtcagacagagctgtatgttatggtaagaaaagcaataaaaatcctaattaagatatattttgaaaagactgattaaatagagaaaaattattgcatatagttgaatacataaaggcatttcttttaatgagttaatacatgcaaataataataatggcaatcatttattatgtacctattgtatgccaggtagtgctctaagtactttatatgaagtaacatattgaatccttacaacaaccctaataggaagataaattattattatttctatagatgaggaaaatggtgttctggttttttgtttgtttgtttgtttgttttgaggcagagttttactccatcacccaggctggagtgcggtggtgcgatctcggcttactgcaagctccacctcccaagttcaagtgattcgcatgcctcagcctcctgagtagctgggactacaggcacgcaccaccacgcctgggtaatttttgtgtttttaatagagacggggtttcaccatgttggccaggctggtgttgaactccagacctcaagtgatccgcccaccttggcctcccaaagtgttgggattacaggggtgacccaccgcgcctgtattttttgttaagttacttgtacgtagtcttggctatgaaatggcatggtcagcatttgaacctttatgccccttcctcctcatcatgtgtattcagtagggctgaagtgcataaatgagatgtctatatttttttcttcctgcaaattcagtacttctttggcacatttctgtaggtaaacttaaaaattatagaacttgtgattagaatcactcatgtaactgaacctgagatatttcttaatatcccaggttgtttaggcctgatgtttaggcctggtgcagtggctcatgcctgtaatcccagtgctttgggaggccaaggtgggaggatcacttgaggccaggagtttgagacccgcctgggcaacataacaagactccatctctacaaaaaatattaaaaaattagccagaaggtgatggcacacgtctgtagtcccagctgcttgggagactgaggcaggaggatcccttgagcccaggagcttgaggctacagtgagctatgatcacgccactgcattccacccaggggcaacgagaacaagactctgtctcaaaaataaaatttttaagaagtaacagtgttaagagttaggaaaataaagacaaaaataaagcaaaaagcactatctaaagattacctgtatcctttatggttttgacattcttaggatatttatttgctgctggttttccaggattgggcaagactcaaacagaaaaaaataagatattcttaattaaggaataagaggataaaggagcaatagcttgtgaacgttgtaagtggacagaaagaaaccagtaaaagagagtcttagagatcagaatggtgggattttgcaaaatttagttatgtggtatttaggagtctgtatcagaaaagctcgagggcactagtctcaaaactgaccttggccacttgtctttaaattacttgcttcatgtcactcataaaagctgcctaagaaggtcagacttcttttctcctaactataaaaggagacaaaaagcaaaacctacacattgacatacagtgctaccaatgattttaactaagttatcctatagcaagagtcatcagtttttatttagtcctactatactttttatatattcacagttatcatgatgtaagatgatagttgtggacagagaagaaatgaagaggagaaatgggtgccaaaaggagcagtctgaggatgtgtgtttatacagggagtctgttttttattttattatttttttgagatggagtttcgctcttgtcgcccatgctggagtgcagtggcgtgatcttggctcactgcaacctccgcctcccaggttcaagtgattctcctgcctcagcctcccgagtagctgggattacaggcacctgccaccgcgcccagctaatttttgtatttttagtagagatggggtttcgtcatgttggccagactggtcttgaactcctgacctcaggtgatccacccgcctcagcctcccaaagtgttgggattacaggcatgagccaccatgcctggcccgggagtctgttttgtgtgtatgtgcttatatgtgctttctgaagagagggcccggagccttcattacattcttaaaggggtttgcaacctcccccaccaccaaaaaaaaacaacttgagaatccctggctgatagatggtgtgtcccgaattctcatatccctttcattctaatttgtggtaaatcttttctcctttggtgggaatcattcagattttgttggatttttattgcttgttaatattagatttgaggagactgaattctttgaaacatctctttcctaaatcctagaaaagaggacaagaacctggaatagagttagggatttgaggggacttgttgatcttctagtccacaaaaggaagaaactggtgaactaaggaagcagtaaaagagctgaggaatctggggctaaatttatgaaaatatggacttcataacattgttcacttgcagggccattttcctgttctctttgttaggttttgctcctagctcaaatatcatttcccagatcagcaaaatcatgattcatttggcagttgaacagtatgaagtattgtcagaagaatgccttgagctaaataattctggaatcctacacagcactttgtattcatagttaagtgaagtgggtggttttgtagaaaagctgtaggtgtaaaggaaattatataactattctctgctttatacaatttatttcttaatatctcttgtattaggaacagaattagaaagtagatctgcaggatcatggatatcattaagctttggttttaactttaaaggaaagttttgttcagtacctaaaattttatccttttaaggatgtcaaatccttgaacagtcctataaatatttctgtatcatatatgcattctgtatattgttatatactacacaaatccacgtgcctgggtttttacttttcaaaggattatgtgttctttcttttacctctagcaaacaaattatgtcatagaaagaaaagtgtatacatgaagtaagatattcaattgtgtattgttataagtcttttaaaaattgagactgtaggatgttataagttaagtaataatcattaaagcctcttgggtgaacatatataatatctattgtatatgcatattttcgatcttgtgtagttagcttatgttttccttagtccttcagttttcatgtgttttttaaaaataattttgtgaaacttgccacataaggttgctctaaaacaccaaaccctgtgagtttatttaaatctgattatacaactctgaagtagatgacatgtatcgtagagaagaggaatacattccccactaatggattggaagcgcttttaaatctaattttaacatagttgtaacaaggagtgtgaagtcttataaagccgtacttgacagtaaactgagtcttaatgaaaagatgttgtgtttttgtggattgttttgcagatagtcacctctctttgtcccatgtatggcagtcgatttggttatgccctttccaatggcacagttggagtttatgacaaaacatcccgatactggagaattaaagttagtataatttagcctttgatattcaggcgcttgatagttattgtgagacttctgtgctaattattaaaattctttttcagtcgaaaaatcatgccatgagcattcatgcttttgaccttaattctgatggagtgaatgaactgataactggttggtccaatgggaaggtaagtttgaatagcaaagttcaggtataattcagagtagtaattgtccaaggtgtattggctgtaggacttagaacagtaacattgggatgtaaacttcagttcgttccttggcaatgtttttacatttaacttaataatcttgacacattcttcctgctatcattgtcaagagctgcacagtgagagagtgtaagtcttataagcggtgtttgggggaaatcttcggggagattctgtctaaatctcttatttgaagtgctgagaatccatcagccagattgattctaggtagtacaacagtaaaaaaggagttttaaggaattgtttgaatagctcttttccaatacatcttcaaaactgcctgaaaacttagcactaataggaagaatcatgttagcatattgttttctgagctataactttaaaataaaatccttttgcttgctttccttttttaacttcaaatcagaattttttacagtcttttggcaagtcaggattgtcttcttagaagctgcctaggtagctgccagatctccatggataccatttgccctcgctttcttgtctgtcagtgttggattgcctgaaggggatcagcaaattcttatcttttcttctttgatttatctttacttttctctagcaccttgtaagcattcctttggtgttacgtgaagaacggattctaaaaagctgttatgttggtttctgcttcttcacttagttttgtcattagtatgggtactaaaaattataagactgtatagttgcttattaagaaatatgaaagtctgtgaaatgggtgtcttagttggtttgggctgctgtaacaaaataccatagggtgggtggcttataaacaacagaaatttatttcttatagttctggaggctgggaagcccccatcaaggtgttggcagtttcagtgtctggtgagggaccacttcctcataggagccttacagggtggaaggggcaagggatctctctgggccttcttttatagggcactaatcctgttcatgggggctctgcccttatgacctaatcacctctcacaagctctacttgccaataccattcattaccttggctaataggattcagcataggaatttgtgggggcaaaaacattcagatcatagcagtggatcatattttgagggaatataaattattatgactgacttaagaattagaaaactactagacttgaaaacttgtcaggttaccttgaaatataattgttgacctagatgtttttatagttaaatgcttttgaaattttaagggatttctattatgtaatgcgttcctgagcatgaaaaagataagaaaattatataagtggaaaaaccgattatctacatctaacagaaatatacaaaaaggaaatatacagatccaacttgtgaatacaggtgtgaaaatattaaataaatgctgctagacaattaactttgtcttttgtatgtcatttgatgagttggagggccatcctttcctttcagggtaaaacctcccagttggattaagcaaaagatcagaatatccacagaaatattaatttgtagtcctgcttcttagttagcaaatgagccttcttatttgctaaatattgtggaaatgcagtggtagaagccattaggtagctaggctttaactagaaagaagcaagttcaggtcagtctgagttagagggctacattaatgtgctttgttaaaaatgcaggtcattcgttctttcacaggctttagcattcataattttcaggcttccatgatgttattaatagcattaatacttgacagtgatatactgtagacaaggggtaggctgtaacctaaattactttatgttttggttgcaaagttttgcccagaagattgtttatgaaaagacaaaactagtgagtagcattggtcatcgaaatgattgctatgctagattttctgtagctagccttttgttgataatacctgtgtccttgcctggaacataatcatctttttttttttttttgagactggagtctcgctttgtcacccaggctggagtgcagtggcgcaatctcggctcactgcaacctccgcctcccgggttcaagcgattctcctgcctcagcctccctagtagctgggactacaggtgcgtaccaccacacccagctaattttttgtatttttagtacagacagggtttcaccatgttagccagaatggtctcgatttcctgacctcgtgatccgcctgcctcggcctcacaaagtgctggcattacaggcgtgagccactgtgcccggcctcataatcttcattttaagtgatggtcacttattatcacttttgagatgcatttgtttctgatcagtcatttatttatttgttctctctcttggaaatgggagacttagaggataggagagctctctaaagtatctgaatagtttttatgtggaagaggaactcttaacagggttgttgtaaaaggttgcatggtggaagactgggctaactccgtagtttctgaacttcagattcaacatactttatacatttatatataataaagatacaatttttatatagagctaacatttattacgtacttctgtgtgtcaggccctgttgatatatgttaacttcattaggcctcagttatacccaatgggatatagtactgttaatttctccatgttctggttattgaaccccagatgaaaagaccaagcacagaatggttaagaaacttgcaagatgctgtggatagtacgtggcagagctagattctgaacctgagcggtttggccattaagcccatgcccttttgcactgtgctgtgtgtactatatgtactggctcttagcagacccgtttcttcaagtgaagcattgtgtgaaggcctatgaaaaacagcttttatttaaaaagaaggaagcacagctggttgaggctctttagggtccctcttggccccagcagtcataggtatctcctgagaagttgtagggcttcatagaatactcttgaaaactgctagactaaatgacctttaaagctgatttttatttttaaattttgtggtttttaaacatgtagcataagcaacttttaaatttgtgttttatttgtaggttgatgctcgaagtgaccgaactggggaggtcatctttaaggacaatttttcttctgcaattgccggtgtggtagagggagattaccggatggatggccacatacagttaatctgctgctcagtggatggggaaagtaaattgggatgagaaaaatccttaaaaagtcacgttttccatttgattgggtcaaaatatcaggaaatttcacctgaagtatttgtaccgagatcctgtagttctaataaattcaccaaagttggggagaacttaggtttttgtttttaagagcaggtaattgatgacctaaaagtatacctggttatacttgcggttttttccttctgttcagtccggggctacctgcctggcacggctgagatgaggggcaacctcatggacaccagtgcagagcaggacctgatccgagagctgagtcagaagaagcagaatctgttgctggaactccgtaactatgaggaaaatgccaaggtaggtgtaggtcctaatgtgaccaggtaatggaggctgaaatgttgagactgaccgggaggatcagcaaatatggaagaatgagagtgtcattgccagggtgtggcctttttgccattgtcagaattgagaggggatatatgctttcgtcttgaaatttcatttccaggtagttaaactgtagaaatgttttcctgattgtttaaggacatttcctgcagcactatttatttatagcagtgaaaacagctggaagaaacttagatgttcgtcagcagtagggagtatgtgctaaggaatattaagcagctcaaagaatgaatacttggactgatatggaaggatatctgtcgtcttaccaagtgacaaaaggcaagaacaatatagaatgtcttttatctttttcaaaaacaaacatgttaaaaacagacaactgtaaaaactgtgtgtgtgcatacagcaaactggctgaaatattcctttaatttgtcctgtaatgcattactgtatttgaatttgatgtaacaagggaatttgtttgcttactttaaaagaacaatacttcaaaaatgttaaagtcatgatgggatacagtggaccatacccatagaaagatgcaagggtattttcccacagggccagatagagcaagggagcactaatgaggtgagttctctgaattctaaagaatcagattactataataataataatatgctggaggctctgtcttttgaagctgaatagcaatattatttaaaattgatattagttcagtgttttggtgactgagtaggaaatgggtggggtgttttgcaggctgaattggccagtccactgaacgaggctgatgggcatcggggcataatcccagccaataccaggctccacaccacgctctcagtcagcctggggaatgagacccaaactgctcatacagaattacgcatttccacttctaatggtaagacagtactcacagctggtatttagaggcacctgtgccatcttggagtcattcttttttttttttttgagacagagtcttcctctgtcttggctcactgcaagctctgcctcccgggttcatgccattctcctgtctcagcctcccaagtagctgggactacaggcgcccaccaccacgcccagctaattttttgtatttttagtagagatagggtttcaccgtgttagccaagatggtctcgacctcctgacctcgtgatctgcccacctcagcttcccaaagttggagttgttcttaaactgtttttactcttccctgcagacaccatcatccgagcagtattgatttttgcagaaggaatttttacaggtgaaagccacgtggtacatcccagcattcacaacctctccagttccatctgcatccctattgtgcctcccaaagatgtccctgtggatctgcacttgaaggcattcgtgggttacagaagcaggtgaccctttgcaagtcacagttcatttcaggacagcacttagaggagggcaagatgtataaattttccatatgcccagtggattcttgggggcctgagaaaccatttaatggttctgtctacccaaagtttctcatgaccttttatttcctcagtttgaaacctgtaaaaagaaaatggaaaaactgatatgtaagtttaagatggttctttttttttttttttttttgagacagattctagctttgtcacccaggctggagtacagtggggcaatctcagttcactgcaacctctacctcctgggttcaagcaattcttctgcctcagcctcctgagtactgggaccacaggtgcccaccaccacgcccagctaatttttgtatttttagtagagacaggagttcaccatgttggccaggctggtcttgaactcctgacctcaggtgatccacccgccttggcttccgaaagtgctgggattacaggcatgagccaccacgcctggctaagatcattattttctgtttttagtcaggtgatctcataatcaaaaaatgtttaattgatgatttgtcaatttgtagttttggccactaaaactacaagagttaggatgcacctttatattacagtcatacataacctcagctagtgaagaaaaactgctctatttgtggaagataagatactttttacatcccctttatgatattttaaacccttagtgcatgcaggtatatatgtagactcatgctgtctttaaatcccaaacctaatatattactgtagtactttaaccctcaagtgttttgggggttccttcttaagtgaaacccttaaatatcaattgatgacccagaagtggctttattttctgggccttgcattttgaaagaacattctatacaaaacaattctcttgtgtttcattgattggccatagcacccagtttcatgtatttgaatcgacaagacagctccctcgattctccatgtatgcgctgaccagcctggaccct

SEQ ID NO: 10929 - DNA, 865 bp, Homo sapiens
gatgagattgtggcagaaatgacagaaacagagatagtcacctctctttgtcccatgtatggcagtcgatttggttatgccctttccaatggcacagttggagtttatgacaaaacatcccgatactggagaattaaatcgaaaaatcatgccatgagcattcatgcttttgaccttaattctgatggagtgaatgaactgataactggttggtccaatgggaaggttgatgctcgaagtgaccgaactggggaggtcatctttaaggacaatttttcttctgcaattgccggtgtggtagagggagattaccggatggatggccacatacatccggggctacctgcctggcacggctgagatgaggggcaacctcatggacaccagtgcagagcaggacctgatccgagagctgagtcagaagaagcagaatctgttgctggaactccgtaactatgaggaaaatgccaaggctgaattggccagtccactgaacgaggctgatgggcatcggggcataatcccagccaataccaggctccacaccacgctctcagtcagcctggggaatgagacccaaactgctcatacagaattacgcatttccacttctaatgacaccatcatccgagcagtattgatttttgcagaaggaatttttacaggtgaaagccacgtggtacatcccagcattcacaacctctccagttccatctgcatccctattgtgcctcccaaagatgtccctgtggatctgcacttgaaggcattcgtgggttacagaagcagcacccagtttcatgtatttgaatcgacaagacagctccctcgattctccatgtatgcgctgaccagcctggaccct

SEQ ID NO: 10930 - DNA, 925 bp, Homo sapiens
ttgaatttgatgtaacaagggaatttgtttgcttactttaaaagaacaatacttcaaaaatgttaaagtcatgatgggatacagtggaccatacccatagaaagatgcaagggtattttcccacagggccagatagagcaagggagcactaatgaggtgagttctctgaattctaaagaatcagattactataataataataatatgctggaggctctgtcttttgaagctgaatagcaatattatttaaaattgatattagttcagtgttttggtgactgagtaggaaatgggtggggtgttttgcaggctgaattggccagtccactgaacgaggctgatgggcatcggggcataatcccagccaataccaggctccacaccacgctctcagtcagcctggggaatgagacccaaactgctcatacagaattacgcatttccacttctaatggtaagacagtactcacagctggtatttagaggcacctgtgccatcttggagtcattcttttttttttttttgagacagagtcttcctctgtcttggctcactgcaagctctgcctcccgggttcatgccattctcctgtctcagcctcccaagtagctgggactacaggcgcccaccaccacgcccagctaattttttgtatttttagtagagatagggtttcaccgtgttagccaagatggtctcgacctcctgacctcgtgatctgcccacctcagcttcccaaagttggagttgttcttaaactgtttttactcttccctgcagacaccatcatccgagcagtattgatttttgcagaaggaatttttacaggtgaaagccacgtggtacatcccagcattcacaacctctccagttccatctgcatccctattgtgcctcccaaagatgtccctgtggatctgcact

SEQ ID NO: 10931 - DNA, 598 bp, Homo sapiens
ttgaatttgatgtaacaagggaatttgtttgcttactttaaaagaacaatacttcaaaaatgttaaagtcatgatgggatacagtggaccatacccatagaaagatgcaagggtattttcccacagggccagatagagcaagggagcactaatgaggtgagttctctgaattctaaagaatcagattactataataataataatatgctggaggctctgtcttttgaagctgaatagcaatattatttaaaattgatattagttcagtgttttggtgactgagtaggaaatgggtggggtgttttgcaggctgaattggccagtccactgaacgaggctgatgggcatcggggcataatcccagccaataccaggctccacaccacgctctcagtcagcctggggaatgagacccaaactgctcatacagaattacgcatttccacttctaatgacaccatcatccgagcagtattgatttttgcagaaggaatttttacaggtgaaagccacgtggtacatcccagcattcacaacctctccagttccatctgcatccctattgtgcctcccaaagatgtccctgtggatctgcact

SEQ ID NO: 10932 - DNA, 16532 bp, Homo sapiens
tattgtgcctcccaaagatgtccctgtggatctgcacttgaaggcattcgtgggttacagaagcaggtgaccctttgcaagtcacagttcatttcaggacagcacttagaggagggcaagatgtataaattttccatatgcccagtggattcttgggggcctgagaaaccatttaatggttctgtctacccaaagtttctcatgaccttttatttcctcagtttgaaacctgtaaaaagaaaatggaaaaactgatatgtaagtttaagatggttctttttttttttttttttttgagacagattctagctttgtcacccaggctggagtacagtggggcaatctcagttcactgcaacctctacctcctgggttcaagcaattcttctgcctcagcctcctgagtactgggaccacaggtgcccaccaccacgcccagctaatttttgtatttttagtagagacaggagttcaccatgttggccaggctggtcttgaactcctgacctcaggtgatccacccgccttggcttccgaaagtgctgggattacaggcatgagccaccacgcctggctaagatcattattttctgtttttagtcaggtgatctcataatcaaaaaatgtttaattgatgatttgtcaatttgtagttttggccactaaaactacaagagttaggatgcacctttatattacagtcatacataacctcagctagtgaagaaaaactgctctatttgtggaagataagatactttttacatcccctttatgatattttaaacccttagtgcatgcaggtatatatgtagactcatgctgtctttaaatcccaaacctaatatattactgtagtactttaaccctcaagtgttttgggggttccttcttaagtgaaacccttaaatatcaattgatgacccagaagtggctttattttctgggccttgcattttgaaagaacattctatacaaaacaattctcttgtgtttcattgattggccatagcacccagtttcatgtatttgaatcgacaagacagctccctcgattctccatgtatgcgctgaccagcctggaccctgccagtgagccaatcagttatgttaactttaccattgcagaacgggcacagagggtgagtatctcgcttttctctttcaatgcttttacacagtagaatcctttagatgttatttcatagaaagggaaaattacattaatgtgttatattggtagcagtaaatatgatatgaaagaattctctaacttgggggtggcttgtaacctgtaataaaaatattgctaaaataccttctctcactttgaaaaagcatctgagcaatcctcagttattggtgaattcttaccagtgtttaattcctctctttccgttatggtcttagtgtggttgtcctggtgtagtatttcaagaggaacctgcagcaagatgaaaagagagtgggacttggagctaagaacgtttttggctttaagtgctacgttaactcattaaattcttagtgatcttggggaagtcccctcaccagtgtgagcctcagttttcttatctaataagtaaggataatcttacccaccttattgcgggggcccgaggattacatgattggtgtaacagtagcaccttgtacatttgaaaggactaataccagtggactttaaccttggctgggctttggaattcttggtgggactttttaatcatgtagattctcaggcccctgcctggcctgtggaaccacagactctataggtgggcccttccagaaggcctcatgggtggttctcatgtggaacctgtgttgcaagccactgcatggtgttactgctattaacattaaaacttatattttccttattgtgtggatatatctgtggtgtttgcccatgtatacttcattttacatttcttaaagaatagaatggaatggttttaagcacgctacattgtccaggttatacccacagaagagctgttgtgtaacagaatcagcatcatacctgaatcatttgtacattgcatataagactatgtctaagtagaagatgctatgaaatcatgtctgctgtggggccaggcataattatgaatgttacttaagagcataggtgaggtgagaaaagggaatgtgactagtgttttagtattttcttggtgtgggatgaagtataattcttttttttttttctcaacaaagcagtaaaactagaaagaaggagaactcttccctcaagaatggctgtaccttcatatctagaggcacattaaaaaaaagaacgtctgtaccttaaaaatggaggtcatttcattgtgttcattttcaaggttgttgtatggctcggtcagaactttctgttaccagaagacactcacattcagaatgctccatttcaagtgtgtttcacatctttacggaatggcggccacctgcatataaaaataaaacttagtggagaggtaatgtttaatatcacggggcatagatttcttttttgaatttatttattcaaacacttagaccatggaatgagaggggcatagatttctcatgtggtgtttaccattcagtccaaagtgaggtgggggacatcaatgtcaaggtcataaaaccacgttttgttttatttttttcacatggtttaacttagtctgttagtgttaccattttagacactggggtataatttggaatagctgttttctgcctccttcccttcatctcttccttgtctaatttggaaagaattgggaatacagaggtcaacaaaaacattttcaatgtttggatgattttgtcatttaatttctaaggccagaggatttaccttttagctagctgctggaaataatgcagtttgtaatttctttgagagctaaactttcctttttcaacactgcatatatatatatatgcacaataattttgttgagtatggggaaattcaggtactattttagctaagtttgtctaacatctgaggatgctaaacttgtctattttttctctgggtagatcactataaatactgatgatattgatttggctggtgatatcatccagtcaatggcatcattttttgctattgaagaccttcaagtagaagcggattttcctgtctattttgaggaattacgaaaggtgctagttaaggtgagggaatgcggtagatgcatttgtgagaatgtggtagtctaataatatttgaggagattaatggtactacaaatgtacttatgttatagtgatgttttcaagaatttttgcaattcttgaagtaaaaattgaactagtattggagagtttactacttaaggatttattttataaaaggaagtgtttagctcctgagcaccatgcttgctttgtttggtttaaagtgatgcatttaaatattaacattttcctttgttagctcttcatcttatttgtagtatctgctttggtcttcttcagtttgggtctttccaaaaacccaaattcaagataaaagagcaaaataaagatgattctgattggccccaaagtatacaatattcccactgcaaatccctaaaatattaatatgtgtgttgtgggggctcctggtgctaaagcatggggaagattcacatggagtgtcgtgttgaaattggaggcagcacagatgagttaacttgttgagacagagatgaaataacgggaagtagcttaattggtataagcgaacaggggaaagaagggggtctctgtatctggtaaatagtgtcttttcatttgtctgggttcaagaagtttgtgaggcctttttcattcctgagtgttcatggtctccaggtggatgaatatcattcagtgcatcagaagctcagtgctgatatggctgatcattctaatttgatccgaagtttgctggtcggagctgaggatgctcgtctgatgagggacatgtgagtatttgtcatggttagtacaggtgcagggttaaaaatgtgagcagtatggaatagcaactctcagatgttaccaatagaagtataaattgttacagtgactttggaaaataacttggcattatcagtaaagttgaaaatgcatgtcctctatgacccagcaattctattcctggtttatagcttagggaaagttacagcttagttatatgtatgcttataaaccaggatatttatataagaatatttgtaaaggcattgtttataaaaatctcaaaatggaaacaatccaaattagcatgaacagtgtagcgacagtggatgaattgtgatatattcatgcaatggaatactacacagcagtgagagcacatgaatctccatgacacataagagcaaggaaaaatctgataagcataatggacactgaaagaagacagacttaaaagactataaaatgtatccgtgtgtatagttagagaaaagagtaaactatagtttgggaaacatgcaataaataaaaatataaattcagggaagagattatcatataagatagtattttctcctagagaaggagggattatgttcagaaaaaacacattgggaaacttcctgtctgaagtcttgtttaacttcattaaatattctgaatttttctgaatatgtaacattttacaataaaaaagttaagtatgtacagtacaggtcttccttggtgcttgctaggatgccaaatttaccttgccaataaaatgtactgaaaaaaattcagtaaaatagttaacaaattatagatgaaatttatgtgtatatattaggggcaagagttcactcagagtgctgcttgtgttttttcctgagacgcctgaattattggcaaataattataatggttttgctcagaggtaaatggtttttaaaataattgtattgttgaaaatttcaaacacatacagaagtacttaaatataatgatttcatatataccacccacccaacttcaacagttatcaactaaagactgatcttttttcatctctacactcaccctctttccctcccaggcactagataattttgaggcaaattttggacattgtgtaattctagccacaactatttcagacaaagggcctttcaatatcatatatatatatatacatatatatacacacacacacacacacacacacatatatacacacgtctgtataaaaatcacaatgccatatcacacttagaaaaatttacaataattgcttaatattacaaatacctcatctgtttagatgttcccagttgtcttataaatgtggacatgtgtgttttaagttggcttgctcaaatcaaaatccagatcaaagtccatacattggatttggttggaaatcgtttaatcttttaatccacacttttgcttgcccactcagtctcttctctccttctcctgtggggtgccattttggattttgctggtggtatccttgtggtaatgtttagtattattcttctgtcccctgtatagaaagataatggtagatctggaggcttgattagattcaatttcaaattttggcaagaatacttcgtgagtagtgttgtttacttccatgaggaagcatgcaatttttgattgtttctttttatgatattatcagccattgatgatcattgcctagattcattatttcttttggggtttgcaaaatagtgatattctaattctgttattcttttcttcatatattagttgaaatacttctatgaaaaataatgttccctcatgaattaatgaattatttggttccctgaggtacagtttgtacaggaaagacagtttctttatcagctttaaaataatgtgttgatctccagcatgcactaggtgaccaatgagatttttaagtccttacatactcatgtatttgaacatatttaatgtgtttcaatttatatctgttattattaatttttatggctagttttttttttttttttcgagacggagtctcgctctgtcgcccaggctggagtgcagtggtgcaatctcggctcactgcaacctccgcctcccgggttcatgccattctcctgcctcagcctcccgagtagctgggactacaggcgcccgccaccaagcccggctaattttttgtattttcagtagagacagggtttcaccgtgttagccaggatggtctcgatctcctgagctcgtgatctgcccgcctcagcctcccaaagtgctgggattacaggtgtgagctactgcgcccggccttttacggctagattttccagtctgtgggcaatggaagtctctttaggttggatacagttacctttggacatggtcccattaatttggttggttctttgttttcttgtatgatgaaatgtttcaggcttatctggtacatttcccagtcttcatatggaaccagccatttctctcgagtcctggttcttttacatgagaaatggtatttagagatcatggtctgaccactaaagatgttcattgctactgggttgattattgtttttaggccttttcaatgcgtagagctaggaattttttttttcaatgagaaaatatgagttcatactatttaccattcagatttatgaatataggctcttcgattttattactgcgcctcttctctctcacattgaaaatcatggcttcaggttgggcacggtagtttacacttgtaatcccagcactttgcgatgctgaggtgggaggatcacatgagcccagggattcgagaccagcttgggcaacatagtgagacccagtctctgcaaaaaaaaaaaaaaaaaaaaaaattagctgggcatagtggtgcatgcctgtagtcctagttactcaggaggcagaggtaagaagatctctggaacctaggagtttgaggctgcagtgagctatgatcatgacactgcaatccagcctgggatgacagagcaagatctcttaaaaaaaagtgggggaatatcatggctccaatcagtatcaacataactatttgcttcattttacagcacagacacaacatttaagaatattagccaagttgttatcaacaatatgattgctgaaaacagtttaagattttttgtgtgttaattctttgtgtctttagggcatatcccagcagggagtttccgtcaaattactgtatcttaaaatcatttgagattatttctcttttggttatgccacagatttgatagagagttaggttcattgtcttattttgctctcagttttggaggattggcatttttacctttttggtttaattctattacatatttactaaaacctttttgtaattccaaagttagatctataagacaggcatgcacggaaaagtctaactttccattcctgtgaccttcattctgttctctcccttttactataaataaccagttgaacatttaagtatatatatgcagatacacacagatatatacacacacacccctcttcatgtcttagattaagtcatagtatgtatatatctttttctccaccttggttttttttttttttttttttttttttgagacaaggtcttgctgtcacccaggctggaatgtagtgatgcaatcacagctcactgcagcttcaaccacccgggctcaagggatcatctcacctcagcctcctgagtagatgggactaaaggcatgagccaccagcccggctaattttttatttttttgtagagacagggtctcaccacattgcctgggctggtcttgaactcatgggatctactgatcctcccaccttggcttcccaaagtgctgggattacagatgtgagccactgtgtccagcctccaccttgctttttacatttaaaatatatcttggagatttctccaccatggtgtagagaaatacatctcatttgtctttacggctacatagtactccattttctggctgtttttcagccagtttcctctatttggattgttttttttttactgtagataatgcttaagtgaatagttttgttacgtaaatctttttatatttttgccaggatagtttgagaaaaaggcttaacaaatgggattactgcagtaaatgatacatgcatacagaattttgcaaggtcttgtcaaattctccataggtgttacctcattttgtattcccataagcaatgtatgagattgcctgtttctcttcagccttgccagtggagtttgtgggcatactccaggggatgagaaatggtctcttagttttaatttttattttttaaattttattttattgtggtaagaccacagcatcagatctaccttcttaacacatttttaagtgtataatacattatcgttgactataggtgcagtgttgtacagcacatctttagagctgattcttcttgcttaactgaaactattggtaagcaaattcccatttcttcttcccctctttcaactatcattctactctttgattttatgaatttgactattttagatactccatgcaaatatataatatttgtccttctatgactggcttatttcactcagtgtaacatcctcagagttcgtccatgttgtcacatattgcagaatttccctctcttttaagactgaatagtgttccattgtttatatgtactaaattttctttatccattcacctgttgatgaacatttatgttttttccacatgttggttattgtaaatagtgtggtgatgaacgtgggagtgctaataggtcttcagggtcttgtcttcagttcatttggataaatacccggaagtgagattgctagatcatatatggtagttctatttttaattttttgattacatttttaatatttaatcattaaaaattaaaaatttaaatttttaatatttaatcattaaaaatttaaatttttaatatttaaatgttttccatagtggctgcaccatttttcattgtaatcaacagtgtacaagggttccagtttctctacatccttgccaacacttgttgtcttttttttgataattttcatcctgacaaaggtgaaatgatacttcattgtggttttgatttgcatttccctgatgactagtggcattgggcgtctttttatatacctgtcggtcatttgcttttcttgtttggagaaatttctattcaagtccctagctcattttttaattggattactagtgtttttttttttttttttttttgctgttgagttgtaggagccatttattatgttcagtattgggcatttttcattgttttaattcagggccatttccatttcttttttgtgtgaactatttgtctgtttacatatcaggtactgttgtagtccattttgtgcctctataacagaatacccgagaatgggtaatttataaaggaaagaagttgatttagcttatgggtctgtaggctgggaattacaagaaacatggcactggcatccgcttgacttctgttgagggccatgtgtgaagtcaaaacatggcagaaaaggtcaaaggagaaggggacatgtgtgaagaggcaaagcctgaggggtgccctaactttataacaacctgctcttttgataacttcattcctgcatgagcgagaactcactcctgagagatggcattaatggcattaatctattcatgagggatctgcccccatgacccaaacactccctactaggcccacctcccaacactgctgtgctggcatttcaacttcaacatgagttttggcggggacgaaccacatccaaaccatagtgggtatattaatctcttacgtgtgatatgagttgcaaatatgttttccggagtttgtcatttgggttttccctttgcttagatttttaaaaaattttgctttaatgggccaggcgcggtggctcacgcctgtaatcccagcactttgggaggctgaggcaggtggatcatgaggccaggagatcgagaccgtcctgactaacatggtgaaaccctgtctctactaaaaatacaaaaaatcagccggtcgtggtggcgggcgcctgtagtcccagctattcgggaggctgaggcgggagaatggtgtgaacccgggaggcggaggttgcagtgagctgagatcgcaccactgccctccagcctgggtgacagagtgagactccatctcaaaaaaaaaaaattttgctttactgttggttttaccttgtaagagcttttaaaattttgtatatagtcaaattataagaaaatttgactacattaagaaaatgtaagtcattttcttaatactttatttatttatttttgagacagagtctcactctgttgcccagcctggagtgcagtggcgtgatctcggctcactgcaacctctgcctcccagattcaagtgattctcctgcctcagcctcccaagtagcgctaccacacctggctgatttttgtatttttagtagagacgaggtttcaccatgttggccaggctggtctcaaactcctgacctcaggtgatctgcccgccttggcctcccaaagtgctgggattacgggtgtgagccactgtgcccagccacattttcttaatacttttacattttgaattactgttagaaaagttttctttaacagcagggtatagagtaattcatctgttttcctttagtacttgtatattttgcttttttacattaagtctctgttccagttggagtttatcctggtgttcatataaataataaactcagttttatcattttccttatgactatcacattattattatattattattatttttgtgtgtgtgtgtgtgtgtgtgcgtgtgtgtgtgtgtgagatagggtctcactgtgtcacccaggctggagtgcagagagatcacagctcacagcagcctcgatctcctgggctcaagttatcctcccacctcagctgctggagtagctgggactacaggcgtgtgctaccatagccagctaatttttgtgtagacccagggtctcgctctgttgcccagactggtcttgaactcctgggctcaagcgatctgcctgccgtggcctgtcaaaatgctgggatttcaggcgtgagccactgtgcctggccacattgcattattttaatactactactttttttttttctttgagatggagtttcgctcttgttgcccaagctggagtgcaatggcgctatcttggctcactgcaacctctgccttcctggttcaagccattctcctgcttcagcctcccgagtagctgggattacaggcatgcgccaccatgcccagctaattttttttgtatttttagtagagatggagtttcactatgttggccaggctggtctcaaactcctgacctcaggtgatccaccaacctcggcctcccaaagtgctgggattacaggtgtgagccactgtgcccagcctgatactacttcttttaaagttcatcatgcttacaatgatttcagatactgcccttatcatatatcatatttctgtacacagttgaatctatttctggattttctgtactattccattggtctgacttgtcacttcatttgacaatatcattcttttttaaaaaaaattattttgagacagaatcttattctgttgcccaggctggagcacagtggtgtgatcacagctcactgcaacctcggcctcccaggtacaagggatcctcctacctcagcctcctgagtaggtgggactacaggcatgtgccaccacacccagctaatttttttttatttttggtagagacagggtctcactatattgcccaggctagtctcaaactcctgaggttaagccatcctcttgcctcggccattttttttttttaatgtttggctgggtgcagtagcttatgtctataatcccagtgctttgggaggttgaggcatgaggatggcttgaggccaggagctcaagaccagcctgggcaatatagcaagaccccatctctaaaaaagaaaatataaatttcattgtgatattctgaaatacatatttgatcttcaaccctgtttcctgacataataactcctaaaatcttaggctctccaaagtgatgtctttttgtatgctattgattggtttatggctggcagctcctaggtagcttcaggataggggtcagtcaccagaacgaccaaggcaggattagaggattgggactttctgcccacccctctcccaacctccagggagtggagaggggctgagagttaagttgatcacctatggccagtggtttagtcagtcatgcccaaataatgaagattccatcaaaacccaaagggacagcattcagagattttctagacatctgaacacacagagtttcctgaaggttgatgcacctagggagggcatggaagctccaagcgccttccctaatacttcgttctatgcatctcttcatctgtatcctttgtaatatcctttataataaactagcaaatgccattaagtttccctgggttctatgtactgctctagtaaattaatcaaacccacagagggggtcatgggaaccctaacttgaagcagatcagtcagaaattctggcagcctgaacttgtgatatgtatctgaagtcaggcagtcttgtgggactgagcccttaatctgtgagatctgacagtgtctccgggggaatcgtgtcggaacggaattggaggacacccagctggtgtctgctatagaactgattgttttcttggtgtgtgggaaaaacctccacacagttgaggacagaagtcttctgtgttgattgttgtggtgtgggagcagaggaggaacagtttgtttttttccccactcatggtgaactacacaatgtgaaatttaccatcttaactactgtatactacttttagtgtacggttcagtggcattaaatacgttcataatgtgtaaccatcaccaccagcagcatctctataattctttatctcttaaacctgaaactctgtacccgttaaacagtaactacccattctcccttccctttagctctggcaactaccagtgatggtgccattctttcatgtatggatgttttgtatgtttcaatatctggtgtgggtagtgccccgtccccaacccctgttgcttttctttttcatggtttttcctagctacttgtgcttgtttgttctttccaatgaatttcatcagcaatttttgtagctccgtaacaaaaataggtattttaattgagatgatgttaaatgcattaacttagggagaactgatgctgctgcagtgatgtttggtcttgctagctaagaacatgctatgtctttatatttgcttaagccatgttttgtgtctttctggagtgctttcatggtttactcttgtagatactggatgttaccaattttaagtttatgcttaggtattttctgtatttttagacaattacgaaatattttataattgtaaatattttttacattatcttattctataattatggttttgtgtttgtacatatgaacactgatttttatctgttgattttataatgtgccctttactaactatcttatagtttttccagatgtattcttgtatcatctgtaaattgagatagatatttgctctttttggccaactatctgtagggtccctagtttctctatctctctatctctctcttaagtcaaaaatggttgctggctttaggcatttgattgcaaaatgtcaacatttgtttttttttttaaatcaaattaattgatatataactcatacatgcagaaaatttatgcttttaaggtttacagtttaatcaattttgagaaacttatgtaatcatgttgctactactacaatcgagatataggatatttctatcactggccgggtggctcacacttgtaatcccagcattttgggaggccaaggtgggtggatcacttgaagccaggagttcgagaccagcctggccaacatggtgaaacccagtctctactaaaactacaaaaaattagccaggtgtggtggcgggtacctgtaatcccacctattcaggaggctgaggcaggagaatcacttgaacctgggaggtggaggttgcagtgatccgagatcgtgccattgcactccatctagcttactgggcaacaagagcaaaactccatctcaaaaaaaaaaaaaaaaaaaaaaaagaatatttctgtcactcttgtgactgtttgtatcaatacctcttctaacctccagttcctggaaaccactcatcttatttcttttcctgtagtttcaaccttttcaaaataccatataaatggaatcatactgtatctatatctatatatccttttgagtctggcttcattcacttacataatgtcttagagattcatccatgttgctgcatgtatttgtagttccttttttattgctgaatagtattccattgtatggatatatgatatttatctattcaccaactgaggataattgggttgtttccagactttggtgagtagaataaagctgctataaatacttgcatacaagttttttatagacataggttttcatttctcttgggtaaataccttacaatgggattgctgggtcatacattgtgtgtttaactttataagaaactgccaaatcacctgtcaaagtagttgcagctttttgtatttctgtccacaatgcatgaaagttccagttgtcccacatctttgctagcatttggtatcttcagctatatttttctttagttattttcattgttgtgtagtatagatctcatttctgttttaattttatgactttgttttaaacctttgataaaatacaaggctgagttgtcaaccaggccactttagtctaatgaatattcatctgaaacttggaaggtgggctgtcaccttgctcacttgtccctactcccagcacagtgggcttgagaattcttaaccacctaaatcaaccattgaccagtaaccaaggaaggccacttgtcttctgtttatttggaaggaaaagaatatttttatggaacttatccgtattttcaaagcaaactagcagttactcgattttaatgaaaatatagcttaaaaatggtgtcttttctttgtatgtctaagaaatttgcaagtttttcttaagcttgccatatcaacatgaaatgatgtcaaatttctactgatttgcacaggaaaacaatgaagagtcgttatatggaactctatgaccttaatagagacttgctaaatggatataaaattcgctgtaacaatcacacagagctgttgggaaacctcaaagcagtaaatcaagcaattcaaagagcaggtcgtctgcggggtaagtctcttttcataacactgcactttgatctgtaatgtttttggtggaactcattgaagatggtggtagcatccaataattcatattggggctgaaagtagcatacctttcacactccagagctggcaccagtcacttatgtttcagtcagtcggcctagtgtttggcttttgtctccggacttcaaagggagagaaaaccttcagctccttttcttagaccttcctgcatcctctaaagaaaaacctactatatataacccaaaggaaatatataaacatatatatataaataaaaccatcaaggcccaattagcaaaaaagagactgaaaattaatgctaagtgtctaacttaaaaatttagaaaagaacaataggataaacccaaggaagcagaaatatagccagagatttatacctgaattctgctgttttgggtcgatgctttgacttctttagaaataatctttgctaggtgactatgagctttgatccttttctgtaaaactgactgttggtttctaggtttgagacagtctctaagtcagttttttcaataattccctcaccaagttattttttttagggaatggtaagataaatcatatttcaagtataactcttttccctcctggttttatgttgttttaaaactgacgtctaattttataatttcatgtctaacaatcttttggttcctgatgtttcttcttatgcagttggaaaaccaaagaaccaggtgatcactgcttgtcgggatgcaattcgaagcaataacatcaacacactgttcaaaatcatgcgagtggggacagcttcttcctaggtgaggaaaatacaggtcatgaagttcctggcaaagattttctgttaaaaacctatgctggtttgctttggatcacaccctggtgaaccccgggtgctaagaatgaaaataaccttggtgagttgtacaaattaaagacaaagaactacatgtgaagatagacttgctttctatttttaaatcagtagtagtactgttgctgaataatactaggtttttatggaataggatgaatgcttttgaagtattagggcttcagagtccaattttgcttatttatggtatataaatacatatttttttcttgaaattgcaattgagtttgtacttttcaaatagattatctactttttcattaaaatgtaaagatgtt

SEQ ID NO: 10933 - DNA, 4026 bp, Homo sapiens
tattgtgcctcccaaagatgtccctgtggatctgcacttgaaggcattcgtgggttacagaagcaggtgaccctttgcaagtcacagttcatttcaggacagcacttagaggagggcaagatgtataaattttccatatgcccagtggattcttgggggcctgagaaaccatttaatggttctgtctacccaaagtttctcatgaccttttatttcctcagtttgaaacctgtaaaaagaaaatggaaaaactgatatgtaagtttaagatggttctttttttttttttttttttgagacagattctagctttgtcacccaggctggagtacagtggggcaatctcagttcactgcaacctctacctcctgggttcaagcaattcttctgcctcagcctcctgagtactgggaccacaggtgcccaccaccacgcccagctaatttttgtatttttagtagagacaggagttcaccatgttggccaggctggtcttgaactcctgacctcaggtgatccacccgccttggcttccgaaagtgctgggattacaggcatgagccaccacgcctggctaagatcattattttctgtttttagtcaggtgatctcataatcaaaaaatgtttaattgatgatttgtcaatttgtagttttggccactaaaactacaagagttaggatgcacctttatattacagtcatacataacctcagctagtgaagaaaaactgctctatttgtggaagataagatactttttacatcccctttatgatattttaaacccttagtgcatgcaggtatatatgtagactcatgctgtctttaaatcccaaacctaatatattactgtagtactttaaccctcaagtgttttgggggttccttcttaagtgaaacccttaaatatcaattgatgacccagaagtggctttattttctgggccttgcattttgaaagaacattctatacaaaacaattctcttgtgtttcattgattggccatagcacccagtttcatgtatttgaatcgacaagacagctccctcgattctccatgtatgcgctgaccagcctggaccctgccagtgagccaatcagttatgttaactttaccattgcagaacgggcacagagggtgagtatctcgcttttctctttcaatgcttttacacagtagaatcctttagatgttatttcatagaaagggaaaattacattaatgtgttatattggtagcagtaaatatgatatgaaagaattctctaacttgggggtggcttgtaacctgtaataaaaatattgctaaaataccttctctcactttgaaaaagcatctgagcaatcctcagttattggtgaattcttaccagtgtttaattcctctctttccgttatggtcttagtgtggttgtcctggtgtagtatttcaagaggaacctgcagcaagatgaaaagagagtgggacttggagctaagaacgtttttggctttaagtgctacgttaactcattaaattcttagtgatcttggggaagtcccctcaccagtgtgagcctcagttttcttatctaataagtaaggataatcttacccaccttattgcgggggcccgaggattacatgattggtgtaacagtagcaccttgtacatttgaaaggactaataccagtggactttaaccttggctgggctttggaattcttggtgggactttttaatcatgtagattctcaggcccctgcctggcctgtggaaccacagactctataggtgggcccttccagaaggcctcatgggtggttctcatgtggaacctgtgttgcaagccactgcatggtgttactgctattaacattaaaacttatattttccttattgtgtggatatatctgtggtgtttgcccatgtatacttcattttacatttcttaaagaatagaatggaatggttttaagcacgctacattgtccaggttatacccacagaagagctgttgtgtaacagaatcagcatcatacctgaatcatttgtacattgcatataagactatgtctaagtagaagatgctatgaaatcatgtctgctgtggggccaggcataattatgaatgttacttaagagcataggtgaggtgagaaaagggaatgtgactagtgttttagtattttcttggtgtgggatgaagtataattcttttttttttttctcaacaaagcagtaaaactagaaagaaggagaactcttccctcaagaatggctgtaccttcatatctagaggcacattaaaaaaaagaacgtctgtaccttaaaaatggaggtcatttcattgtgttcattttcaaggttgttgtatggctcggtcagaactttctgttaccagaagacactcacattcagaatgctccatttcaagtgtgtttcacatctttacggaatggcggccacctgcatataaaaataaaacttagtggagagatcactataaatactgatgatattgatttggctggtgatatcatccagtcaatggcatcattttttgctattgaagaccttcaagtagaagcggattttcctgtctattttgaggaattacgaaaggtgctagttaaggtgagggaatgcggtagatgcatttgtgagaatgtggtagtctaataatatttgaggagattaatggtactacaaatgtacttatgttatagtgatgttttcaagaatttttgcaattcttgaagtaaaaattgaactagtattggagagtttactacttaaggatttattttataaaaggaagtgtttagctcctgagcaccatgcttgctttgtttggtttaaagtgatgcatttaaatattaacattttcctttgttagctcttcatcttatttgtagtatctgctttggtcttcttcagtttgggtctttccaaaaacccaaattcaagataaaagagcaaaataaagatgattctgattggccccaaagtatacaatattcccactgcaaatccctaaaatattaatatgtgtgttgtgggggctcctggtgctaaagcatggggaagattcacatggagtgtcgtgttgaaattggaggcagcacagatgagttaacttgttgagacagagatgaaataacgggaagtagcttaattggtataagcgaacaggggaaagaagggggtctctgtatctggtaaatagtgtcttttcatttgtctgggttcaagaagtttgtgaggcctttttcattcctgagtgttcatggtctccaggtggatgaatatcattcagtgcatcagaagctcagtgctgatatggctgatcattctaatttgatccgaagtttgctggtcggagctgaggatgctcgtctgatgagggacatgaaaacaatgaagagtcgttatatggaactctatgaccttaatagagacttgctaaatggatataaaattcgctgtaacaatcacacagagctgttgggaaacctcaaagcagtaaatcaagcaattcaaagagcaggtcgtctgcgggttggaaaaccaaagaaccaggtgatcactgcttgtcgggatgcaattcgaagcaataacatcaacacactgttcaaaatcatgcgagtggggacagcttcttcctaggtgaggaaaatacaggtcatgaagttcctggcaaagattttctgttaaaaacctatgctggtttgctttggatcacaccctggtgaaccccgggtgctaagaatgaaaataaccttggtgagttgtacaaattaaagacaaagaactacatgtgaagatagacttgctttctatttttaaatcagtagtagtactgttgctgaataatactaggtttttatggaataggatgaatgcttttgaagtattagggcttcagagtccaattttgcttatttatggtatataaatacatatttttttcttgaaattgcaattgagtttgtacttttcaaatagattatctactttttcattaaaatgtaaagatgtt

SEQ ID NO: 10934 - DNA, 18903 bp, Homo sapiens
gaaaacaatgaagagtcgttatatggaactctatgaccttaatagagacttgctaaatggatataaaattcgctgtaacaatcacacagagctgttgggaaacctcaaagcagtaaatcaagcaattcaaagagcaggtcgtctgcggggtaagtctcttttcataacactgcactttgatctgtaatgtttttggtggaactcattgaagatggtggtagcatccaataattcatattggggctgaaagtagcatacctttcacactccagagctggcaccagtcacttatgtttcagtcagtcggcctagtgtttggcttttgtctccggacttcaaagggagagaaaaccttcagctccttttcttagaccttcctgcatcctctaaagaaaaacctactatatataacccaaaggaaatatataaacatatatatataaataaaaccatcaaggcccaattagcaaaaaagagactgaaaattaatgctaagtgtctaacttaaaaatttagaaaagaacaataggataaacccaaggaagcagaaatatagccagagatttatacctgaattctgctgttttgggtcgatgctttgacttctttagaaataatctttgctaggtgactatgagctttgatccttttctgtaaaactgactgttggtttctaggtttgagacagtctctaagtcagttttttcaataattccctcaccaagttattttttttagggaatggtaagataaatcatatttcaagtataactcttttccctcctggttttatgttgttttaaaactgacgtctaattttataatttcatgtctaacaatcttttggttcctgatgtttcttcttatgcagttggaaaaccaaagaaccaggtgatcactgcttgtcgggatgcaattcgaagcaataacatcaacacactgttcaaaatcatgcgagtggggacagcttcttcctaggtgaggaaaatacaggtcatgaagttcctggcaaagattttctgttaaaaacctatgctggtttgctttggatcacaccctggtgaaccccgggtgctaagaatgaaaataaccttggtgagttgtacaaattaaagacaaagaactacatgtgaagatagacttgctttctatttttaaatcagtagtagtactgttgctgaataatactaggtttttatggaataggatgaatgcttttgaagtattagggcttcagagtccaattttgcttatttatggtatataaatacatatttttttcttgaaattgcaattgagtttgtacttttcaaatagattatctactttttcattaaaatgtaaagatgttaaactttgtgttgattgattataaaatcaccaccaaatcagaattgcccatttgtattttgtagtagagaaaaacaaaaatgtgggctgggcacagggcttatgcctgtaatctagcactttgggaggccagggcgggcggatcataaggtcaggagatcgagaccatcctggctaacacggtgaaaccccgtctctactaaaaacacaaaaaattagctgggcatggtggcactcatctgtagtccaagctacttgggaggctgaggcaggagaattgcttgaacccgggtggcagaggttgcaatgagcctagattgcaccactgcactccagtctgggcgacagcaagactcccgtctaaaaaaaaaaaaaaaaaaaatatttgggctgagctcagtggctcacacctataatcctagcactttgggaggccaaggcgggtggatcccctgaggtcaggagtttgagaccagcctggccaacatgatgaaacctggtctctactaaaaatacaaaaaattagccaggtttggtggtggacacctacaatcccagctatgcaggaggctgaggcaggagaattgcttgaacccaggaggtggaggttgcagtgagcaagattgcaccactgcactccagcctgggtgacaagagcaaaactctgtctcaaaaaaaaaaaaaaatgtggatatttggatttgtgtgctttttaatcactgaaagatgggtgcaaacaacaaatttacattaaggaagagtcaatttagagtgattactttgttgggctaatgttagctgctgtaacaaatagacctcaaaatcataatgactcatttttcatttattatgtaaggatttctccatagttatgcagggacccaggttcctttaatcatgtggctctgtcatcccctaggacaaacttttctacctgagttcactaaaggactaagcctaaggaaaaaggtttgggtgactagtttcacattcagtacatacagtggagggaggtcttagggcagtggggctttattatctcacttggaacactatttgacaagggctgtcctagggccttgtggttatttacagccatgtaccagataatgaagtttaggtcaccataagattataatactgtatttttactgtacctttgtgtttagatatgtataattacacaaatacttagcattatgttacagtttcctacagtattcagtatagtaccatgctgtacagatttgtaggctgggaacaacaggctatactgtatagcctaggtgtggagtaggctataccatctaggtgtgtataagtgcacactgtacaatgttcacatgatgacaaagtagcctaacaatgcatttctcagactgtactgctgttgttagcagagcatgaccatatagctgagccggtagaagagagtaagagggaaacatgtcttcttcttttaaaagtgtggtctgaaagtagcacactatcatttccattcagaattccattgagtcacatgaccacatctgcaggggaggccgggagatggaatctagctgtgtgcctgtaggaacgctggtatttgtgccaatagctagcagtctcttccctaggaaaaatttcgccctaacgtagatttcaggactggtttaatgagtgaaacttcagttagttttaatatcttaatagctgtttaggggaagtggagcatttccctgaggttagtaaacattaattttattgattttgatgtggccactttacgatggcccctcctatatctgaaatttaagccttatggagtcctaattatgagaatatgctaatacttttgtttttcattttcaacctataaactcaagagataatccacatacactgtattattttcaatctccaaagtagtaaagtatcatcgtaaatctgcctcacacagaggttgctgtgagccgagatcatgccactgcactctagcctgggtgacagagggagactccatctccaaaacaaaaataaataaataaataaataaatgtgcctcacagaggaggaaactgaggcataaataacctccttttcaggtcacagagttagtgacctgtgtgacctgtctagtgactcaagaggaaacttgagtcctactgttgagtctttgttttaaccatagtctaatttataccatttgagattaaaatctctagttggtgctagttttaaattatataatgccattcatttttagggagtctaataacataatctcatcaaaggtcactctgttgttctttagctaaaaaacttccttcttagacctaaaaatactcatggccaggctagaaggcattgacctgcagcaagacatattaagttgttctgattcataggttattttcacagtaatttgatcctgttgatgttggtgtctgtttcacagatgaggctctgagctctaagacagagtgtcctgtacagggtcccacagctgggtaagccctggtgtgaaggaggtgttggaaacaagtagtcacggcctcttctactccaaacttcccaagcaagtaaagactggccgaagtgaaaacattcataaaacatgcaactaccttttttcccccaacttagaactcatcctgttcagcttaggagtgaggaaaaactggacaaggagagatgagtttatcagtaacttctctattttgttgccatatgtttctatcctgatagaatctgagtacttctagaagctacagcaaagctgtatttcactgctgaattacattgaagctttaagtgagcactgagctgtcatttaaaagctgactttgaggattttgatatctgagagaaagctttcagtaccataattcaggttctgaggatttttaagagtataatttgtattatttcccaccatgactgcctatccagtacctcaaagccccgctcaaatgctctctccttaggtgacctttcctctcccatgtctactccttaacccttattaaattctttacttaaatcttaatcccctgttaagcaagaatggtgtctgcatcttaaccagcgtcaccctcgccccagtgctgagccagtgccttgagcatagaatagcatctgccgctctgcttgggattgtctgtccttaatacgcctgtcagcagcttcagaaatcaaagaactaggaactttaaaactattatgcaaccctagaagtgttttacaagaaagattttcaacattgttattaatgtttcaaattttataattagcagttacagatctgccaatgcacagtcctgtcattatagaactaaattacctccaatttcatttggaaactcaagtacagtaagacacccattacagcctggtgtttcgcattttgcctcttttccatctggcccctgcccacactctatgctctagctctgaagtcatcttgtaatctgtacagtacagaatctgcttttcctaaaagtgatgtcacatggacagttcccaagtcgtttttaaattgtctttgtggactgattttgcatcagagagggaatcatcaggacacccatttccatgcaggctggagagccctcctctggcatcacttcactagatctcctcgacccttttcaacagggtttgtgcttcctcattgtttagtagtggttaagtatgtcatggtgttgaagcagtaatgcaccccaaaacttcttattcaagaaatactgccagaactttgggaggtcaaggcgggtgggtcacttgaggtcaggagtttgagaccagcctggccaacatggtgaaatcccatctctactaaaaatacaaaaattagccagtgtggtgttaggcacctgtaatcccagaattgcttgaacctgggaggcagaggttgcagtgagttgagatcatgccactgcactccagcctgggtgacagagactccgtctcaaaaaaaataaaaaataaaaaataaaaaatactggtctgggagaggtaacccaagctttgtttttttttttgtttttttttttttgtgtgtgtgtgtgtgagggggtgttctgtggggaagaaacccacattcagtggaattttgagaggcaatctttaaacagtagacaagcccagttcaaaactaacagattctttcttttggaaccctaactttccacattttaaagatgtggactttaaaattaaagatgtggacctaattttaaagattaaggactagtgttatttatagggtacttccttagacattttatttttcttcttattcaaagatgcaaatatgttcacaagttttgttaaaacgttcctaatttccagtatggttaacatataaagaagaagtagtgaagtagtctctgtaaggctgttctcttcctgtccaatgctggagcttgaagcccatagggcgggtagtcagaaaagatgtggagttggggagaacaagctgcaacccacaggcatgggctggagcccgtgaggatgctaaaatctgtccgttcttgttgcttctgaccttgatggtgtgggcattctgctgaaactgagacccttcacagaggagctgaaggaagatccatccaggggaaggtggagcggttgcaggcccaggcacaggtgtggttcacaccagcaaggtgtgccagctactcaagggctgctgctgcattgggccctgcagatctggcataggaatttgtggctcatcctaacctgagacatagggaagagagttctgggaaatgtagttcagtctagccaagttgatacatgacaaagctaccagtggctgtcataggatggtgggatttcaggtgatccttagatattacatgttattacctcacaatgagcatgtgttatttatatagtctgaaaaaacagaaagctattttttttgagacggattcttgttctgttgcccaggctggagtgcagtggtgcgatctcggctcactgcaacctctgcctccctcctgggttcaagcgattctcctgcctcagcctcccaagtacctgggattacaggcacgtgccagcacacccagctaatttttgtatttttagcagagatagggtttcaccatgttggccaggctggtctcccaactcctgacctcaggtaatctgccagcctcggggcctcccaaagtgctgggattacaggtgtgagccactatgccgggcccatagagctattttctttggggataaaaatgggagttataagaattggagactcactattaagaataaagagagaaaccatatattttacaggtgaacatcatagcttttatctgaaagaggtataaaaaagatgcccatgttctaattcttcttttgctacctaagagttgttgacattggccccaggccctaaaaagcaatcaagatgcaaaatgaagtactataaggaaaacaaacttcactatcactgtgtatctatcttcagtgcagaaacacaatcttttaagttacaccatccttcacaatctaagaggtgctgctgtagatgatgtaactgacagcaacatcagagttgggctcctagggattctctcccctcagacacccgagtccctttttgtagtgtataaaagatgattatgtgttgacagatcataaacacactgagataaaggagacactaaaaagcacattttaacacttgtgaggtattctaagattcagatttggctttccagaattggaaaattggccttggatggtgcctacagccatgagtctcaaactattttccaagcttggcacacatgacagtttcacctacccaagcacttttccctgggtcttcctgaagttatgccactgacaccctttcccctcaactcatgaaaacacatcagaaggcaagtgagtgagatgacctttagtcagctggaatatagaaaaggcaagctgtgacattaaccattagtaacagtattcgcaatcccacttgagtgttgctacactgtggttaaaaaattgtggtctccagcctggccaacatggtgaaaccctgtctctactaaaaatataaaaaaattagctgggtatggaggcaggtgcctgtaatcccagctacttaggaggctgaggcaggagaattgcttgaacccaggagacagaggtcacagtgagccgatatcatgccactgtactccagcctgggccacagagtgagactccatctcaaacgcaaaaaaaattgtggtctccaaaatagtatggtgtaaaatggttcgttaccatatgcataggggaagacaatgttagaactagttctagatatttctttttatctcatcatttaaaaattagtgttttataacagtaagttatagaaataatattactacatgtgtaaaatatataaatatccatatcaagggcatacctgctaaaacatttcttaactggctagggtgcagaattaaacctttttgaaactaaacctaaaagccaaagcgaaagtcattttcatttaaatgcaaacttcagaaaagaatgaatactcaaaagttttaggagatgaaagagaagagtagttaagaagtttaaaggcccagtgctttttctattaattagtaaaacccacactaaacactactgcaaaagctaaaaataaatgtaaaaaagagaaaggaaacagaagactctattgggatggaatgagaacagcatctttcatccacccatgcatacccacacacaggtaattatgatgtaactccctggaacagttcaagaaaaaaattaacaagatgcacagcctcttggcattctgatgtggttttagcattccgtctcttaaaataaaaagcaattagttatatagttgaccctacagtatttaggaaaacagaagcaacacgtgaggctaaaatcatttaattatacacaggccacaattgcaggatggaaaggcagtgggcacttggaagtgactacacatggcaataagcagcctatcttctttaccaaccagaagtttcttggggcatgtgatggtaggccagaccctttccaagggaataatactacactaagcctacactgtactgtgagagtcatggtggaacaaggccacaggcagtgggaggaaatgtgatgactcactgtgtcagaattctaaggcccagcatgatcaggatgtaaggctccataattttctaaaccagaaattatgagaagaacaaaattctgcaatcacttatgtttttttcttcttttttttttttgagacagagtttcactcttgttgcccaggctggagtgcagtggcacaatctcggctcactgcaacctccgcctcctgggttcaaccaattctcctgccccagcctcctgagtagctgggattacaggcatgtgccaccacgcccagctaattttgtatttttagtagagatggggtttctccatgtttgtcaggctggtctttaactcctgacctcaggtgatccgcctgccttggcctcccaagtgctgggattacaggcgtgagccaccatgcccggctgcaatcacgtatgagtttttctaaaaaaaccgaaacactggaaacatggatgcatcttaaagactttatgctaagtgaaaccagtcacaaaaggacaaatactgtatgattccacttacatgagaaatatgagtagtgaagttgatgatagagacaaaaggtatggctgttgctaggggaaggggaggtggggagttattgttcaatgggcacagaatttgggaagatggaaaacttctggagatggatgatggtgatggctggacaacaatgagaatgtacttaatccactgaattgcatatttaaaaatgggtaagctggtcagttttatgttataaatattttacctcaataaaaacaaattgaacttaaaaattcactgaagaagccaatatggaaaaaggactaaatgttaaaaaaaaaaaagccaactttttttttttaatcaagagataagtacttagctgcaagctcaaggtctcggttgaggacaatcattatgagtcctagtaaaagacaaccagttttaagaacactgtcaggcaagctaccatgtagttctccttgactccatgcttagctctttcagacttcccagtaattacgaagggtcacatttttgttcagctttgcccagtgctgtcattcataatagatgaatgaaaagtcccagaaacctgttctgtttgggaaggttttcttttgttccaggcttcggtggttaatatgcttgacaaatttcagagtctctctgtctctgtagaccaatgccaaagaattgctttctggattcactgttagcagctgaaaaagacaaatacagtgacacatcagaacacagaacttattctcaaatcttggatgattaaccatggaacagatggtttccatatcaagcacttaatctggggatagaggggtcctctgaatgaacacttactaggggtggctgtcaagccattttccaacaagccctattccagcatatacctagaaaggtacttacctattacatttatttcttactacattgtaagatttgtgggaatgcaccacatggctcttaatttggaatttctcaggagggtaaaataaatgcttactgagtatcctttagcatctttattccatcctgagtattttctactagaaattagaaccattgcctggcagagatttattagctaaagacactggtagaaggtcataaaaattgggtctttgaaaaatgaaagcattctcaataactaaaaatgatagtttgctatcagaagaaacttacctcttcatcttcacctttggcaatgtaagaagtaaaaccgccatattctggctcccagccttacaagagaaaaacaaacagcattcagaaagctcctattgaaagagtcgcaccatctacttaaatcactgatcccatgctgcttaacagtgggggatctgggagttcagcagtaactggttctatgacttatgagcttgaacttatcatctagtttatcatggattgccttcccctaaatgcctaatttcctgagacagctgaactgaaatgcagtcttatttcaataaactttgaatatgaaaattaagagagaattaaatgctaaatattcccagaagggcaattacataaaatctatagatctgggagcacacttaggggaaaattatggtgtggtccatctccccatttcctagtcacagatataaatcctattttgagctgggagactggaattcatgacccgtaaaatccctttgactttgagatcccatgatgtgagattctgaactaggcaaattacttatgaattggttcagctggaaagggtccctcagaagagactgcccctcctacggggaataatccaccgcttgctttcctccctcttaccttcacagccacagtacagaattaagtctagggcaaattcagccttgctatggtcatgaattaaagtgtagtgaccggtcttccaatgcctcagttccccttggcacatgggaacacttgattctaaggaaaaaaaaaaagatgagaaactttaaaaaataaccttgatagaactgttggattgcaagggaatcataattaggaatgatacagcaacacagggaaaccattcccacaaacctttgattgaagtgctattctaccaatccagccttataaaagattgttaggaattaccagctctattttggggtaaaaaagttgaattttgggccgggcatggtggctcatgcctgtaatcccaacactttgggaggctgaggtgggcagatcacctgaggtcgggagttcaagaccagcctgaccaacatggagaaaccccatctctactacaaatacaaaattagccaggcgtggtagtgcatgcctgtaatccagctacccgggaggcttaaggcaggagagttgcttgagcccgggtggcagaggttgtggtaagccgagattgtgccattacactccagcctgggcaacaagagtgaaactccatctcaaaaaaaaaaaaaaaaaaaagttgaattttgatttctctctataataataaatttcagatggaaaagaagtctagttgcaaaaaaataaaaaatacgacatgaatattattttatctaaccttaagagatttctcagcatgttattacctaaagtagaaacgaggaaaggcaaagatagacctgattactaaaatattttataaaatttaaaccatgctgaacaaaattaaaaaatgaactattacaatctgttaaacagaaggttagtactcctctgaggcaggcagatcacctgaggtcaggagttcaagaccagcctggccaatatggcaaaaccccgtttctactaaaaatacgaaaatattagctgagcatggtggcgtgtgcctgtaatcccagctacttaggaggctgaggcatgagaatcgcttgaacctgggaggcagaggttgcagtgagctgagatcacaccactgtactccagcctgggtgacagagcgagagtccacctcaaaaaaaaaaagaaggttaatactcctatatgtaactttttaaaattaactaataaaatgacaaaaagcccaaaggaaaaatacactgaggtaatgacaggcaactcatgaaaaaaaaaaatcaagtaaccaatagggaaaaatatacaaccacgcaccattagtcaatgataggcgaatgccatttccacctaaagaataagcaagttggaaaagaaaatataacagtttgctaggaagaatgaaaacatcatcatgtacaatgctggtgggagtgcagactgatacaagttttggggaggcaatttggcaactgccttaaaattttgagcagtctttgatgtatcacctgtacttctgagaagcattctgaagacacaatggatgtgtcgtttattatgacagtgaagaactggaaaaaatctaaatgctcaacacaggactggttaaggtcatctgatccaatagattgcaagcattaaaaagtatactagagaacggtgtttttcaaaacttaattgtggcatacattcttgaaataaaagcttctagaaatgcaatgttggaaagcagatacatgtaaaactgctttggtggccaggcgtggtggctcactcctgtaatcccagcactttgggaggccagggtgggcggatcatgaggtcaagagatggagaccatcctggctaacacggtgaaaccccgtctctactaaaaatacaaaacgttagccgggcgtggtggcatgcgcctgtagtcccagctactcgggaggctgaggcaggagaatcgcttgaacccggaagacggaggtagcagtgagccgagatcatgccactgcacttcagcctggcaacagagcgagactctgtctccaaaccaaaccaaaccaaaccaaaacaaaaaaagcaaaactgctttggtggaaggtttcctaagtgaggagggtgtgcaaacctgttctattgttataaaggatgtaaaaggatcagaaagaggtttatgaaatattaagtggaaaaaatacagaacaatatatatggtataatctcattaaaaatagatgtgtaaaaatataccccccatatgtgtatacatgtatatgtctacatagcaaaaaaacagtggaaggatatattccaaatgctaatatggccacttgtagattattattttcctttttcttgttttctaaacattctgaaattgacgtatttttattttttaaaatcatcttcaagttatcaggtctgtaatgttatctcactagatgtgccctagctatgccaatgtttagcactgctatcatatgcccagcaatttgatagcttttgccaagctttatagcttttcttcaagatggtaaacttcgtaaacagtgacttttctctttcacttttgtattccctactctgctttcacccaaggccccctgtatacagtaggtgctcaacaatggaataaagcatcttttggctgcccatatagattttatcctaagttgcaggttcccgtaaaaatgaaaccaaaaaaggaatagaactggacaagttttggccaggtgtgattggtcacgcttgtaatcactgcactttgggaggacaaggtaggaggattacttgagcctaggggtttgagaccagcctgggcaacatggcaagatcccatctttacaaaaaaaaaaaaatcaagaaaattagttgggtgtggtggcatatgcctgtgatcccagctacttgggatactgaggcagaaggatcgctcgagcctaggaggtcaaggctgcagtgagctgtgattgcaccactgcactccagcctgggtgacagtgcaagaccgtgtctcaaaacaaacaaacaaacaaacaaacagaagtggataagttttttaaaaaatccctttgagacagactccatggatactgactctggttcctcttagggtctaggcataaatgccagtatcaattaacatggaaaactaatctttcaaagaaaggctaccctgtgtattaagatagcacagaaaaagccacctgggtctggttttactaaatatctgcagtggccaaagtgactgttcagtcagttttggaaggccacagaatgagttatgttgctttcagttagcatctcaaaccactgattttgtttccacaagtatccaccccttgtctctgctctcctaactgcacagggttctcaagaaatttgagtggaagcagggaatggtaaactgggtgacagatgttctcactgacatagtagtaagtgctgaaacatctaagctgaatttgttgctactttttaatggtgccaatattttcacaggagtgttacctcttaaattcttaggctgttatattcagatctgagcttaaatggcgctcctcagagagacttttctaaatcatctattcgcctaagaggctactcagtcatttctttttttttttttttctttgagatgtagtctcgctctgttgcccaggctggagtgcaatggtgcaatctcgactcactgcaacctcctcctccccggttcaagtgattcttccacctcagcctcctgagtagcttggattacaggcgttcaccaccatgcctggcaaatttttttttttttttgtatttttagtagagacggggttttgccatgttggtcaggctggtctcgaactcctggcctcaggtgatcagactgcctccgcctccaaaagtgctgggattataggtgtaagccaccgcacctggcctactcagtcatttcttgtcatataaccctattacaatgttttgcatagcacttatcattacttgacgttttcttgttgttcatgtatacatttaatctctgtcttcttctactagaatgtaagctcccaaagaccagagaccttgtctgttttgtccttcagttcctgaaatagggcttagggcacagtagatgctcaataaatgtttgttgaatgaatacatgtttgaatggtgaatggttaatggtaagtaaggacaaatcctaacaacagcttacctttctttgtttcattttcctctggctctgggtctgtctgctcattgctctgttggctgttgttgctgatggccatctgattattctctggctcaggaggactatggctagtcccttcttcagtgatatcagtggtttctgcctcttttttatcattcatctcatcttcttccgaaggggccaagaaatgaagcttcaggcctgtgaagttggagagcagcaagaatagtgcctcagagcgaaataacttcatgcactccttcaatatctcaggaagcttactctcctcagctttctcataaaacctgaaaaacagcaatgtcaagttgttcatcaaagccacagatgtaaaatgactcacagaataaaagctgatcgttagctttgtacctctcttcctaaatcttggcacagcttactaaggcacaagttattacaatagtgagattttgttaggattttgttaggacatcctgctactggatgtccctgagaacaaaacatcattagggcaagtgtcctattattgggtgtgagccttggtgcatgattgtatattttttcctgttggttatttgattttctttcatgaactgcctgtcatcacctcagtctatttttcctttaggctttttgtcattttactagttataaaaaaatgttataggtgctgaatgtagaagcaaatatctcagatgacgggttctaccttttgttagggggacctcggctgctccattccacatgtccatgctccaaggcctcacagactttcgtgaatttctcaggctagaaaatgagcaaataaagaagcattcagcagatctccctattaccccgcactggtttggcaggtacagcagctctgccaaacatcaatctggctgattcctaaaaggtgcagttgactctcattcctttttttttttttttttttttttgagatggagtttcactcttgttgcccaggctggagtacaatggcgtgatctcggcccaccacaacctccacctcctgggttcaaacgattctcctgcctcagcctcccaagtagctgggattacagccatgcaccaccacgcctggctaattttgtatttttagtagagatggggtttctccatgttggctggtctcgaactcccgaccctcaggtgatctgtccaccttggattcccaaagggttgagattacagacatcagccactgcgcctggccgactctcactcctttcatacaagatcccctactcctcctgtggtaaagccagggtgaagactggatacatcattggcttgctttagccaagagacctgagtgccattgtggctcattctcttaagtagttatataccttacgtcaatctgctcaacctcccagactgctgcatttataaaatgaggatcataatacagaccataatacaactcacaagatgttttgaggataaaaaattaaactgcattacaatcaaggtcattaccgtgacaatctctgtataacaattccgattctctaggcccctaatttaataaccattctaaattcaaaaagttaggtacgacacaggaagctggttaatccattgaaatattctccacaagaggctttccatttatttgtttaatgcagtttcccaagcagtcctatcagttataaatgcatgaaaaaggaaagatcccatagcatggtttaggtaaactgaattgaatagggtattcagtttatttactataatacttctcaaaaccttaatatgctaatgtcagctataaaattgctagagagagacaggatgtagagtctcaaccttttttcatggaggaatagctcttgggaccatggctccatgggacccacagtcaactgtaaagtgccatgccagcaaaagttatcttattggccctcacaacaactctatgagaaagacaaggcaggtatgaatcccagtttaactgaagacaaaataaatacccagagtgatttagtgatctgcccaggttagtaaaaccacagagccagggcatgagaataagttttctgatttcttttttttttttttttgagacggagtctcgctctgtcacccaggctggagtgcaatggcgcaatctcagctcactgcaacctctgcatcccaggttcaagtgattctcctgtctcagcctcctgagtagctgggattacaggtgcatgccaccatgcccggctaatttttgttattttttctagtagagatggggtttcacaatgttggccaggctggtcttgaactcctgacctcagattatctggccacctcggcctcccaaagtactgggattacaggcatgagccactgtgcctggccagtcttctgatttctaatctctttccactataacaagctacctcatcactgtcaaatgttcaacaacagatattgatctattagtaatctatttttaaaagtaataagaagcaccatatttgttagatgaatagaaaggtaactacacacaactccttttcagggtggaagcttgtgtgtgtgtgtgtgtttaagactctagagaactggggaatatccaagggattcttaacccactaagcatactgctgatactaatgttagtgttatcatcatttctatgtttcacttgaagaagggaatgacaaaaacattctaatcaggaacaaaacaaaaactccccagtgatgcctattcacccatttgggaagcaaaattgcatgccaaacaaaatattcagaacaacatacgctaagcttaccttaagaaactccttcaggagaatttcagaactttcttcaaactcttcttgaatttgaacttggtaatccatgtccagataagtagggttgatccaatcatacaaaatctcatgcttacgaagaggcagcagatgcaaaatgtgagttaataattcctattgcttttgctcttacatcatttcacactaataaaatacatgcaaatcctcattttataagtttctcctattaaagtactggaaaactctgcttgagaaagacactctcaaaagtttacttaagaaaagtgtaggccgggtgcagtggctcacacctgtaatcccagcactttgggaggccaaggtgggtggatcatttgaggtcaggagtttgagatcagcctggccaacatggtgaaaccctttctctactaaaaatatgaaaattagccaggcgtggtggtgggcacctgtaagcccagctactcaggaggttgaggcaggagaatcgcttgaacccaggaggtggaggttgtagtgagccaagatcgcaccactgcactccagcctgggtgacggagcaagactctgtctcaaaaaaaaaaaaaaggaagaaaaaaaaaagaaaagtggaaaggggcaagctcaaggtccagtttcattaaatggaacagctaattttaaaatcagagaaacaaatgatatgctatagctcctaagataaggatatcagcaattcttcttacatcttgtgggatgtgagggctccgaggtatggggggttcaaagtagttgggaggccgagtcaatgatggaccatgaaaccagccacttatagacaaacgtgacttttcttcagacagcacttcagacacctgaaaggagaagcccagtagcacatcaacacgaagaatagggggattaccgccaatgcacattaatttcagggtcctccatgctaagcattaaaacaacatcagataacaagtctaacaggaagctgtcatgtttggataatgggtgattaaaaaacataatccttgctactctatttgtggcttacagtctttacctggtgaaaggacacaggagatacttcaaagaaaaccagtttgttccacgaagggataagagacttgacaatctgcttcggctgaaagtgttctgcaccaggaaagaacacatcaataaattatcattaacc

SEQ ID NO: 10935 - DNA, 395 bp, Homo sapiens
gaaaacaatgaagagtcgttatatggaactctatgaccttaatagagacttgctaaatggatataaaattcgctgtaacaatcacacagagctgttgggaaacctcaaagcagtaaatcaagcaattcaaagagcaggtcgtctgcgggttggaaaaccaaagaaccaggtgatcactgcttgtcgggatgcaattcgaagcaataacatcaacacactgttcaaaatcatgcgagtggggacagcttcttcctagtctttacctggtgaaaggacacaggagatacttcaaagaaaaccagtttgttccacgaagggataagagacttgacaatctgcttcggctgaaagtgttctgcaccaggaaagaacacatcaataaattatcattaacc

SEQ ID NO: 10936 - DNA, 27400 bp, Homo sapiens
cttcaagtagaagcggattttcctgtctattttgaggaattacgaaaggtgctagttaaggtgagggaatgcggtagatgcatttgtgagaatgtggtagtctaataatatttgaggagattaatggtactacaaatgtacttatgttatagtgatgttttcaagaatttttgcaattcttgaagtaaaaattgaactagtattggagagtttactacttaaggatttattttataaaaggaagtgtttagctcctgagcaccatgcttgctttgtttggtttaaagtgatgcatttaaatattaacattttcctttgttagctcttcatcttatttgtagtatctgctttggtcttcttcagtttgggtctttccaaaaacccaaattcaagataaaagagcaaaataaagatgattctgattggccccaaagtatacaatattcccactgcaaatccctaaaatattaatatgtgtgttgtgggggctcctggtgctaaagcatggggaagattcacatggagtgtcgtgttgaaattggaggcagcacagatgagttaacttgttgagacagagatgaaataacgggaagtagcttaattggtataagcgaacaggggaaagaagggggtctctgtatctggtaaatagtgtcttttcatttgtctgggttcaagaagtttgtgaggcctttttcattcctgagtgttcatggtctccaggtggatgaatatcattcagtgcatcagaagctcagtgctgatatggctgatcattctaatttgatccgaagtttgctggtcggagctgaggatgctcgtctgatgagggacatgtgagtatttgtcatggttagtacaggtgcagggttaaaaatgtgagcagtatggaatagcaactctcagatgttaccaatagaagtataaattgttacagtgactttggaaaataacttggcattatcagtaaagttgaaaatgcatgtcctctatgacccagcaattctattcctggtttatagcttagggaaagttacagcttagttatatgtatgcttataaaccaggatatttatataagaatatttgtaaaggcattgtttataaaaatctcaaaatggaaacaatccaaattagcatgaacagtgtagcgacagtggatgaattgtgatatattcatgcaatggaatactacacagcagtgagagcacatgaatctccatgacacataagagcaaggaaaaatctgataagcataatggacactgaaagaagacagacttaaaagactataaaatgtatccgtgtgtatagttagagaaaagagtaaactatagtttgggaaacatgcaataaataaaaatataaattcagggaagagattatcatataagatagtattttctcctagagaaggagggattatgttcagaaaaaacacattgggaaacttcctgtctgaagtcttgtttaacttcattaaatattctgaatttttctgaatatgtaacattttacaataaaaaagttaagtatgtacagtacaggtcttccttggtgcttgctaggatgccaaatttaccttgccaataaaatgtactgaaaaaaattcagtaaaatagttaacaaattatagatgaaatttatgtgtatatattaggggcaagagttcactcagagtgctgcttgtgttttttcctgagacgcctgaattattggcaaataattataatggttttgctcagaggtaaatggtttttaaaataattgtattgttgaaaatttcaaacacatacagaagtacttaaatataatgatttcatatataccacccacccaacttcaacagttatcaactaaagactgatcttttttcatctctacactcaccctctttccctcccaggcactagataattttgaggcaaattttggacattgtgtaattctagccacaactatttcagacaaagggcctttcaatatcatatatatatatatacatatatatacacacacacacacacacacacacatatatacacacgtctgtataaaaatcacaatgccatatcacacttagaaaaatttacaataattgcttaatattacaaatacctcatctgtttagatgttcccagttgtcttataaatgtggacatgtgtgttttaagttggcttgctcaaatcaaaatccagatcaaagtccatacattggatttggttggaaatcgtttaatcttttaatccacacttttgcttgcccactcagtctcttctctccttctcctgtggggtgccattttggattttgctggtggtatccttgtggtaatgtttagtattattcttctgtcccctgtatagaaagataatggtagatctggaggcttgattagattcaatttcaaattttggcaagaatacttcgtgagtagtgttgtttacttccatgaggaagcatgcaatttttgattgtttctttttatgatattatcagccattgatgatcattgcctagattcattatttcttttggggtttgcaaaatagtgatattctaattctgttattcttttcttcatatattagttgaaatacttctatgaaaaataatgttccctcatgaattaatgaattatttggttccctgaggtacagtttgtacaggaaagacagtttctttatcagctttaaaataatgtgttgatctccagcatgcactaggtgaccaatgagatttttaagtccttacatactcatgtatttgaacatatttaatgtgtttcaatttatatctgttattattaatttttatggctagttttttttttttttttcgagacggagtctcgctctgtcgcccaggctggagtgcagtggtgcaatctcggctcactgcaacctccgcctcccgggttcatgccattctcctgcctcagcctcccgagtagctgggactacaggcgcccgccaccaagcccggctaattttttgtattttcagtagagacagggtttcaccgtgttagccaggatggtctcgatctcctgagctcgtgatctgcccgcctcagcctcccaaagtgctgggattacaggtgtgagctactgcgcccggccttttacggctagattttccagtctgtgggcaatggaagtctctttaggttggatacagttacctttggacatggtcccattaatttggttggttctttgttttcttgtatgatgaaatgtttcaggcttatctggtacatttcccagtcttcatatggaaccagccatttctctcgagtcctggttcttttacatgagaaatggtatttagagatcatggtctgaccactaaagatgttcattgctactgggttgattattgtttttaggccttttcaatgcgtagagctaggaattttttttttcaatgagaaaatatgagttcatactatttaccattcagatttatgaatataggctcttcgattttattactgcgcctcttctctctcacattgaaaatcatggcttcaggttgggcacggtagtttacacttgtaatcccagcactttgcgatgctgaggtgggaggatcacatgagcccagggattcgagaccagcttgggcaacatagtgagacccagtctctgcaaaaaaaaaaaaaaaaaaaaaaattagctgggcatagtggtgcatgcctgtagtcctagttactcaggaggcagaggtaagaagatctctggaacctaggagtttgaggctgcagtgagctatgatcatgacactgcaatccagcctgggatgacagagcaagatctcttaaaaaaaagtgggggaatatcatggctccaatcagtatcaacataactatttgcttcattttacagcacagacacaacatttaagaatattagccaagttgttatcaacaatatgattgctgaaaacagtttaagattttttgtgtgttaattctttgtgtctttagggcatatcccagcagggagtttccgtcaaattactgtatcttaaaatcatttgagattatttctcttttggttatgccacagatttgatagagagttaggttcattgtcttattttgctctcagttttggaggattggcatttttacctttttggtttaattctattacatatttactaaaacctttttgtaattccaaagttagatctataagacaggcatgcacggaaaagtctaactttccattcctgtgaccttcattctgttctctcccttttactataaataaccagttgaacatttaagtatatatatgcagatacacacagatatatacacacacacccctcttcatgtcttagattaagtcatagtatgtatatatctttttctccaccttggttttttttttttttttttttttttttgagacaaggtcttgctgtcacccaggctggaatgtagtgatgcaatcacagctcactgcagcttcaaccacccgggctcaagggatcatctcacctcagcctcctgagtagatgggactaaaggcatgagccaccagcccggctaattttttatttttttgtagagacagggtctcaccacattgcctgggctggtcttgaactcatgggatctactgatcctcccaccttggcttcccaaagtgctgggattacagatgtgagccactgtgtccagcctccaccttgctttttacatttaaaatatatcttggagatttctccaccatggtgtagagaaatacatctcatttgtctttacggctacatagtactccattttctggctgtttttcagccagtttcctctatttggattgttttttttttactgtagataatgcttaagtgaatagttttgttacgtaaatctttttatatttttgccaggatagtttgagaaaaaggcttaacaaatgggattactgcagtaaatgatacatgcatacagaattttgcaaggtcttgtcaaattctccataggtgttacctcattttgtattcccataagcaatgtatgagattgcctgtttctcttcagccttgccagtggagtttgtgggcatactccaggggatgagaaatggtctcttagttttaatttttattttttaaattttattttattgtggtaagaccacagcatcagatctaccttcttaacacatttttaagtgtataatacattatcgttgactataggtgcagtgttgtacagcacatctttagagctgattcttcttgcttaactgaaactattggtaagcaaattcccatttcttcttcccctctttcaactatcattctactctttgattttatgaatttgactattttagatactccatgcaaatatataatatttgtccttctatgactggcttatttcactcagtgtaacatcctcagagttcgtccatgttgtcacatattgcagaatttccctctcttttaagactgaatagtgttccattgtttatatgtactaaattttctttatccattcacctgttgatgaacatttatgttttttccacatgttggttattgtaaatagtgtggtgatgaacgtgggagtgctaataggtcttcagggtcttgtcttcagttcatttggataaatacccggaagtgagattgctagatcatatatggtagttctatttttaattttttgattacatttttaatatttaatcattaaaaattaaaaatttaaatttttaatatttaatcattaaaaatttaaatttttaatatttaaatgttttccatagtggctgcaccatttttcattgtaatcaacagtgtacaagggttccagtttctctacatccttgccaacacttgttgtcttttttttgataattttcatcctgacaaaggtgaaatgatacttcattgtggttttgatttgcatttccctgatgactagtggcattgggcgtctttttatatacctgtcggtcatttgcttttcttgtttggagaaatttctattcaagtccctagctcattttttaattggattactagtgtttttttttttttttttttttgctgttgagttgtaggagccatttattatgttcagtattgggcatttttcattgttttaattcagggccatttccatttcttttttgtgtgaactatttgtctgtttacatatcaggtactgttgtagtccattttgtgcctctataacagaatacccgagaatgggtaatttataaaggaaagaagttgatttagcttatgggtctgtaggctgggaattacaagaaacatggcactggcatccgcttgacttctgttgagggccatgtgtgaagtcaaaacatggcagaaaaggtcaaaggagaaggggacatgtgtgaagaggcaaagcctgaggggtgccctaactttataacaacctgctcttttgataacttcattcctgcatgagcgagaactcactcctgagagatggcattaatggcattaatctattcatgagggatctgcccccatgacccaaacactccctactaggcccacctcccaacactgctgtgctggcatttcaacttcaacatgagttttggcggggacgaaccacatccaaaccatagtgggtatattaatctcttacgtgtgatatgagttgcaaatatgttttccggagtttgtcatttgggttttccctttgcttagatttttaaaaaattttgctttaatgggccaggcgcggtggctcacgcctgtaatcccagcactttgggaggctgaggcaggtggatcatgaggccaggagatcgagaccgtcctgactaacatggtgaaaccctgtctctactaaaaatacaaaaaatcagccggtcgtggtggcgggcgcctgtagtcccagctattcgggaggctgaggcgggagaatggtgtgaacccgggaggcggaggttgcagtgagctgagatcgcaccactgccctccagcctgggtgacagagtgagactccatctcaaaaaaaaaaaattttgctttactgttggttttaccttgtaagagcttttaaaattttgtatatagtcaaattataagaaaatttgactacattaagaaaatgtaagtcattttcttaatactttatttatttatttttgagacagagtctcactctgttgcccagcctggagtgcagtggcgtgatctcggctcactgcaacctctgcctcccagattcaagtgattctcctgcctcagcctcccaagtagcgctaccacacctggctgatttttgtatttttagtagagacgaggtttcaccatgttggccaggctggtctcaaactcctgacctcaggtgatctgcccgccttggcctcccaaagtgctgggattacgggtgtgagccactgtgcccagccacattttcttaatacttttacattttgaattactgttagaaaagttttctttaacagcagggtatagagtaattcatctgttttcctttagtacttgtatattttgcttttttacattaagtctctgttccagttggagtttatcctggtgttcatataaataataaactcagttttatcattttccttatgactatcacattattattatattattattatttttgtgtgtgtgtgtgtgtgtgtgcgtgtgtgtgtgtgtgagatagggtctcactgtgtcacccaggctggagtgcagagagatcacagctcacagcagcctcgatctcctgggctcaagttatcctcccacctcagctgctggagtagctgggactacaggcgtgtgctaccatagccagctaatttttgtgtagacccagggtctcgctctgttgcccagactggtcttgaactcctgggctcaagcgatctgcctgccgtggcctgtcaaaatgctgggatttcaggcgtgagccactgtgcctggccacattgcattattttaatactactactttttttttttctttgagatggagtttcgctcttgttgcccaagctggagtgcaatggcgctatcttggctcactgcaacctctgccttcctggttcaagccattctcctgcttcagcctcccgagtagctgggattacaggcatgcgccaccatgcccagctaattttttttgtatttttagtagagatggagtttcactatgttggccaggctggtctcaaactcctgacctcaggtgatccaccaacctcggcctcccaaagtgctgggattacaggtgtgagccactgtgcccagcctgatactacttcttttaaagttcatcatgcttacaatgatttcagatactgcccttatcatatatcatatttctgtacacagttgaatctatttctggattttctgtactattccattggtctgacttgtcacttcatttgacaatatcattcttttttaaaaaaaattattttgagacagaatcttattctgttgcccaggctggagcacagtggtgtgatcacagctcactgcaacctcggcctcccaggtacaagggatcctcctacctcagcctcctgagtaggtgggactacaggcatgtgccaccacacccagctaatttttttttatttttggtagagacagggtctcactatattgcccaggctagtctcaaactcctgaggttaagccatcctcttgcctcggccattttttttttttaatgtttggctgggtgcagtagcttatgtctataatcccagtgctttgggaggttgaggcatgaggatggcttgaggccaggagctcaagaccagcctgggcaatatagcaagaccccatctctaaaaaagaaaatataaatttcattgtgatattctgaaatacatatttgatcttcaaccctgtttcctgacataataactcctaaaatcttaggctctccaaagtgatgtctttttgtatgctattgattggtttatggctggcagctcctaggtagcttcaggataggggtcagtcaccagaacgaccaaggcaggattagaggattgggactttctgcccacccctctcccaacctccagggagtggagaggggctgagagttaagttgatcacctatggccagtggtttagtcagtcatgcccaaataatgaagattccatcaaaacccaaagggacagcattcagagattttctagacatctgaacacacagagtttcctgaaggttgatgcacctagggagggcatggaagctccaagcgccttccctaatacttcgttctatgcatctcttcatctgtatcctttgtaatatcctttataataaactagcaaatgccattaagtttccctgggttctatgtactgctctagtaaattaatcaaacccacagagggggtcatgggaaccctaacttgaagcagatcagtcagaaattctggcagcctgaacttgtgatatgtatctgaagtcaggcagtcttgtgggactgagcccttaatctgtgagatctgacagtgtctccgggggaatcgtgtcggaacggaattggaggacacccagctggtgtctgctatagaactgattgttttcttggtgtgtgggaaaaacctccacacagttgaggacagaagtcttctgtgttgattgttgtggtgtgggagcagaggaggaacagtttgtttttttccccactcatggtgaactacacaatgtgaaatttaccatcttaactactgtatactacttttagtgtacggttcagtggcattaaatacgttcataatgtgtaaccatcaccaccagcagcatctctataattctttatctcttaaacctgaaactctgtacccgttaaacagtaactacccattctcccttccctttagctctggcaactaccagtgatggtgccattctttcatgtatggatgttttgtatgtttcaatatctggtgtgggtagtgccccgtccccaacccctgttgcttttctttttcatggtttttcctagctacttgtgcttgtttgttctttccaatgaatttcatcagcaatttttgtagctccgtaacaaaaataggtattttaattgagatgatgttaaatgcattaacttagggagaactgatgctgctgcagtgatgtttggtcttgctagctaagaacatgctatgtctttatatttgcttaagccatgttttgtgtctttctggagtgctttcatggtttactcttgtagatactggatgttaccaattttaagtttatgcttaggtattttctgtatttttagacaattacgaaatattttataattgtaaatattttttacattatcttattctataattatggttttgtgtttgtacatatgaacactgatttttatctgttgattttataatgtgccctttactaactatcttatagtttttccagatgtattcttgtatcatctgtaaattgagatagatatttgctctttttggccaactatctgtagggtccctagtttctctatctctctatctctctcttaagtcaaaaatggttgctggctttaggcatttgattgcaaaatgtcaacatttgtttttttttttaaatcaaattaattgatatataactcatacatgcagaaaatttatgcttttaaggtttacagtttaatcaattttgagaaacttatgtaatcatgttgctactactacaatcgagatataggatatttctatcactggccgggtggctcacacttgtaatcccagcattttgggaggccaaggtgggtggatcacttgaagccaggagttcgagaccagcctggccaacatggtgaaacccagtctctactaaaactacaaaaaattagccaggtgtggtggcgggtacctgtaatcccacctattcaggaggctgaggcaggagaatcacttgaacctgggaggtggaggttgcagtgatccgagatcgtgccattgcactccatctagcttactgggcaacaagagcaaaactccatctcaaaaaaaaaaaaaaaaaaaaaaaagaatatttctgtcactcttgtgactgtttgtatcaatacctcttctaacctccagttcctggaaaccactcatcttatttcttttcctgtagtttcaaccttttcaaaataccatataaatggaatcatactgtatctatatctatatatccttttgagtctggcttcattcacttacataatgtcttagagattcatccatgttgctgcatgtatttgtagttccttttttattgctgaatagtattccattgtatggatatatgatatttatctattcaccaactgaggataattgggttgtttccagactttggtgagtagaataaagctgctataaatacttgcatacaagttttttatagacataggttttcatttctcttgggtaaataccttacaatgggattgctgggtcatacattgtgtgtttaactttataagaaactgccaaatcacctgtcaaagtagttgcagctttttgtatttctgtccacaatgcatgaaagttccagttgtcccacatctttgctagcatttggtatcttcagctatatttttctttagttattttcattgttgtgtagtatagatctcatttctgttttaattttatgactttgttttaaacctttgataaaatacaaggctgagttgtcaaccaggccactttagtctaatgaatattcatctgaaacttggaaggtgggctgtcaccttgctcacttgtccctactcccagcacagtgggcttgagaattcttaaccacctaaatcaaccattgaccagtaaccaaggaaggccacttgtcttctgtttatttggaaggaaaagaatatttttatggaacttatccgtattttcaaagcaaactagcagttactcgattttaatgaaaatatagcttaaaaatggtgtcttttctttgtatgtctaagaaatttgcaagtttttcttaagcttgccatatcaacatgaaatgatgtcaaatttctactgatttgcacaggaaaacaatgaagagtcgttatatggaactctatgaccttaatagagacttgctaaatggatataaaattcgctgtaacaatcacacagagctgttgggaaacctcaaagcagtaaatcaagcaattcaaagagcaggtcgtctgcggggtaagtctcttttcataacactgcactttgatctgtaatgtttttggtggaactcattgaagatggtggtagcatccaataattcatattggggctgaaagtagcatacctttcacactccagagctggcaccagtcacttatgtttcagtcagtcggcctagtgtttggcttttgtctccggacttcaaagggagagaaaaccttcagctccttttcttagaccttcctgcatcctctaaagaaaaacctactatatataacccaaaggaaatatataaacatatatatataaataaaaccatcaaggcccaattagcaaaaaagagactgaaaattaatgctaagtgtctaacttaaaaatttagaaaagaacaataggataaacccaaggaagcagaaatatagccagagatttatacctgaattctgctgttttgggtcgatgctttgacttctttagaaataatctttgctaggtgactatgagctttgatccttttctgtaaaactgactgttggtttctaggtttgagacagtctctaagtcagttttttcaataattccctcaccaagttattttttttagggaatggtaagataaatcatatttcaagtataactcttttccctcctggttttatgttgttttaaaactgacgtctaattttataatttcatgtctaacaatcttttggttcctgatgtttcttcttatgcagttggaaaaccaaagaaccaggtgatcactgcttgtcgggatgcaattcgaagcaataacatcaacacactgttcaaaatcatgcgagtggggacagcttcttcctaggtgaggaaaatacaggtcatgaagttcctggcaaagattttctgttaaaaacctatgctggtttgctttggatcacaccctggtgaaccccgggtgctaagaatgaaaataaccttggtgagttgtacaaattaaagacaaagaactacatgtgaagatagacttgctttctatttttaaatcagtagtagtactgttgctgaataatactaggtttttatggaataggatgaatgcttttgaagtattagggcttcagagtccaattttgcttatttatggtatataaatacatatttttttcttgaaattgcaattgagtttgtacttttcaaatagattatctactttttcattaaaatgtaaagatgttaaactttgtgttgattgattataaaatcaccaccaaatcagaattgcccatttgtattttgtagtagagaaaaacaaaaatgtgggctgggcacagggcttatgcctgtaatctagcactttgggaggccagggcgggcggatcataaggtcaggagatcgagaccatcctggctaacacggtgaaaccccgtctctactaaaaacacaaaaaattagctgggcatggtggcactcatctgtagtccaagctacttgggaggctgaggcaggagaattgcttgaacccgggtggcagaggttgcaatgagcctagattgcaccactgcactccagtctgggcgacagcaagactcccgtctaaaaaaaaaaaaaaaaaaaatatttgggctgagctcagtggctcacacctataatcctagcactttgggaggccaaggcgggtggatcccctgaggtcaggagtttgagaccagcctggccaacatgatgaaacctggtctctactaaaaatacaaaaaattagccaggtttggtggtggacacctacaatcccagctatgcaggaggctgaggcaggagaattgcttgaacccaggaggtggaggttgcagtgagcaagattgcaccactgcactccagcctgggtgacaagagcaaaactctgtctcaaaaaaaaaaaaaaatgtggatatttggatttgtgtgctttttaatcactgaaagatgggtgcaaacaacaaatttacattaaggaagagtcaatttagagtgattactttgttgggctaatgttagctgctgtaacaaatagacctcaaaatcataatgactcatttttcatttattatgtaaggatttctccatagttatgcagggacccaggttcctttaatcatgtggctctgtcatcccctaggacaaacttttctacctgagttcactaaaggactaagcctaaggaaaaaggtttgggtgactagtttcacattcagtacatacagtggagggaggtcttagggcagtggggctttattatctcacttggaacactatttgacaagggctgtcctagggccttgtggttatttacagccatgtaccagataatgaagtttaggtcaccataagattataatactgtatttttactgtacctttgtgtttagatatgtataattacacaaatacttagcattatgttacagtttcctacagtattcagtatagtaccatgctgtacagatttgtaggctgggaacaacaggctatactgtatagcctaggtgtggagtaggctataccatctaggtgtgtataagtgcacactgtacaatgttcacatgatgacaaagtagcctaacaatgcatttctcagactgtactgctgttgttagcagagcatgaccatatagctgagccggtagaagagagtaagagggaaacatgtcttcttcttttaaaagtgtggtctgaaagtagcacactatcatttccattcagaattccattgagtcacatgaccacatctgcaggggaggccgggagatggaatctagctgtgtgcctgtaggaacgctggtatttgtgccaatagctagcagtctcttccctaggaaaaatttcgccctaacgtagatttcaggactggtttaatgagtgaaacttcagttagttttaatatcttaatagctgtttaggggaagtggagcatttccctgaggttagtaaacattaattttattgattttgatgtggccactttacgatggcccctcctatatctgaaatttaagccttatggagtcctaattatgagaatatgctaatacttttgtttttcattttcaacctataaactcaagagataatccacatacactgtattattttcaatctccaaagtagtaaagtatcatcgtaaatctgcctcacacagaggttgctgtgagccgagatcatgccactgcactctagcctgggtgacagagggagactccatctccaaaacaaaaataaataaataaataaataaatgtgcctcacagaggaggaaactgaggcataaataacctccttttcaggtcacagagttagtgacctgtgtgacctgtctagtgactcaagaggaaacttgagtcctactgttgagtctttgttttaaccatagtctaatttataccatttgagattaaaatctctagttggtgctagttttaaattatataatgccattcatttttagggagtctaataacataatctcatcaaaggtcactctgttgttctttagctaaaaaacttccttcttagacctaaaaatactcatggccaggctagaaggcattgacctgcagcaagacatattaagttgttctgattcataggttattttcacagtaatttgatcctgttgatgttggtgtctgtttcacagatgaggctctgagctctaagacagagtgtcctgtacagggtcccacagctgggtaagccctggtgtgaaggaggtgttggaaacaagtagtcacggcctcttctactccaaacttcccaagcaagtaaagactggccgaagtgaaaacattcataaaacatgcaactaccttttttcccccaacttagaactcatcctgttcagcttaggagtgaggaaaaactggacaaggagagatgagtttatcagtaacttctctattttgttgccatatgtttctatcctgatagaatctgagtacttctagaagctacagcaaagctgtatttcactgctgaattacattgaagctttaagtgagcactgagctgtcatttaaaagctgactttgaggattttgatatctgagagaaagctttcagtaccataattcaggttctgaggatttttaagagtataatttgtattatttcccaccatgactgcctatccagtacctcaaagccccgctcaaatgctctctccttaggtgacctttcctctcccatgtctactccttaacccttattaaattctttacttaaatcttaatcccctgttaagcaagaatggtgtctgcatcttaaccagcgtcaccctcgccccagtgctgagccagtgccttgagcatagaatagcatctgccgctctgcttgggattgtctgtccttaatacgcctgtcagcagcttcagaaatcaaagaactaggaactttaaaactattatgcaaccctagaagtgttttacaagaaagattttcaacattgttattaatgtttcaaattttataattagcagttacagatctgccaatgcacagtcctgtcattatagaactaaattacctccaatttcatttggaaactcaagtacagtaagacacccattacagcctggtgtttcgcattttgcctcttttccatctggcccctgcccacactctatgctctagctctgaagtcatcttgtaatctgtacagtacagaatctgcttttcctaaaagtgatgtcacatggacagttcccaagtcgtttttaaattgtctttgtggactgattttgcatcagagagggaatcatcaggacacccatttccatgcaggctggagagccctcctctggcatcacttcactagatctcctcgacccttttcaacagggtttgtgcttcctcattgtttagtagtggttaagtatgtcatggtgttgaagcagtaatgcaccccaaaacttcttattcaagaaatactgccagaactttgggaggtcaaggcgggtgggtcacttgaggtcaggagtttgagaccagcctggccaacatggtgaaatcccatctctactaaaaatacaaaaattagccagtgtggtgttaggcacctgtaatcccagaattgcttgaacctgggaggcagaggttgcagtgagttgagatcatgccactgcactccagcctgggtgacagagactccgtctcaaaaaaaataaaaaataaaaaataaaaaatactggtctgggagaggtaacccaagctttgtttttttttttgtttttttttttttgtgtgtgtgtgtgtgagggggtgttctgtggggaagaaacccacattcagtggaattttgagaggcaatctttaaacagtagacaagcccagttcaaaactaacagattctttcttttggaaccctaactttccacattttaaagatgtggactttaaaattaaagatgtggacctaattttaaagattaaggactagtgttatttatagggtacttccttagacattttatttttcttcttattcaaagatgcaaatatgttcacaagttttgttaaaacgttcctaatttccagtatggttaacatataaagaagaagtagtgaagtagtctctgtaaggctgttctcttcctgtccaatgctggagcttgaagcccatagggcgggtagtcagaaaagatgtggagttggggagaacaagctgcaacccacaggcatgggctggagcccgtgaggatgctaaaatctgtccgttcttgttgcttctgaccttgatggtgtgggcattctgctgaaactgagacccttcacagaggagctgaaggaagatccatccaggggaaggtggagcggttgcaggcccaggcacaggtgtggttcacaccagcaaggtgtgccagctactcaagggctgctgctgcattgggccctgcagatctggcataggaatttgtggctcatcctaacctgagacatagggaagagagttctgggaaatgtagttcagtctagccaagttgatacatgacaaagctaccagtggctgtcataggatggtgggatttcaggtgatccttagatattacatgttattacctcacaatgagcatgtgttatttatatagtctgaaaaaacagaaagctattttttttgagacggattcttgttctgttgcccaggctggagtgcagtggtgcgatctcggctcactgcaacctctgcctccctcctgggttcaagcgattctcctgcctcagcctcccaagtacctgggattacaggcacgtgccagcacacccagctaatttttgtatttttagcagagatagggtttcaccatgttggccaggctggtctcccaactcctgacctcaggtaatctgccagcctcggggcctcccaaagtgctgggattacaggtgtgagccactatgccgggcccatagagctattttctttggggataaaaatgggagttataagaattggagactcactattaagaataaagagagaaaccatatattttacaggtgaacatcatagcttttatctgaaagaggtataaaaaagatgcccatgttctaattcttcttttgctacctaagagttgttgacattggccccaggccctaaaaagcaatcaagatgcaaaatgaagtactataaggaaaacaaacttcactatcactgtgtatctatcttcagtgcagaaacacaatcttttaagttacaccatccttcacaatctaagaggtgctgctgtagatgatgtaactgacagcaacatcagagttgggctcctagggattctctcccctcagacacccgagtccctttttgtagtgtataaaagatgattatgtgttgacagatcataaacacactgagataaaggagacactaaaaagcacattttaacacttgtgaggtattctaagattcagatttggctttccagaattggaaaattggccttggatggtgcctacagccatgagtctcaaactattttccaagcttggcacacatgacagtttcacctacccaagcacttttccctgggtcttcctgaagttatgccactgacaccctttcccctcaactcatgaaaacacatcagaaggcaagtgagtgagatgacctttagtcagctggaatatagaaaaggcaagctgtgacattaaccattagtaacagtattcgcaatcccacttgagtgttgctacactgtggttaaaaaattgtggtctccagcctggccaacatggtgaaaccctgtctctactaaaaatataaaaaaattagctgggtatggaggcaggtgcctgtaatcccagctacttaggaggctgaggcaggagaattgcttgaacccaggagacagaggtcacagtgagccgatatcatgccactgtactccagcctgggccacagagtgagactccatctcaaacgcaaaaaaaattgtggtctccaaaatagtatggtgtaaaatggttcgttaccatatgcataggggaagacaatgttagaactagttctagatatttctttttatctcatcatttaaaaattagtgttttataacagtaagttatagaaataatattactacatgtgtaaaatatataaatatccatatcaagggcatacctgctaaaacatttcttaactggctagggtgcagaattaaacctttttgaaactaaacctaaaagccaaagcgaaagtcattttcatttaaatgcaaacttcagaaaagaatgaatactcaaaagttttaggagatgaaagagaagagtagttaagaagtttaaaggcccagtgctttttctattaattagtaaaacccacactaaacactactgcaaaagctaaaaataaatgtaaaaaagagaaaggaaacagaagactctattgggatggaatgagaacagcatctttcatccacccatgcatacccacacacaggtaattatgatgtaactccctggaacagttcaagaaaaaaattaacaagatgcacagcctcttggcattctgatgtggttttagcattccgtctcttaaaataaaaagcaattagttatatagttgaccctacagtatttaggaaaacagaagcaacacgtgaggctaaaatcatttaattatacacaggccacaattgcaggatggaaaggcagtgggcacttggaagtgactacacatggcaataagcagcctatcttctttaccaaccagaagtttcttggggcatgtgatggtaggccagaccctttccaagggaataatactacactaagcctacactgtactgtgagagtcatggtggaacaaggccacaggcagtgggaggaaatgtgatgactcactgtgtcagaattctaaggcccagcatgatcaggatgtaaggctccataattttctaaaccagaaattatgagaagaacaaaattctgcaatcacttatgtttttttcttcttttttttttttgagacagagtttcactcttgttgcccaggctggagtgcagtggcacaatctcggctcactgcaacctccgcctcctgggttcaaccaattctcctgccccagcctcctgagtagctgggattacaggcatgtgccaccacgcccagctaattttgtatttttagtagagatggggtttctccatgtttgtcaggctggtctttaactcctgacctcaggtgatccgcctgccttggcctcccaagtgctgggattacaggcgtgagccaccatgcccggctgcaatcacgtatgagtttttctaaaaaaaccgaaacactggaaacatggatgcatcttaaagactttatgctaagtgaaaccagtcacaaaaggacaaatactgtatgattccacttacatgagaaatatgagtagtgaagttgatgatagagacaaaaggtatggctgttgctaggggaaggggaggtggggagttattgttcaatgggcacagaatttgggaagatggaaaacttctggagatggatgatggtgatggctggacaacaatgagaatgtacttaatccactgaattgcatatttaaaaatgggtaagctggtcagttttatgttataaatattttacctcaataaaaacaaattgaacttaaaaattcactgaagaagccaatatggaaaaaggactaaatgttaaaaaaaaaaaagccaactttttttttttaatcaagagataagtacttagctgcaagctcaaggtctcggttgaggacaatcattatgagtcctagtaaaagacaaccagttttaagaacactgtcaggcaagctaccatgtagttctccttgactccatgcttagctctttcagacttcccagtaattacgaagggtcacatttttgttcagctttgcccagtgctgtcattcataatagatgaatgaaaagtcccagaaacctgttctgtttgggaaggttttcttttgttccaggcttcggtggttaatatgcttgacaaatttcagagtctctctgtctctgtagaccaatgccaaagaattgctttctggattcactgttagcagctgaaaaagacaaatacagtgacacatcagaacacagaacttattctcaaatcttggatgattaaccatggaacagatggtttccatatcaagcacttaatctggggatagaggggtcctctgaatgaacacttactaggggtggctgtcaagccattttccaacaagccctattccagcatatacctagaaaggtacttacctattacatttatttcttactacattgtaagatttgtgggaatgcaccacatggctcttaatttggaatttctcaggagggtaaaataaatgcttactgagtatcctttagcatctttattccatcctgagtattttctactagaaattagaaccattgcctggcagagatttattagctaaagacactggtagaaggtcataaaaattgggtctttgaaaaatgaaagcattctcaataactaaaaatgatagtttgctatcagaagaaacttacctcttcatcttcacctttggcaatgtaagaagtaaaaccgccatattctggctcccagccttacaagagaaaaacaaacagcattcagaaagctcctattgaaagagtcgcaccatctacttaaatcactgatcccatgctgcttaacagtgggggatctgggagttcagcagtaactggttctatgacttatgagcttgaacttatcatctagtttatcatggattgccttcccctaaatgcctaatttcctgagacagctgaactgaaatgcagtcttatttcaataaactttgaatatgaaaattaagagagaattaaatgctaaatattcccagaagggcaattacataaaatctatagatctgggagcacacttaggggaaaattatggtgtggtccatctccccatttcctagtcacagatataaatcctattttgagctgggagactggaattcatgacccgtaaaatccctttgactttgagatcccatgatgtgagattctgaactaggcaaattacttatgaattggttcagctggaaagggtccctcagaagagactgcccctcctacggggaataatccaccgcttgctttcctccctcttaccttcacagccacagtacagaattaagtctagggcaaattcagccttgctatggtcatgaattaaagtgtagtgaccggtcttccaatgcctcagttccccttggcacatgggaacacttgattctaaggaaaaaaaaaaagatgagaaactttaaaaaataaccttgatagaactgttggattgcaagggaatcataattaggaatgatacagcaacacagggaaaccattcccacaaacctttgattgaagtgctattctaccaatccagccttataaaagattgttaggaattaccagctctattttggggtaaaaaagttgaattttgggccgggcatggtggctcatgcctgtaatcccaacactttgggaggctgaggtgggcagatcacctgaggtcgggagttcaagaccagcctgaccaacatggagaaaccccatctctactacaaatacaaaattagccaggcgtggtagtgcatgcctgtaatccagctacccgggaggcttaaggcaggagagttgcttgagcccgggtggcagaggttgtggtaagccgagattgtgccattacactccagcctgggcaacaagagtgaaactccatctcaaaaaaaaaaaaaaaaaaaagttgaattttgatttctctctataataataaatttcagatggaaaagaagtctagttgcaaaaaaataaaaaatacgacatgaatattattttatctaaccttaagagatttctcagcatgttattacctaaagtagaaacgaggaaaggcaaagatagacctgattactaaaatattttataaaatttaaaccatgctgaacaaaattaaaaaatgaactattacaatctgttaaacagaaggttagtactcctctgaggcaggcagatcacctgaggtcaggagttcaagaccagcctggccaatatggcaaaaccccgtttctactaaaaatacgaaaatattagctgagcatggtggcgtgtgcctgtaatcccagctacttaggaggctgaggcatgagaatcgcttgaacctgggaggcagaggttgcagtgagctgagatcacaccactgtactccagcctgggtgacagagcgagagtccacctcaaaaaaaaaaagaaggttaatactcctatatgtaactttttaaaattaactaataaaatgacaaaaagcccaaaggaaaaatacactgaggtaatgacaggcaactcatgaaaaaaaaaaatcaagtaaccaatagggaaaaatatacaaccacgcaccattagtcaatgataggcgaatgccatttccacctaaagaataagcaagttggaaaagaaaatataacagtttgctaggaagaatgaaaacatcatcatgtacaatgctggtgggagtgcagactgatacaagttttggggaggcaatttggcaactgccttaaaattttgagcagtctttgatgtatcacctgtacttctgagaagcattctgaagacacaatggatgtgtcgtttattatgacagtgaagaactggaaaaaatctaaatgctcaacacaggactggttaaggtcatctgatccaatagattgcaagcattaaaaagtatactagagaacggtgtttttcaaaacttaattgtggcatacattcttgaaataaaagcttctagaaatgcaatgttggaaagcagatacatgtaaaactgctttggtggccaggcgtggtggctcactcctgtaatcccagcactttgggaggccagggtgggcggatcatgaggtcaagagatggagaccatcctggctaacacggtgaaaccccgtctctactaaaaatacaaaacgttagccgggcgtggtggcatgcgcctgtagtcccagctactcgggaggctgaggcaggagaatcgcttgaacccggaagacggaggtagcagtgagccgagatcatgccactgcacttcagcctggcaacagagcgagactctgtctccaaaccaaaccaaaccaaaccaaaacaaaaaaagcaaaactgctttggtggaaggtttcctaagtgaggagggtgtgcaaacctgttctattgttataaaggatgtaaaaggatcagaaagaggtttatgaaatattaagtggaaaaaatacagaacaatatatatggtataatctcattaaaaatagatgtgtaaaaatataccccccatatgtgtatacatgtatatgtctacatagcaaaaaaacagtggaaggatatattccaaatgctaatatggccacttgtagattattattttcctttttcttgttttctaaacattctgaaattgacgtatttttattttttaaaatcatcttcaagttatcaggtctgtaatgttatctcactagatgtgccctagctatgccaatgtttagcactgctatcatatgcccagcaatttgatagcttttgccaagctttatagcttttcttcaagatggtaaacttcgtaaacagtgacttttctctttcacttttgtattccctactctgctttcacccaaggccccctgtatacagtaggtgctcaacaatggaataaagcatcttttggctgcccatatagattttatcctaagttgcaggttcccgtaaaaatgaaaccaaaaaaggaatagaactggacaagttttggccaggtgtgattggtcacgcttgtaatcactgcactttgggaggacaaggtaggaggattacttgagcctaggggtttgagaccagcctgggcaacatggcaagatcccatctttacaaaaaaaaaaaaatcaagaaaattagttgggtgtggtggcatatgcctgtgatcccagctacttgggatactgaggcagaaggatcgctcgagcctaggaggtcaaggctgcagtgagctgtgattgcaccactgcactccagcctgggtgacagtgcaagaccgtgtctcaaaacaaacaaacaaacaaacaaacagaagtggataagttttttaaaaaatccctttgagacagactccatggatactgactctggttcctcttagggtctaggcataaatgccagtatcaattaacatggaaaactaatctttcaaagaaaggctaccctgtgtattaagatagcacagaaaaagccacctgggtctggttttactaaatatctgcagtggccaaagtgactgttcagtcagttttggaaggccacagaatgagttatgttgctttcagttagcatctcaaaccactgattttgtttccacaagtatccaccccttgtctctgctctcctaactgcacagggttctcaagaaatttgagtggaagcagggaatggtaaactgggtgacagatgttctcactgacatagtagtaagtgctgaaacatctaagctgaatttgttgctactttttaatggtgccaatattttcacaggagtgttacctcttaaattcttaggctgttatattcagatctgagcttaaatggcgctcctcagagagacttttctaaatcatctattcgcctaagaggctactcagtcatttctttttttttttttttctttgagatgtagtctcgctctgttgcccaggctggagtgcaatggtgcaatctcgactcactgcaacctcctcctccccggttcaagtgattcttccacctcagcctcctgagtagcttggattacaggcgttcaccaccatgcctggcaaatttttttttttttttgtatttttagtagagacggggttttgccatgttggtcaggctggtctcgaactcctggcctcaggtgatcagactgcctccgcctccaaaagtgctgggattataggtgtaagccaccgcacctggcctactcagtcatttcttgtcatataaccctattacaatgttttgcatagcacttatcattacttgacgttttcttgttgttcatgtatacatttaatctctgtcttcttctactagaatgtaagctcccaaagaccagagaccttgtctgttttgtccttcagttcctgaaatagggcttagggcacagtagatgctcaataaatgtttgttgaatgaatacatgtttgaatggtgaatggttaatggtaagtaaggacaaatcctaacaacagcttacctttctttgtttcattttcctctggctctgggtctgtctgctcattgctctgttggctgttgttgctgatggccatctgattattctctggctcaggaggactatggctagtcccttcttcagtgatatcagtggtttctgcctcttttttatcattcatctcatcttcttccgaaggggccaagaaatgaagcttcaggcctgtgaagttggagagcagcaagaatagtgcctcagagcgaaataacttcatgcactccttcaatatctcaggaagcttactctcctcagctttctcataaaacctgaaaaacagcaatgtcaagttgttcatcaaagccacagatgtaaaatgactcacagaataaaagctgatcgttagctttgta

SEQ ID NO: 10937 - DNA, 641 bp, Homo sapiens
cttcaagtagaagcggattttcctgtctattttgaggaattacgaaaggtgctagttaaggtggatgaatatcattcagtgcatcagaagctcagtgctgatatggctgatcattctaatttgatccgaagtttgctggtcggagctgaggatgctcgtctgatgagggacatgaaaacaatgaagagtcgttatatggaactctatgaccttaatagagacttgctaaatggatataaaattcgctgtaacaatcacacagagctgttgggaaacctcaaagcagtaaatcaagcaattcaaagagcaggtcgtctgcgggttggaaaaccaaagaaccaggtgatcactgcttgtcgggatgcaattcgaagcaataacatcaacacactgttcaaaatcatgcgagtggggacagcttcttcctaggggccaagaaatgaagcttcaggcctgtgaagttggagagcagcaagaatagtgcctcagagcgaaataacttcatgcactccttcaatatctcaggaagcttactctcctcagctttctcataaaacctgaaaaacagcaatgtcaagttgttcatcaaagccacagatgtaaaatgactcacagaataaaagctgatcgttagctttgta

SEQ ID NO: 10938 - DNA, 10053 bp, Homo sapiens
agcggacgggtctgcgccgccgcaggaggagcaggcggtacctggacgggttcgtcccgggctgtttcgcgtccggcctgaggcggctggggccgcgcaggtagtgtccctgcacttcttgcccgggcgcgtgaggccagctccgctgcgcttgtctccagcttccagccctcctcccctaagccgccgccatcatgctgctgcctgtgttcaccctgaaactgcgccacaaaatcagcccccgaatggtggccatagggcgctacgacgggactcacccgtgcctggcggccgccacccaaacgggcaaggtaaccgctcccacccgcagggagcccgggccccagggaaccacaggatctccgccggccgcgcccctgggatcccgtcccctctccgaccccgcccccagcccgtgttgcccggcaaccggtcggcgagcaccttgtggctccatcctgcagaggacagtggggtcttagaggaagagcttttctgagaagttgacgttttcttgtcatcaggcacttggagtcaggcgaggtcggggtccctggacatagggagcttagaaaagagacgtctcctgagggaaggggtttggttcgggttagcagtaataaccgaccccagattcaagccaggggcctctgcttgtcacttggaactcggaattcctctgactctctaacactgcttcttcttcctttttttttttttttttttgagacggagtcttgccctgtcgcccaggctggagtgcagtggcgcaatctcgggtcgctgcagcctccgcctcccgggttcctgcaattctcctgcctcagcctcccgagtatctgagattacaggcgcccgccaccacgcctggctaatttttgtatttttagtagagacaggatttcaccatgttggccaggctggtctcgaactcctgacctcaagtgatttacctgcctcggcctcccaaagtactaggattacaggcgtgagccactgcacccagcctttcacagtcctttaccgaacaacgacaaaagaatgcaatacaaaaattaacttattcaaattgcacttttgatccttgcccatgtacattcagttctttccccgtaatttattcactaagtattaggtgtttactatgtgcgattactgggcaagatgtgagagtcaaagagataaaagagaaatcatgtaacattcaccagacttctactaaacaccttctgtatagattttggagactcggatgtaaaaggagtccctactttcagaaagcttatagtccagaagctaacagacaaggcaaatcagagccctgtgtatttgacggaggcatgcccaaaatacatggaatgtagtgacaacgctaataacttataacaggcacaaaactttattacatgagtcatctcagcgtcgttgtcacaaggccaacggcagcagcatggcatagggatggtgtttcttggctccagtacctactaatttcatgaccttgggcaaggcacttaataatagtacctaatacgtggggtcatgagctttaaaaaagttaatacatgtaaagtgcttgacatataggaagtggtcactgattgttacctgttattttctttttatggttctcactttattgactagaaattgcagttcagagaggttcaatacagtgcttggagccactcaactagaaagtgtggaatgtggtcagagtgcatgttctctgatccagtgtggatttaataagctaggatttgtgtaacaatttatagtttttaggacacttccatgtatattgtatgttatatgccttgggatacagaagtaaaaaataaggcttcattttcattaagtagtataacagagttaagctattaatacggggtctggcacatcatgatgttagttattgttacagttagaagtcactgacaggctgggtgcagtgactcatgcctgtaatcccagcactttgagaggctgaggcaggcagatcatctgaggtcaggagttcaagaccaacctggccagcatggtgaaaccctgtctctactaaaaatacaaaaattagccaggtgtggtaggtgcctataatactagctactcgggaggttgaggcaggagaatcacctgaacctaggaggtggaggttgcagggagccgagaccgtgccattgcactccagcctgggcgacagagtgagactcggtctcaaaaaaaaaaaaaaaagcactgacaaatgccaaaaagaacttcatgttgcttgtgctgtaggtgcatagcagatttataaatgggctgaaaatatcccattggtattaactcagcccctaatttgagggcttactatgtgctgggcagtcttcttagctctgcaggtgcattggagaatgtgacagacaagtttttgcccccttggagcttacatttgagagggggaaccaggtagttaactgaatatgcaagtgttttcataggagaaaaagaataagggattcagtgtgatgggagcttggtgtcttagacaggtggtcagatggcctctaataacatttgataagaggtttgaaggaactgaggaaacaagctctgcagatttgtgggataagcgccttgcaggcagagggatctgcaggtgcaagggccttgagctggagatatgcatggtgtgtttcaggagcacaaggaagccgctggggctggaaggcaatgagggtggtcatgaggtagacacaagccagatcatataggaacttgtaggccatggcaaagaccttggtttttatactgagtaagttaggaagtccctgaggattttgataaagtgggtgttggaatttgctttatgttttagataaaggctaactggctggtatgtggagaacagatgttctgtgacgggatgtagggaggtaggtgtcggagtagaagcagggagatcgggcagaggtccctagggcagcccttagatagagtgtgacctggagtggaaggcaggaatgcttgattgtagggctgttgtcgaaaatggcctaataataataataataataataaataaaataaaggagatcccttgtcctgtgtaactggatggatactttgtgttcagctctgtaaacaaatctaaaaagttctgacctgatcttttatcttgagaccttaaaaagaattagtagtattttatgactcaagtaatgccatgaatatattttcttaaaagcaattaaaacattccagctagggttaaagcctgcatgtctagaaacaggactttatccttacagctgggaccctgttgtgaacatggagctgactctgagccttagcaaggatatttttttaaaaggaatctctggccgggcatggtggctcaacacctgcaatcccagtactttgggaggctgagaggggcagatcaactgaggttaggagttcgacaccaacctggccgactgaaaccctgtctctactaaaaatacaaaaattagctgggcgtagtggcgcacccctgtaatcccagctactcgggaggctgaggcaggagaatccctaggacccaggaggcagaggttgcagtgagctgagattgcaccactgtactccagcctgggcaatagagcaagactccgtctcaaaaaacatataaataaataaaaggaatctcttgcagggtgaatattagagttttcctctggggacattttttctctcatggtaatgcttaggggtcagttgaatttatattgtttgcagcacctcctcagctagaacaaaagtgtgaacttcagcaagtcctttgaaagccctgggagtggtctttttgtcgtatgactgagattggctttctttccttgcctgaagggacagacttgtctccctgtggactctctttgagtgtagagaacagcaggagggaactgggggaaagtctgactcctgagatccttgttgctcttgacaaaaattgcaaactctttccattccggtaagaatgaatatggagcccgtaagctatttctgctcctgtactttctcagcatattggatttctggaaaactttgtaagaattggtttgttcagaactgttataaaaggaagtgtgatgtggtggtggctggagcgcagggcctggagcacaccaggctcttgtcttagccctgtcaccagtctcaagaccttggcaaagggccttaactcttccgacctcatatggaaatgaagggttggtgtcaggttcaaatgcaattaacattgaccaaggcatgttataaagtgttacacaaacggaacatgaaggcagtgttcagtggctgcacgttttctatgtttttagtcaattcttttgaaaattattttttgttgaataggctgccttgggtaggtgttaatttaaaattaattctgtttggatttatgtgaaagagatgaaatactcatgtaaattttaaaaattttagaactagaaggggctagagggatccctagtccagtgtttttcatcctcccaacctttttggtcatattgcccaccttggaacttttttagaccaagaaaattttcccagtgaaattctgatacctcagatatactttgtatctctttttgtactgtggtcctgcgaagggctacacgattccccatcgcaaacccatttacctgtcctgggagtgatctcgcccctcttaagactgcattttatagtccaaacctcctttttacaggtgaagtctaggaaagttgaataatttatgcagacactcagattatatttatgatagttgaaactgttgaatttattatctttgggctaattacttagttctatgtcactggtataaactgtgaaagccttcaagatacttgatttgcatgactcggtttaagtttgtgaaacaggtttactaactagcagaccattttaaggtctaggaagtgattcattaggtgcttggatgaaagataataaaggaagtgtttattctgttttccatgatcttcttggtgtgtggcaatcacattgaaggtggtagcagcttattctaggttgatcgggaaaaggctagctcctaagagtgctttgacatcctgctggtgggtagcatgtaagctggcctggtaagcagtgactagatcttgttcattaccttgttccttacaaggctaagaaccactggatttccgtgatttcataatgactgaaagttgtccatgcattgaactatgtacgagtgttttaagtttcataggagattaaagtgacctcttgttaatgtggatgtgttaataacctggttcttttttaaaaaaatgtatgatactaattttttatattttaagggaatgtaattagttatttttgtttcaggtttttattcataatcctcatacacggaaccagcatgtcagtgcatccagggtcttccagagccccctggaatctgatgtttctcttctcagcattaaccaggcagtcagctgtctgactgcaggcgtattgaaccctgagcttggctatgatgcccttttagtggggacacagactaatcttttggcttatgatgtctacaataattcggatttgttctacagagaggcaagtataacctttataaccataaaattgtcattactcattaatgtccattttttatgcttagaagagatcagatcatttattttggtctgtttgttgtatgactgttatagtataggtaaacaacatggagattttgctgttaacatctgctttatgtactcggaacttatttatttggttatggttgctaatcgcttggtgacactcgagcttatctctatgaggtatatctgtgatactgccatctgtcaagatctgttgagaattcagccaagagctgggaagccaatagacaggtctcctggtggacttgcattcaagtttagtgcaatagtttgtagaagcccttactgtagcctgccacctacaggctgctgcaactttaatacccaagcaattcatatttgttacagaaaagataaggaagtaaaaagtaaaagaaattacacctattttttcatctagaaagagcacttaactgttgagtttttgaatccagattttttaccaagcatatatgaatacattttgtagtaaaatggggtcatatatacatgtagccttttacttgtttttaccctatagcagctttattaagatatgattcacatgtacaactaacctacttaaagtatacaattcagtggtttttagtgtatccagagagctgtacaaccatcaccatcatcaattttcaacatttttattaccccctaaaaaacccatacccattagtatcactccccatttttctttaacctcctaaccttaggcaaccagttatctactttctgtctctagaagtttgcatattctagacatttcataaacaatggaattatataatatgtaatcatttgtgactgccttctttttcttagcatgatattttcaaggttgatccatgttgtagcatgtgtcagtaattcacttttatggctgaataatattccattgtatgtatataccacattttatttatccatttatcagttaatggacattccactccctggctattatgtgtggctctttcattcaataatatgttgtgaacatctttatatgaagttactacatacccgttatgtcattcttattggttctgtagtatttcattgtgttaatgtaatttgtttaaccgttccatgttgttgaacatttatgttatttccattgtttctgtattacagttcatagtgtaataactgtatctctttgaccacttccctgattatttcctgaggataagttcctgaaaatgcagatggttttctttctttttgtttttgttttctgagacagagtcttgctctgtcacccaggctggagtgcagtggcatgatcatggcttactgcagccttgacctcatgggctcaagcaattctcccacctcagccttctgagtagctgggactacaggtgtgtactaccacacccagctaattgtttattttttagagagatagggtctcactatgttggccaggctggtctcaaactcctgggctaaagcagtcttcctgcctcagcttcccaaagtgttgtaattatagatgtgagccactgcatttggctggttttcttctttgtctattttttgttgaggtaaaatgtacatacatgaaaatgcacagaccttctgtgtacagttcaatgagtttggatccctataaccaataccccaataaaaatagagaacattttcatcacctcagaaaatattgttgtaccccattccagtcaatttctatctcccatagacaatcactgttctgacttctgtcagcttagattagcttttcctgttgttgaactccatacaaatagtgtctggcttctttcacttaacataatacttgtaagaattatccatattgttgcatataaaagtagtcttttgttgttgttgctaagcaacaaaaatagtatattccattgtgtgaatatactatggtttgtttatccactctcttggtgatagacaagtggctggacatttggattgtttcagtttttaacaaccatttttgtttaagacttgtttttaataagacttttttatataagactttttgtagatatatgttttaatttatcttgggtaaatacccaagagtggaattgctgggctatgtggtttataagaactttatgacactgtgaaactgtttttgcaaagtggttgtatcactttatactcctgcctgcagtgtaggagagttccagttgctccacatcctttgtcaacatttgttgttgccagtctttaattttagccattttggaaggtgtgaagtgatatcttaggtgtggtttcattttgcatttccctgataatcattgatgcagagcaccttttcttgtgcataaatggacatttatgtgtcttccgtgaagtgtcttaagtcttttgcctattttttattggtagtttgtctctttattattgatttgtagacatttcttggatatactggatacaaactctttgtcagatttatatataataaatattttctcccagcctgtggcttgttccactaggcatgtgtcttttgatgagcaaaagttttgcatttttgtgaagtccagctgatcacattttttctttagtggttaggactttttctgccctttgcctatttcaaggtcacatcgtttttgttcagaagtgaaatcgagtttaggactgtattagtcagggttctccagagaaacagaaccaataggacatgtacatattagagggggaaatatttattttcaggaattggcttatgcagttgtggagcctggcaagtcaaaaatctgcatggtgggccagcaggctggagatctaggagagaattgatgttgaagctcaagtacaaaggctgtctgctggtagaatcccttcttccttgggggaggtcagtcttttttctattaagtccttcaatacttgatagaaagttcttaatagaaagtattgaaggacttaatagtaaagtagattattatccatatgtgcgtgggccagttaatgtgtgaggcccacccacattatggataataatctgttttactcaaaatctgctcagtttactcaaaatttggcccaattaatatgtgggcctgcatattatcgtgtctaagataatgtgtccttttacttttcttaggtagcagatggggcaaatgcaattgtgctggggacattgggagacatttcttcccctcttgcgattattggtggcaattgtgctctgcaaggtttcaatcatgaaggaagtgatctcttttggacggtatgaagaagaaaacattctttttggtacccttaagcatttttacttttaatgttcttttttaaccaccaactctactgagtaataatatttataattctgtgcattaaaaaaggatatgaataattcgaatagcattcattcgtgttttgtgtaatcctctccttcatgtagctaatatatttggagtaaatggagaaacgatggcatgctaatggtttggggttttattttcaggttactggagacaatgttaattccttggccttgtgtgactttgatggtgatggaaagaaagaggtatgtgggggaggagatatctctcttgtgtgttcagccaaatgaattttgccatgacagtgacattagtgttgacagaagtgtaagcttctcctggctgattttggtgctctgttgcctaaatgctcagccagttggccccattcgtctttctcttctcttttgaacaataaatcacttgtgcttgtgtaataaatacaaagatcaaagccatggtgtttcagagacacaggagagggcagagagggtagaagagttgggatttcagtcatattcacggtcttatgaattgctcctgatgctttgaaaccatattagtatatagttttcaattttggccaactgttttgaggaatctaaatgttttagagattggcttttagcctttgaaattattcttatggttaccctagaaattagcttcttgagcagttagtaggtgtgacgtgctgtgttgggcaccgacttgcccctctcttgtccatggacactggactctggtgtttgaacagggcttccatctgtaggcagagaaagttgctgatccagggagccttttcaggtactcagggaaataacgtattctggcaagatgtgcagctcccatggcaggataaaagctgcagtagcccctgttccttcattgattgaatctgctgatcctcccattagagggagcatttctgagcatcaaacgattatgaggttgtcaatcttgggtggcagaagcagcatgcaaagtactgtgcaattttttgttttgtttacagaaattttgttgtttgcacttactcacctgaacatgtatgatatttccccttcagcttcttgttggatctgaggattttgatatcc

SEQ ID NO: 10939 - DNA, 574 bp, Homo sapiens
agcggacgggtctgcgccgccgcaggaggagcaggcggtacctggacgggttcgtcccgggctgtttcgcgtccggcctgaggcggctggggccgcgcaggtttttattcataatcctcatacacggaaccagcatgtcagtgcatccagggtcttccagagccccctggaatctgatgtttctcttctcagcattaaccaggcagtcagctgtctgactgcaggcgtattgaaccctgagcttggctatgatgcccttttagtggggacacagactaatcttttggcttatgatgtctacaataattcggatttgttctacagagaggtagcagatggggcaaatgcaattgtgctggggacattgggagacatttcttcccctcttgcgattattggtggcaattgtgctctgcaaggtttcaatcatgaaggaagtgatctcttttggacggtatgaagaagaaaacattctttttggttactggagacaatgttaattccttggccttgtgtgactttgatggtgatggaaagaaagagcttcttgttggatctgaggattttgatatcc

SEQ ID NO: 10940 - DNA, 6073 bp, Homo sapiens
cgccgaggctccaccgcgcagccgcaaaaagagcggacgggtctgcgccgccgcaggaggagcaggcggtacctggacgggttcgtcccgggctgtttcgcgtccggcctgaggcggctggggccgcgcaggtttttattcataatcctcatacacggaaccagcatgtcagtgcatccagggtcttccagagccccctggaatctgatgtttctcttctcagcattaaccaggcagtcagctgtctgactgcaggcgtattgaaccctgagcttggctatgatgcccttttagtggggacacagactaatcttttggcttatgatgtctacaataattcggatttgttctacagagaggtagcagatggggcaaatgcaattgtgctggggacattgggagacatttcttcccctcttgcgattattggtggcaattgtgctctgcaaggtttcaatcatgaaggaagtgatctcttttggacggttactggagacaatgttaattccttggccttgtgtgactttgatggtgatggaaagaaagagcttcttgttggatctgaggattttgatatccgagtttttaaggaagatgagattgtggcagaaatgacagaaacagagatagtcacctctctttgtcccatgtatggcagtcgatttggttatgccctttccaatggcacagttggagtttatgacaaaacatcccgatactggagaattaaatcgaaaaatcatgccatgagcattcatgcttttgaccttaattctgatggagtgaatgaactgataactggttggtccaatgggaaggttgatgctcgaagtgaccgaactggggaggtcatctttaaggacaatttttcttctgcaattgccggtgtggtagagggagattaccggatggatggccacatacagttaatctgctgctcagtggatggggaaagtaaattgggatgagaaaaatccttaaaaagtcacgttttccatttgattgggtcaaaatatcaggaaatttcacctgaagtatttgtaccgagatcctgtagttctaataaattcaccaaagttggggagaacttaggtttttgtttttaagagcaggtaattgatgacctaaaagtatacctggttatacttgcggttttttccttctgttcagtccggggctacctgcctggcacggctgagatgaggggcaacctcatggacaccagtgcagagcaggacctgatccgagagctgagtcagaagaagcagaatctgttgctggaactccgtaactatgaggaaaatgccaaggtaggtgtaggtcctaatgtgaccaggtaatggaggctgaaatgttgagactgaccgggaggatcagcaaatatggaagaatgagagtgtcattgccagggtgtggcctttttgccattgtcagaattgagaggggatatatgctttcgtcttgaaatttcatttccaggtagttaaactgtagaaatgttttcctgattgtttaaggacatttcctgcagcactatttatttatagcagtgaaaacagctggaagaaacttagatgttcgtcagcagtagggagtatgtgctaaggaatattaagcagctcaaagaatgaatacttggactgatatggaaggatatctgtcgtcttaccaagtgacaaaaggcaagaacaatatagaatgtcttttatctttttcaaaaacaaacatgttaaaaacagacaactgtaaaaactgtgtgtgtgcatacagcaaactggctgaaatattcctttaatttgtcctgtaatgcattactgtatttgaatttgatgtaacaagggaatttgtttgcttactttaaaagaacaatacttcaaaaatgttaaagtcatgatgggatacagtggaccatacccatagaaagatgcaagggtattttcccacagggccagatagagcaagggagcactaatgaggtgagttctctgaattctaaagaatcagattactataataataataatatgctggaggctctgtcttttgaagctgaatagcaatattatttaaaattgatattagttcagtgttttggtgactgagtaggaaatgggtggggtgttttgcaggctgaattggccagtccactgaacgaggctgatgggcatcggggcataatcccagccaataccaggctccacaccacgctctcagtcagcctggggaatgagacccaaactgctcatacagaattacgcatttccacttctaatggtaagacagtactcacagctggtatttagaggcacctgtgccatcttggagtcattcttttttttttttttgagacagagtcttcctctgtcttggctcactgcaagctctgcctcccgggttcatgccattctcctgtctcagcctcccaagtagctgggactacaggcgcccaccaccacgcccagctaattttttgtatttttagtagagatagggtttcaccgtgttagccaagatggtctcgacctcctgacctcgtgatctgcccacctcagcttcccaaagttggagttgttcttaaactgtttttactcttccctgcagacaccatcatccgagcagtattgatttttgcagaaggaatttttacaggtgaaagccacgtggtacatcccagcattcacaacctctccagttccatctgcatccctattgtgcctcccaaagatgtccctgtggatctgcacttgaaggcattcgtgggttacagaagcaggtgaccctttgcaagtcacagttcatttcaggacagcacttagaggagggcaagatgtataaattttccatatgcccagtggattcttgggggcctgagaaaccatttaatggttctgtctacccaaagtttctcatgaccttttatttcctcagtttgaaacctgtaaaaagaaaatggaaaaactgatatgtaagtttaagatggttctttttttttttttttttttgagacagattctagctttgtcacccaggctggagtacagtggggcaatctcagttcactgcaacctctacctcctgggttcaagcaattcttctgcctcagcctcctgagtactgggaccacaggtgcccaccaccacgcccagctaatttttgtatttttagtagagacaggagttcaccatgttggccaggctggtcttgaactcctgacctcaggtgatccacccgccttggcttccgaaagtgctgggattacaggcatgagccaccacgcctggctaagatcattattttctgtttttagtcaggtgatctcataatcaaaaaatgtttaattgatgatttgtcaatttgtagttttggccactaaaactacaagagttaggatgcacctttatattacagtcatacataacctcagctagtgaagaaaaactgctctatttgtggaagataagatactttttacatcccctttatgatattttaaacccttagtgcatgcaggtatatatgtagactcatgctgtctttaaatcccaaacctaatatattactgtagtactttaaccctcaagtgttttgggggttccttcttaagtgaaacccttaaatatcaattgatgacccagaagtggctttattttctgggccttgcattttgaaagaacattctatacaaaacaattctcttgtgtttcattgattggccatagcacccagtttcatgtatttgaatcgacaagacagctccctcgattctccatgtatgcgctgaccagcctggaccctgccagtgagccaatcagttatgttaactttaccattgcagaacgggcacagagggtgagtatctcgcttttctctttcaatgcttttacacagtagaatcctttagatgttatttcatagaaagggaaaattacattaatgtgttatattggtagcagtaaatatgatatgaaagaattctctaacttgggggtggcttgtaacctgtaataaaaatattgctaaaataccttctctcactttgaaaaagcatctgagcaatcctcagttattggtgaattcttaccagtgtttaattcctctctttccgttatggtcttagtgtggttgtcctggtgtagtatttcaagaggaacctgcagcaagatgaaaagagagtgggacttggagctaagaacgtttttggctttaagtgctacgttaactcattaaattcttagtgatcttggggaagtcccctcaccagtgtgagcctcagttttcttatctaataagtaaggataatcttacccaccttattgcgggggcccgaggattacatgattggtgtaacagtagcaccttgtacatttgaaaggactaataccagtggactttaaccttggctgggctttggaattcttggtgggactttttaatcatgtagattctcaggcccctgcctggcctgtggaaccacagactctataggtgggcccttccagaaggcctcatgggtggttctcatgtggaacctgtgttgcaagccactgcatggtgttactgctattaacattaaaacttatattttccttattgtgtggatatatctgtggtgtttgcccatgtatacttcattttacatttcttaaagaatagaatggaatggttttaagcacgctacattgtccaggttatacccacagaagagctgttgtgtaacagaatcagcatcatacctgaatcatttgtacattgcatataagactatgtctaagtagaagatgctatgaaatcatgtctgctgtggggccaggcataattatgaatgttacttaagagcataggtgaggtgagaaaagggaatgtgactagtgttttagtattttcttggtgtgggatgaagtataattcttttttttttttctcaacaaagcagtaaaactagaaagaaggagaactcttccctcaagaatggctgtaccttcatatctagaggcacattaaaaaaaagaacgtctgtaccttaaaaatggaggtcatttcattgtgttcattttcaaggttgttgtatggctcggtcagaactttctgttaccagaagacactcacattcagaatgctccatttcaagtgtgtttcacatctttacggaatggcggccacctgcatataaaaataaaacttagtggagagatcactataaatactgatgatattgatttggctggtgatatcatccagtcaatggcatcattttttgctattgaagaccttcaagtagaagcggattttcctgtctattttgaggaattacgaaaggtgctagttaaggtggatgaatatcattcagtgcatcagaagctcagtgctgatatggctgatcattctaatttgatccgaagtttgctggtcggagctgaggatgctcgtctgatgagggacatgaaaacaatgaagagtcgttatatggaactctatgaccttaatagagacttgctaaatggatataaaattcgctgtaacaatcacacagagctgttgggaaacctcaaagcagtaaatcaagcaattcaaagagcaggtcgtctgcgggttggaaaaccaaagaaccaggtgatcactgcttgtcgggatgcaattcgaagcaataacatcaacacactgttcaaaatcatgcgagtggggacagcttcttcctaggtgaggaaaatacaggtcatgaagttcctggcaaagattttctgttaaaaacctatgctggtttgctttggatcacaccctggtgaaccccgggtgctaagaatgaaaataaccttggtgagttgtacaaattaaagacaaagaactacatgtgaagatagacttgctttctatttttaaatcagtagtagtactgttgctgaataatactaggtttttatggaataggatgaatgcttttgaagtattagggcttcagagtccaattttgcttatttatggtatataaatacatatttttttcttgaaattgcaattgagtttgtacttttcaaatagattatctactttttcattaaaatgtaaagatgttaaa

SEQ ID NO: 10941 - DNA, 3990 bp, Homo sapiens
cagaaacagaggtaagaagctccacctcgaactatggtaaccttgagcaagatagatcagtactgtcagatgaaacatcaagtgagagtgctggggcatctccaaacccaggtggttttaggataaaagcttggggagggggtcagacagagctgtatgttatggtaagaaaagcaataaaaatcctaattaagatatattttgaaaagactgattaaatagagaaaaattattgcatatagttgaatacataaaggcatttcttttaatgagttaatacatgcaaataataataatggcaatcatttattatgtacctattgtatgccaggtagtgctctaagtactttatatgaagtaacatattgaatccttacaacaaccctaataggaagataaattattattatttctatagatgaggaaaatggtgttctggttttttgtttgtttgtttgtttgttttgaggcagagttttactccatcacccaggctggagtgcggtggtgcgatctcggcttactgcaagctccacctcccaagttcaagtgattcgcatgcctcagcctcctgagtagctgggactacaggcacgcaccaccacgcctgggtaatttttgtgtttttaatagagacggggtttcaccatgttggccaggctggtgttgaactccagacctcaagtgatccgcccaccttggcctcccaaagtgttgggattacaggggtgacccaccgcgcctgtattttttgttaagttacttgtacgtagtcttggctatgaaatggcatggtcagcatttgaacctttatgccccttcctcctcatcatgtgtattcagtagggctgaagtgcataaatgagatgtctatatttttttcttcctgcaaattcagtacttctttggcacatttctgtaggtaaacttaaaaattatagaacttgtgattagaatcactcatgtaactgaacctgagatatttcttaatatcccaggttgtttaggcctgatgtttaggcctggtgcagtggctcatgcctgtaatcccagtgctttgggaggccaaggtgggaggatcacttgaggccaggagtttgagacccgcctgggcaacataacaagactccatctctacaaaaaatattaaaaaattagccagaaggtgatggcacacgtctgtagtcccagctgcttgggagactgaggcaggaggatcccttgagcccaggagcttgaggctacagtgagctatgatcacgccactgcattccacccaggggcaacgagaacaagactctgtctcaaaaataaaatttttaagaagtaacagtgttaagagttaggaaaataaagacaaaaataaagcaaaaagcactatctaaagattacctgtatcctttatggttttgacattcttaggatatttatttgctgctggttttccaggattgggcaagactcaaacagaaaaaaataagatattcttaattaaggaataagaggataaaggagcaatagcttgtgaacgttgtaagtggacagaaagaaaccagtaaaagagagtcttagagatcagaatggtgggattttgcaaaatttagttatgtggtatttaggagtctgtatcagaaaagctcgagggcactagtctcaaaactgaccttggccacttgtctttaaattacttgcttcatgtcactcataaaagctgcctaagaaggtcagacttcttttctcctaactataaaaggagacaaaaagcaaaacctacacattgacatacagtgctaccaatgattttaactaagttatcctatagcaagagtcatcagtttttatttagtcctactatactttttatatattcacagttatcatgatgtaagatgatagttgtggacagagaagaaatgaagaggagaaatgggtgccaaaaggagcagtctgaggatgtgtgtttatacagggagtctgttttttattttattatttttttgagatggagtttcgctcttgtcgcccatgctggagtgcagtggcgtgatcttggctcactgcaacctccgcctcccaggttcaagtgattctcctgcctcagcctcccgagtagctgggattacaggcacctgccaccgcgcccagctaatttttgtatttttagtagagatggggtttcgtcatgttggccagactggtcttgaactcctgacctcaggtgatccacccgcctcagcctcccaaagtgttgggattacaggcatgagccaccatgcctggcccgggagtctgttttgtgtgtatgtgcttatatgtgctttctgaagagagggcccggagccttcattacattcttaaaggggtttgcaacctcccccaccaccaaaaaaaaacaacttgagaatccctggctgatagatggtgtgtcccgaattctcatatccctttcattctaatttgtggtaaatcttttctcctttggtgggaatcattcagattttgttggatttttattgcttgttaatattagatttgaggagactgaattctttgaaacatctctttcctaaatcctagaaaagaggacaagaacctggaatagagttagggatttgaggggacttgttgatcttctagtccacaaaaggaagaaactggtgaactaaggaagcagtaaaagagctgaggaatctggggctaaatttatgaaaatatggacttcataacattgttcacttgcagggccattttcctgttctctttgttaggttttgctcctagctcaaatatcatttcccagatcagcaaaatcatgattcatttggcagttgaacagtatgaagtattgtcagaagaatgccttgagctaaataattctggaatcctacacagcactttgtattcatagttaagtgaagtgggtggttttgtagaaaagctgtaggtgtaaaggaaattatataactattctctgctttatacaatttatttcttaatatctcttgtattaggaacagaattagaaagtagatctgcaggatcatggatatcattaagctttggttttaactttaaaggaaagttttgttcagtacctaaaattttatccttttaaggatgtcaaatccttgaacagtcctataaatatttctgtatcatatatgcattctgtatattgttatatactacacaaatccacgtgcctgggtttttacttttcaaaggattatgtgttctttcttttacctctagcaaacaaattatgtcatagaaagaaaagtgtatacatgaagtaagatattcaattgtgtattgttataagtcttttaaaaattgagactgtaggatgttataagttaagtaataatcattaaagcctcttgggtgaacatatataatatctattgtatatgcatattttcgatcttgtgtagttagcttatgttttccttagtccttcagttttcatgtgttttttaaaaataattttgtgaaacttgccacataaggttgctctaaaacaccaaaccctgtgagtttatttaaatctgattatacaactctgaagtagatgacatgtatcgtagagaagaggaatacattccccactaatggattggaagcgcttttaaatctaattttaacatagttgtaacaaggagtgtgaagtcttataaagccgtacttgacagtaaactgagtcttaatgaaaagatgttgtgtttttgtggattgttttgcagatagtcacctctctttgtcccatgtatggcagtcgatttggttatgccctttccaatggcacagttggagtttatgacaaaacatcccgatactggagaattaaagttagtataatttagcctttgatattcaggcgcttgatagttattgtgagacttctgtgctaattattaaaattctttttcagtcgaaaaatcatgccatgagcattcatgcttttgaccttaattctgatggagtgaatga

SEQ ID NO: 10942 - DNA, 775 bp, Homo sapiens
cagaaacagaggtaagaagctccacctcgaactatggtaaccttgagcaagatagatcagtactgtcagatgaaacatcaagtgagagtgctggggcatctccaaacccaggtggttttaggataaaagcttggggagggggtcagacagagctgtatgttatggtaagaaaagcaataaaaatcctaattaagatatattttgaaaagactgattaaatagagaaaaattattgcatatagttgaatacataaaggcatttcttttaatgagttaatacatgcaaataataataatggcaatcatttattatgtacctattgtatgccaggtagtgctctaagtactttatatgaagtaacatattgaatccttacaacaaccctaataggaagataaattattattatttctatagatgaggaaaatggtgttctggttttttgtttgtttgtttgtttgttttgaggcagagttttactccatcacccaggctggagtgcggtggtgcgatctcggcttactgcaagctccacctcccaagttcaagtgattcgcatgcctcagcctcctgagtagctgggactacaggcacgcaccaccacgcctggatagtcacctctctttgtcccatgtatggcagtcgatttggttatgccctttccaatggcacagttggagtttatgacaaaacatcccgatactggagaattaaatcgaaaaatcatgccatgagcattcatgcttttgaccttaattctgatggagtgaatga

SEQ ID NO: 10943 - DNA, 1391 bp, Homo sapiens
caccacgcccagctaattttttgtatttttagtagagatagggtttcaccgtgttagccaagatggtctcgacctcctgacctcgtgatctgcccacctcagcttcccaaagttggagttgttcttaaactgtttttactcttccctgcagacaccatcatccgagcagtattgatttttgcagaaggaatttttacaggtgaaagccacgtggtacatcccagcattcacaacctctccagttccatctgcatccctattgtgcctcccaaagatgtccctgtggatctgcacttgaaggcattcgtgggttacagaagcaggtgaccctttgcaagtcacagttcatttcaggacagcacttagaggagggcaagatgtataaattttccatatgcccagtggattcttgggggcctgagaaaccatttaatggttctgtctacccaaagtttctcatgaccttttatttcctcagtttgaaacctgtaaaaagaaaatggaaaaactgatatgtaagtttaagatggttctttttttttttttttttttgagacagattctagctttgtcacccaggctggagtacagtggggcaatctcagttcactgcaacctctacctcctgggttcaagcaattcttctgcctcagcctcctgagtactgggaccacaggtgcccaccaccacgcccagctaatttttgtatttttagtagagacaggagttcaccatgttggccaggctggtcttgaactcctgacctcaggtgatccacccgccttggcttccgaaagtgctgggattacaggcatgagccaccacgcctggctaagatcattattttctgtttttagtcaggtgatctcataatcaaaaaatgtttaattgatgatttgtcaatttgtagttttggccactaaaactacaagagttaggatgcacctttatattacagtcatacataacctcagctagtgaagaaaaactgctctatttgtggaagataagatactttttacatcccctttatgatattttaaacccttagtgcatgcaggtatatatgtagactcatgctgtctttaaatcccaaacctaatatattactgtagtactttaaccctcaagtgttttgggggttccttcttaagtgaaacccttaaatatcaattgatgacccagaagtggctttattttctgggccttgcattttgaaagaacattctatacaaaacaattctcttgtgtttcattgattggccatagcacccagtttcatgtatttgaatcgacaagacagctccctcgattctccatgtatgcgctgaccagcctggaccctgccagtgagccaatcagttatgttaactttaccattgcagaacggg

SEQ ID NO: 10944 - DNA, 445 bp, Homo sapiens
caccacgcccagctaattttttgtatttttagtagagatagggtttcaccgtgttagccaagatggtctcgacctcctgacctcgtgatctgcccacctcagcttcccaaagttggagttgttcttaaactgtttttactcttccctgcagacaccatcatccgagcagtattgatttttgcagaaggaatttttacaggtgaaagccacgtggtacatcccagcattcacaacctctccagttccatctgcatccctattgtgcctcccaaagatgtccctgtggatctgcacttgaaggcattcgtgggttacagaagcagcacccagtttcatgtatttgaatcgacaagacagctccctcgattctccatgtatgcgctgaccagcctggaccctgccagtgagccaatcagttatgttaactttaccattgcagaacggg

SEQ ID NO: 10945 - DNA, 1434 bp, Homo sapiens
cattgattggccatagcacccagtttcatgtatttgaatcgacaagacagctccctcgattctccatgtatgcgctgaccagcctggaccctgccagtgagccaatcagttatgttaactttaccattgcagaacgggcacagagggtgagtatctcgcttttctctttcaatgcttttacacagtagaatcctttagatgttatttcatagaaagggaaaattacattaatgtgttatattggtagcagtaaatatgatatgaaagaattctctaacttgggggtggcttgtaacctgtaataaaaatattgctaaaataccttctctcactttgaaaaagcatctgagcaatcctcagttattggtgaattcttaccagtgtttaattcctctctttccgttatggtcttagtgtggttgtcctggtgtagtatttcaagaggaacctgcagcaagatgaaaagagagtgggacttggagctaagaacgtttttggctttaagtgctacgttaactcattaaattcttagtgatcttggggaagtcccctcaccagtgtgagcctcagttttcttatctaataagtaaggataatcttacccaccttattgcgggggcccgaggattacatgattggtgtaacagtagcaccttgtacatttgaaaggactaataccagtggactttaaccttggctgggctttggaattcttggtgggactttttaatcatgtagattctcaggcccctgcctggcctgtggaaccacagactctataggtgggcccttccagaaggcctcatgggtggttctcatgtggaacctgtgttgcaagccactgcatggtgttactgctattaacattaaaacttatattttccttattgtgtggatatatctgtggtgtttgcccatgtatacttcattttacatttcttaaagaatagaatggaatggttttaagcacgctacattgtccaggttatacccacagaagagctgttgtgtaacagaatcagcatcatacctgaatcatttgtacattgcatataagactatgtctaagtagaagatgctatgaaatcatgtctgctgtggggccaggcataattatgaatgttacttaagagcataggtgaggtgagaaaagggaatgtgactagtgttttagtattttcttggtgtgggatgaagtataattcttttttttttttctcaacaaagcagtaaaactagaaagaaggagaactcttccctcaagaatggctgtaccttcatatctagaggcacattaaaaaaaagaacgtctgtaccttaaaaatggaggtcatttcattgtgttcattttcaaggttgttgtatggctcggtcagaactttctgttaccagaagacactcacattcagaatgctccatttcaagtgtgtttca

SEQ ID NO: 10946 - DNA, 350 bp, Homo sapiens
cattgattggccatagcacccagtttcatgtatttgaatcgacaagacagctccctcgattctccatgtatgcgctgaccagcctggaccctgccagtgagccaatcagttatgttaactttaccattgcagaacgggcacagaggtaaaactagaaagaaggagaactcttccctcaagaatggctgtaccttcatatctagaggcacattaaaaaaaagaacgtctgtaccttaaaaatggaggtcatttcattgtgttcattttcaaggttgttgtatggctcggtcagaactttctgttaccagaagacactcacattcagaatgctccatttcaagtgtgtttca

SEQ ID NO: 10947 - DNA, 1245 bp, Homo sapiens
aacctctccagttccatctgcatccctattgtgcctcccaaagatgtccctgtggatctgcacttgaaggcattcgtgggttacagaagcaggtgaccctttgcaagtcacagttcatttcaggacagcacttagaggagggcaagatgtataaattttccatatgcccagtggattcttgggggcctgagaaaccatttaatggttctgtctacccaaagtttctcatgaccttttatttcctcagtttgaaacctgtaaaaagaaaatggaaaaactgatatgtaagtttaagatggttctttttttttttttttttttgagacagattctagctttgtcacccaggctggagtacagtggggcaatctcagttcactgcaacctctacctcctgggttcaagcaattcttctgcctcagcctcctgagtactgggaccacaggtgcccaccaccacgcccagctaatttttgtatttttagtagagacaggagttcaccatgttggccaggctggtcttgaactcctgacctcaggtgatccacccgccttggcttccgaaagtgctgggattacaggcatgagccaccacgcctggctaagatcattattttctgtttttagtcaggtgatctcataatcaaaaaatgtttaattgatgatttgtcaatttgtagttttggccactaaaactacaagagttaggatgcacctttatattacagtcatacataacctcagctagtgaagaaaaactgctctatttgtggaagataagatactttttacatcccctttatgatattttaaacccttagtgcatgcaggtatatatgtagactcatgctgtctttaaatcccaaacctaatatattactgtagtactttaaccctcaagtgttttgggggttccttcttaagtgaaacccttaaatatcaattgatgacccagaagtggctttattttctgggccttgcattttgaaagaacattctatacaaaacaattctcttgtgtttcattgattggccatagcacccagtttcatgtatttgaatcgacaagacagctccctcgattctccatgtatgcgctgaccagcctggaccctgccagtgagccaatcagttatgttaactttaccattgcagaacgggcacagagggtgagtatctcgcttttctctttcaatgcttttacacagtagaatcctttagatgttatttcatagaaagggaaaat

SEQ ID NO: 10948 - DNA, 299 bp, Homo sapiens
aacctctccagttccatctgcatccctattgtgcctcccaaagatgtccctgtggatctgcacttgaaggcattcgtgggttacagaagcagcacccagtttcatgtatttgaatcgacaagacagctccctcgattctccatgtatgcgctgaccagcctggaccctgccagtgagccaatcagttatgttaactttaccattgcagaacgggcacagagggtgagtatctcgcttttctctttcaatgcttttacacagtagaatcctttagatgttatttcatagaaagggaaaat

SEQ ID NO: 10949 - DNA, 3852 bp, Homo sapiens
ggctctgtcttttgaagctgaatagcaatattatttaaaattgatattagttcagtgttttggtgactgagtaggaaatgggtggggtgttttgcaggctgaattggccagtccactgaacgaggctgatgggcatcggggcataatcccagccaataccaggctccacaccacgctctcagtcagcctggggaatgagacccaaactgctcatacagaattacgcatttccacttctaatggtaagacagtactcacagctggtatttagaggcacctgtgccatcttggagtcattcttttttttttttttgagacagagtcttcctctgtcttggctcactgcaagctctgcctcccgggttcatgccattctcctgtctcagcctcccaagtagctgggactacaggcgcccaccaccacgcccagctaattttttgtatttttagtagagatagggtttcaccgtgttagccaagatggtctcgacctcctgacctcgtgatctgcccacctcagcttcccaaagttggagttgttcttaaactgtttttactcttccctgcagacaccatcatccgagcagtattgatttttgcagaaggaatttttacaggtgaaagccacgtggtacatcccagcattcacaacctctccagttccatctgcatccctattgtgcctcccaaagatgtccctgtggatctgcacttgaaggcattcgtgggttacagaagcaggtgaccctttgcaagtcacagttcatttcaggacagcacttagaggagggcaagatgtataaattttccatatgcccagtggattcttgggggcctgagaaaccatttaatggttctgtctacccaaagtttctcatgaccttttatttcctcagtttgaaacctgtaaaaagaaaatggaaaaactgatatgtaagtttaagatggttctttttttttttttttttttgagacagattctagctttgtcacccaggctggagtacagtggggcaatctcagttcactgcaacctctacctcctgggttcaagcaattcttctgcctcagcctcctgagtactgggaccacaggtgcccaccaccacgcccagctaatttttgtatttttagtagagacaggagttcaccatgttggccaggctggtcttgaactcctgacctcaggtgatccacccgccttggcttccgaaagtgctgggattacaggcatgagccaccacgcctggctaagatcattattttctgtttttagtcaggtgatctcataatcaaaaaatgtttaattgatgatttgtcaatttgtagttttggccactaaaactacaagagttaggatgcacctttatattacagtcatacataacctcagctagtgaagaaaaactgctctatttgtggaagataagatactttttacatcccctttatgatattttaaacccttagtgcatgcaggtatatatgtagactcatgctgtctttaaatcccaaacctaatatattactgtagtactttaaccctcaagtgttttgggggttccttcttaagtgaaacccttaaatatcaattgatgacccagaagtggctttattttctgggccttgcattttgaaagaacattctatacaaaacaattctcttgtgtttcattgattggccatagcacccagtttcatgtatttgaatcgacaagacagctccctcgattctccatgtatgcgctgaccagcctggaccctgccagtgagccaatcagttatgttaactttaccattgcagaacgggcacagagggtgagtatctcgcttttctctttcaatgcttttacacagtagaatcctttagatgttatttcatagaaagggaaaattacattaatgtgttatattggtagcagtaaatatgatatgaaagaattctctaacttgggggtggcttgtaacctgtaataaaaatattgctaaaataccttctctcactttgaaaaagcatctgagcaatcctcagttattggtgaattcttaccagtgtttaattcctctctttccgttatggtcttagtgtggttgtcctggtgtagtatttcaagaggaacctgcagcaagatgaaaagagagtgggacttggagctaagaacgtttttggctttaagtgctacgttaactcattaaattcttagtgatcttggggaagtcccctcaccagtgtgagcctcagttttcttatctaataagtaaggataatcttacccaccttattgcgggggcccgaggattacatgattggtgtaacagtagcaccttgtacatttgaaaggactaataccagtggactttaaccttggctgggctttggaattcttggtgggactttttaatcatgtagattctcaggcccctgcctggcctgtggaaccacagactctataggtgggcccttccagaaggcctcatgggtggttctcatgtggaacctgtgttgcaagccactgcatggtgttactgctattaacattaaaacttatattttccttattgtgtggatatatctgtggtgtttgcccatgtatacttcattttacatttcttaaagaatagaatggaatggttttaagcacgctacattgtccaggttatacccacagaagagctgttgtgtaacagaatcagcatcatacctgaatcatttgtacattgcatataagactatgtctaagtagaagatgctatgaaatcatgtctgctgtggggccaggcataattatgaatgttacttaagagcataggtgaggtgagaaaagggaatgtgactagtgttttagtattttcttggtgtgggatgaagtataattcttttttttttttctcaacaaagcagtaaaactagaaagaaggagaactcttccctcaagaatggctgtaccttcatatctagaggcacattaaaaaaaagaacgtctgtaccttaaaaatggaggtcatttcattgtgttcattttcaaggttgttgtatggctcggtcagaactttctgttaccagaagacactcacattcagaatgctccatttcaagtgtgtttcacatctttacggaatggcggccacctgcatataaaaataaaacttagtggagaggtaatgtttaatatcacggggcatagatttcttttttgaatttatttattcaaacacttagaccatggaatgagaggggcatagatttctcatgtggtgtttaccattcagtccaaagtgaggtgggggacatcaatgtcaaggtcataaaaccacgttttgttttatttttttcacatggtttaacttagtctgttagtgttaccattttagacactggggtataatttggaatagctgttttctgcctccttcccttcatctcttccttgtctaatttggaaagaattgggaatacagaggtcaacaaaaacattttcaatgtttggatgattttgtcatttaatttctaaggccagaggatttaccttttagctagctgctggaaataatgcagtttgtaatttctttgagagctaaactttcctttttcaacactgcatatatatatatatgcacaataattttgttgagtatggggaaattcaggtactattttagctaagtttgtctaacatctgaggatgctaaacttgtctattttttctctgggtagatcactataaatactgatgatattgatttggctggtgatatcatccagtcaatggcatcattttttgctattgaagaccttcaagtagaagcggattttcctgtctattttgaggaattacgaaaggtgctagttaag

SEQ ID NO: 10950 - DNA, 766 bp, Homo sapiens
ggctctgtcttttgaagctgaatagcaatattatttaaaattgatattagttcagtgttttggtgactgagtaggaaatgggtggggtgttttgcaggctgaattggccagtccactgaacgaggctgatgggcatcggggcataatcccagccaataccaggctccacaccacgctctcagtcagcctggggaatgagacccaaactgctcatacagaattacgcatttccacttctaatggtgaaagccacgtggtacatcccagcattcacaacctctccagttccatctgcatccctattgtgcctcccaaagatgtccctgtggatctgcacttgaaggcattcgtgggttacagaagcagcacccagtttcatgtatttgaatcgacaagacagctccctcgattctccatgtatgcgctgaccagcctggaccctgccagtgagccaatcagttatgttaactttaccattgcagaacgggcacagagggttgttgtatggctcggtcagaactttctgttaccagaagacactcacattcagaatgctccatttcaagtgtgtttcacatctttacggaatggcggccacctgcatataaaaataaaacttagtggagagatcactataaatactgatgatattgatttggctggtgatatcatccagtcaatggcatcattttttgctattgaagaccttcaagtagaagcggattttcctgtctattttgaggaattacgaaaggtgctagttaag

SEQ ID NO: 10951 - DNA, 9640 bp, Homo sapiens
ggcgagcaccttgtggctccatcctgcagaggacagtggggtcttagaggaagagcttttctgagaagttgacgttttcttgtcatcaggcacttggagtcaggcgaggtcggggtccctggacatagggagcttagaaaagagacgtctcctgagggaaggggtttggttcgggttagcagtaataaccgaccccagattcaagccaggggcctctgcttgtcacttggaactcggaattcctctgactctctaacactgcttcttcttcctttttttttttttttttttgagacggagtcttgccctgtcgcccaggctggagtgcagtggcgcaatctcgggtcgctgcagcctccgcctcccgggttcctgcaattctcctgcctcagcctcccgagtatctgagattacaggcgcccgccaccacgcctggctaatttttgtatttttagtagagacaggatttcaccatgttggccaggctggtctcgaactcctgacctcaagtgatttacctgcctcggcctcccaaagtactaggattacaggcgtgagccactgcacccagcctttcacagtcctttaccgaacaacgacaaaagaatgcaatacaaaaattaacttattcaaattgcacttttgatccttgcccatgtacattcagttctttccccgtaatttattcactaagtattaggtgtttactatgtgcgattactgggcaagatgtgagagtcaaagagataaaagagaaatcatgtaacattcaccagacttctactaaacaccttctgtatagattttggagactcggatgtaaaaggagtccctactttcagaaagcttatagtccagaagctaacagacaaggcaaatcagagccctgtgtatttgacggaggcatgcccaaaatacatggaatgtagtgacaacgctaataacttataacaggcacaaaactttattacatgagtcatctcagcgtcgttgtcacaaggccaacggcagcagcatggcatagggatggtgtttcttggctccagtacctactaatttcatgaccttgggcaaggcacttaataatagtacctaatacgtggggtcatgagctttaaaaaagttaatacatgtaaagtgcttgacatataggaagtggtcactgattgttacctgttattttctttttatggttctcactttattgactagaaattgcagttcagagaggttcaatacagtgcttggagccactcaactagaaagtgtggaatgtggtcagagtgcatgttctctgatccagtgtggatttaataagctaggatttgtgtaacaatttatagtttttaggacacttccatgtatattgtatgttatatgccttgggatacagaagtaaaaaataaggcttcattttcattaagtagtataacagagttaagctattaatacggggtctggcacatcatgatgttagttattgttacagttagaagtcactgacaggctgggtgcagtgactcatgcctgtaatcccagcactttgagaggctgaggcaggcagatcatctgaggtcaggagttcaagaccaacctggccagcatggtgaaaccctgtctctactaaaaatacaaaaattagccaggtgtggtaggtgcctataatactagctactcgggaggttgaggcaggagaatcacctgaacctaggaggtggaggttgcagggagccgagaccgtgccattgcactccagcctgggcgacagagtgagactcggtctcaaaaaaaaaaaaaaaagcactgacaaatgccaaaaagaacttcatgttgcttgtgctgtaggtgcatagcagatttataaatgggctgaaaatatcccattggtattaactcagcccctaatttgagggcttactatgtgctgggcagtcttcttagctctgcaggtgcattggagaatgtgacagacaagtttttgcccccttggagcttacatttgagagggggaaccaggtagttaactgaatatgcaagtgttttcataggagaaaaagaataagggattcagtgtgatgggagcttggtgtcttagacaggtggtcagatggcctctaataacatttgataagaggtttgaaggaactgaggaaacaagctctgcagatttgtgggataagcgccttgcaggcagagggatctgcaggtgcaagggccttgagctggagatatgcatggtgtgtttcaggagcacaaggaagccgctggggctggaaggcaatgagggtggtcatgaggtagacacaagccagatcatataggaacttgtaggccatggcaaagaccttggtttttatactgagtaagttaggaagtccctgaggattttgataaagtgggtgttggaatttgctttatgttttagataaaggctaactggctggtatgtggagaacagatgttctgtgacgggatgtagggaggtaggtgtcggagtagaagcagggagatcgggcagaggtccctagggcagcccttagatagagtgtgacctggagtggaaggcaggaatgcttgattgtagggctgttgtcgaaaatggcctaataataataataataataataaataaaataaaggagatcccttgtcctgtgtaactggatggatactttgtgttcagctctgtaaacaaatctaaaaagttctgacctgatcttttatcttgagaccttaaaaagaattagtagtattttatgactcaagtaatgccatgaatatattttcttaaaagcaattaaaacattccagctagggttaaagcctgcatgtctagaaacaggactttatccttacagctgggaccctgttgtgaacatggagctgactctgagccttagcaaggatatttttttaaaaggaatctctggccgggcatggtggctcaacacctgcaatcccagtactttgggaggctgagaggggcagatcaactgaggttaggagttcgacaccaacctggccgactgaaaccctgtctctactaaaaatacaaaaattagctgggcgtagtggcgcacccctgtaatcccagctactcgggaggctgaggcaggagaatccctaggacccaggaggcagaggttgcagtgagctgagattgcaccactgtactccagcctgggcaatagagcaagactccgtctcaaaaaacatataaataaataaaaggaatctcttgcagggtgaatattagagttttcctctggggacattttttctctcatggtaatgcttaggggtcagttgaatttatattgtttgcagcacctcctcagctagaacaaaagtgtgaacttcagcaagtcctttgaaagccctgggagtggtctttttgtcgtatgactgagattggctttctttccttgcctgaagggacagacttgtctccctgtggactctctttgagtgtagagaacagcaggagggaactgggggaaagtctgactcctgagatccttgttgctcttgacaaaaattgcaaactctttccattccggtaagaatgaatatggagcccgtaagctatttctgctcctgtactttctcagcatattggatttctggaaaactttgtaagaattggtttgttcagaactgttataaaaggaagtgtgatgtggtggtggctggagcgcagggcctggagcacaccaggctcttgtcttagccctgtcaccagtctcaagaccttggcaaagggccttaactcttccgacctcatatggaaatgaagggttggtgtcaggttcaaatgcaattaacattgaccaaggcatgttataaagtgttacacaaacggaacatgaaggcagtgttcagtggctgcacgttttctatgtttttagtcaattcttttgaaaattattttttgttgaataggctgccttgggtaggtgttaatttaaaattaattctgtttggatttatgtgaaagagatgaaatactcatgtaaattttaaaaattttagaactagaaggggctagagggatccctagtccagtgtttttcatcctcccaacctttttggtcatattgcccaccttggaacttttttagaccaagaaaattttcccagtgaaattctgatacctcagatatactttgtatctctttttgtactgtggtcctgcgaagggctacacgattccccatcgcaaacccatttacctgtcctgggagtgatctcgcccctcttaagactgcattttatagtccaaacctcctttttacaggtgaagtctaggaaagttgaataatttatgcagacactcagattatatttatgatagttgaaactgttgaatttattatctttgggctaattacttagttctatgtcactggtataaactgtgaaagccttcaagatacttgatttgcatgactcggtttaagtttgtgaaacaggtttactaactagcagaccattttaaggtctaggaagtgattcattaggtgcttggatgaaagataataaaggaagtgtttattctgttttccatgatcttcttggtgtgtggcaatcacattgaaggtggtagcagcttattctaggttgatcgggaaaaggctagctcctaagagtgctttgacatcctgctggtgggtagcatgtaagctggcctggtaagcagtgactagatcttgttcattaccttgttccttacaaggctaagaaccactggatttccgtgatttcataatgactgaaagttgtccatgcattgaactatgtacgagtgttttaagtttcataggagattaaagtgacctcttgttaatgtggatgtgttaataacctggttcttttttaaaaaaatgtatgatactaattttttatattttaagggaatgtaattagttatttttgtttcaggtttttattcataatcctcatacacggaaccagcatgtcagtgcatccagggtcttccagagccccctggaatctgatgtttctcttctcagcattaaccaggcagtcagctgtctgactgcaggcgtattgaaccctgagcttggctatgatgcccttttagtggggacacagactaatcttttggcttatgatgtctacaataattcggatttgttctacagagaggcaagtataacctttataaccataaaattgtcattactcattaatgtccattttttatgcttagaagagatcagatcatttattttggtctgtttgttgtatgactgttatagtataggtaaacaacatggagattttgctgttaacatctgctttatgtactcggaacttatttatttggttatggttgctaatcgcttggtgacactcgagcttatctctatgaggtatatctgtgatactgccatctgtcaagatctgttgagaattcagccaagagctgggaagccaatagacaggtctcctggtggacttgcattcaagtttagtgcaatagtttgtagaagcccttactgtagcctgccacctacaggctgctgcaactttaatacccaagcaattcatatttgttacagaaaagataaggaagtaaaaagtaaaagaaattacacctattttttcatctagaaagagcacttaactgttgagtttttgaatccagattttttaccaagcatatatgaatacattttgtagtaaaatggggtcatatatacatgtagccttttacttgtttttaccctatagcagctttattaagatatgattcacatgtacaactaacctacttaaagtatacaattcagtggtttttagtgtatccagagagctgtacaaccatcaccatcatcaattttcaacatttttattaccccctaaaaaacccatacccattagtatcactccccatttttctttaacctcctaaccttaggcaaccagttatctactttctgtctctagaagtttgcatattctagacatttcataaacaatggaattatataatatgtaatcatttgtgactgccttctttttcttagcatgatattttcaaggttgatccatgttgtagcatgtgtcagtaattcacttttatggctgaataatattccattgtatgtatataccacattttatttatccatttatcagttaatggacattccactccctggctattatgtgtggctctttcattcaataatatgttgtgaacatctttatatgaagttactacatacccgttatgtcattcttattggttctgtagtatttcattgtgttaatgtaatttgtttaaccgttccatgttgttgaacatttatgttatttccattgtttctgtattacagttcatagtgtaataactgtatctctttgaccacttccctgattatttcctgaggataagttcctgaaaatgcagatggttttctttctttttgtttttgttttctgagacagagtcttgctctgtcacccaggctggagtgcagtggcatgatcatggcttactgcagccttgacctcatgggctcaagcaattctcccacctcagccttctgagtagctgggactacaggtgtgtactaccacacccagctaattgtttattttttagagagatagggtctcactatgttggccaggctggtctcaaactcctgggctaaagcagtcttcctgcctcagcttcccaaagtgttgtaattatagatgtgagccactgcatttggctggttttcttctttgtctattttttgttgaggtaaaatgtacatacatgaaaatgcacagaccttctgtgtacagttcaatgagtttggatccctataaccaataccccaataaaaatagagaacattttcatcacctcagaaaatattgttgtaccccattccagtcaatttctatctcccatagacaatcactgttctgacttctgtcagcttagattagcttttcctgttgttgaactccatacaaatagtgtctggcttctttcacttaacataatacttgtaagaattatccatattgttgcatataaaagtagtcttttgttgttgttgctaagcaacaaaaatagtatattccattgtgtgaatatactatggtttgtttatccactctcttggtgatagacaagtggctggacatttggattgtttcagtttttaacaaccatttttgtttaagacttgtttttaataagacttttttatataagactttttgtagatatatgttttaatttatcttgggtaaatacccaagagtggaattgctgggctatgtggtttataagaactttatgacactgtgaaactgtttttgcaaagtggttgtatcactttatactcctgcctgcagtgtaggagagttccagttgctccacatcctttgtcaacatttgttgttgccagtctttaattttagccattttggaaggtgtgaagtgatatcttaggtgtggtttcattttgcatttccctgataatcattgatgcagagcaccttttcttgtgcataaatggacatttatgtgtcttccgtgaagtgtcttaagtcttttgcctattttttattggtagtttgtctctttattattgatttgtagacatttcttggatatactggatacaaactctttgtcagatttatatataataaatattttctcccagcctgtggcttgttccactaggcatgtgtcttttgatgagcaaaagttttgcatttttgtgaagtccagctgatcacattttttctttagtggttaggactttttctgccctttgcctatttcaaggtcacatcgtttttgttcagaagtgaaatcgagtttaggactgtattagtcagggttctccagagaaacagaaccaataggacatgtacatattagagggggaaatatttattttcaggaattggcttatgcagttgtggagcctggcaagtcaaaaatctgcatggtgggccagcaggctggagatctaggagagaattgatgttgaagctcaagtacaaaggctgtctgctggtagaatcccttcttccttgggggaggtcagtcttttttctattaagtccttcaatacttgatagaaagttcttaatagaaagtattgaaggacttaatagtaaagtagattattatccatatgtgcgtgggccagttaatgtgtgaggcccacccacattatggataataatctgttttactcaaaatctgctcagtttactcaaaatttggcccaattaatatgtgggcctgcatattatcgtgtctaagataatgtgtccttttacttttcttaggtagcagatggggcaaatgcaattgtgctggggacattgggagacatttcttcccctcttgcgattattggtggcaattgtgctctgcaaggtttcaatcatgaaggaagtgatctcttttggacggtatgaagaagaaaacattctttttggtacccttaagcatttttacttttaatgttcttttttaaccaccaactctactgagtaataatatttataattctgtgcattaaaaaaggatatgaataattcgaatagcattcattcgtgttttgtgtaatcctctccttcatgtagctaatatatttggagtaaatggagaaacgatggcatgctaatggtttggggttttattttcaggttactggagacaatgttaattccttggccttgtgtgactttgatggtgatggaaagaaagaggtatgtgggggaggagatatctctcttgtgtgttcagccaaatgaattttgccatgacagtgacattagtgttgacagaagtgtaagcttctcctggctgattttggtgctctgttgcctaaatgctcagccagttggccccattcgtctttctcttctcttttgaacaataaatcacttgtgcttgtgtaataaatacaaagatcaaagccatggtgtttcagagacacaggagagggcagagagggtagaagagttgggatttcagtcatattcacggtcttatgaattgctcctgatgctttgaaaccatattagtatatagttttcaattttggccaactgttttgaggaatctaaatgttttagagattggcttttagcctttgaaattattcttatggttaccctagaaattagcttcttgagcagttagtaggtgtgacgtgctgtgttgggcaccgacttgcccctctcttgtccatggacactggactctggtgtttgaacagggcttccatctgtaggcagagaaagttgctgatccagggagccttttcaggtactcagggaaataacgtattctggcaagatgtgcagctcccatggcaggataaaagctgcagtagcccctgttccttcattgattgaatctgctgatcctcccattagagggagcatttctgagcatcaaacgattatgaggttgtcaatcttgggtggcagaagcagcatgcaaagtactgtgcaattttttgttttgtttacagaaattttgttgtttgcacttactcacctgaacatgtatgatatttccccttcagcttcttgttggatctgaggattttgatatccgagtttttaaggaagatgagat

SEQ ID NO: 10952 - DNA, 578 bp, Homo sapiens
ggcgagcaccttgtggctccatcctgcagaggacagtggggtcttagaggaagagcttttctgagaagttgacgttttcttgtcatcaggcacttggagtcaggcgaggtttttattcataatcctcatacacggaaccagcatgtcagtgcatccagggtcttccagagccccctggaatctgatgtttctcttctcagcattaaccaggcagtcagctgtctgactgcaggcgtattgaaccctgagcttggctatgatgcccttttagtggggacacagactaatcttttggcttatgatgtctacaataattcggatttgttctacagagaggtagcagatggggcaaatgcaattgtgctggggacattgggagacatttcttcccctcttgcgattattggtggcaattgtgctctgcaaggtttcaatcatgaaggaagtgatctcttttggacggttactggagacaatgttaattccttggccttgtgtgactttgatggtgatggaaagaaagagcttcttgttggatctgaggattttgatatccgagtttttaaggaagatgagat

SEQ ID NO: 10953 - DNA, 2623 bp, Homo sapiens
gccgccgcaggaggagcaggcggtacctggacgggttcgtcccgggctgtttcgcgtccggcctgaggcggctggggccgcgcaggtagtgtccctgcacttcttgcccgggcgcgtgaggccagctccgctgcgcttgtctccagcttccagccctcctcccctaagccgccgccatcatgctgctgcctgtgttcaccctgaaactgcgccacaaaatcagcccccgaatggtggccatagggcgctacgacgggactcacccgtgcctggcggccgccacccaaacgggcaaggtttttattcataatcctcatacacggaaccagcatgtcagtgcatccagggtcttccagagccccctggaatctgatgtttctcttctcagcattaaccaggcagtcagctgtctgactgcaggcgtattgaaccctgagcttggctatgatgcccttttagtggggacacagactaatcttttggcttatgatgtctacaataattcggatttgttctacagagaggtagcagatggggcaaatgcaattgtgctggggacattgggagacatttcttcccctcttgcgattattggtggcaattgtgctctgcaaggtttcaatcatgaaggaagtgatctcttttggacggttactggagacaatgttaattccttggccttgtgtgactttgatggtgatggaaagaaagagcttcttgttggatctgaggattttgatatccgagtttttaaggaagatgagattgtggcagaaatgacagaaacagagatagtcacctctctttgtcccatgtatggcagtcgatttggttatgccctttccaatggcacagttggagtttatgacaaaacatcccgatactggagaattaaatcgaaaaatcatgccatgagcattcatgcttttgaccttaattctgatggagtgaatgaactgataactggttggtccaatgggaaggttgatgctcgaagtgaccgaactggggaggtcatctttaaggacaatttttcttctgcaattgccggtgtggtagagggagattaccggatggatggccacatacagttaatctgctgctcagtggatggggaaatccggggctacctgcctggcacggctgagatgaggggcaacctcatggacaccagtgcagagcaggacctgatccgagagctgagtcagaagaagcagaatctgttgctggaactccgtaactatgaggaaaatgccaaggctgaattggccagtccactgaacgaggctgatgggcatcggggcataatcccagccaataccaggctccacaccacgctctcagtcagcctggggaatgagacccaaactgctcatacagaattacgcatttccacttctaatgacaccatcatccgagcagtattgatttttgcagaaggaatttttacaggtgaaagccacgtggtacatcccagcattcacaacctctccagttccatctgcatccctattgtgcctcccaaagatgtccctgtggatctgcacttgaaggcattcgtgggttacagaagcagcacccagtttcatgtatttgaatcgacaagacagctccctcgattctccatgtatgcgctgaccagcctggaccctgccagtgagccaatcagttatgttaactttaccattgcagaacgggcacagagggttgttgtatggctcggtcagaactttctgttaccagaagacactcacattcagaatgctccatttcaagtgtgtttcacatctttacggaatggcggccacctgcatataaaaataaaacttagtggagaggtggatgaatatcattcagtgcatcagaagctcagtgctgatatggctgatcattctaatttgatccgaagtttgctggtcggagctgaggatgctcgtctgatgagggacatgaaaacaatgaagagtcgttatatggaactctatgaccttaatagagacttgctaaatggatataaaattcgctgtaacaatcacacagagctgttgggaaacctcaaagcagtaaatcaagcaattcaaagagcaggtcgtctgcgggttggaaaaccaaagaaccaggtgatcactgcttgtcgggatgcaattcgaagcaataacatcaacacactgttcaaaatcatgcgagtggggacagcttcttcctaggtgaggaaaatacaggtcatgaagttcctggcaaagattttctgttaaaaacctatgctggtttgctttggatcacaccctggtgaaccccgggtgctaagaatgaaaataaccttggtgagttgtacaaattaaagacaaagaactacatgtgaagatagacttgctttctatttttaaatcagtagtagtactgttgctgaataatactaggtttttatggaataggatgaatgcttttgaagtattagggcttcagagtccaattttgcttatttatggtatataaatacatatttttttcttgaaattgcaattgagtttgtacttttcaaatagattatctactttttcattaaaatgtaaagatgttaaactttgtgttgattgattataaaatcaccaccaaatcagaa

SEQ ID NO: 10954 - DNA, 14372 bp, Homo sapiens
ttctgggccttgcattttgaaagaacattctatacaaaacaattctcttgtgtttcattgattggccatagcacccagtttcatgtatttgaatcgacaagacagctccctcgattctccatgtatgcgctgaccagcctggaccctgccagtgagccaatcagttatgttaactttaccattgcagaacgggcacagagggtgagtatctcgcttttctctttcaatgcttttacacagtagaatcctttagatgttatttcatagaaagggaaaattacattaatgtgttatattggtagcagtaaatatgatatgaaagaattctctaacttgggggtggcttgtaacctgtaataaaaatattgctaaaataccttctctcactttgaaaaagcatctgagcaatcctcagttattggtgaattcttaccagtgtttaattcctctctttccgttatggtcttagtgtggttgtcctggtgtagtatttcaagaggaacctgcagcaagatgaaaagagagtgggacttggagctaagaacgtttttggctttaagtgctacgttaactcattaaattcttagtgatcttggggaagtcccctcaccagtgtgagcctcagttttcttatctaataagtaaggataatcttacccaccttattgcgggggcccgaggattacatgattggtgtaacagtagcaccttgtacatttgaaaggactaataccagtggactttaaccttggctgggctttggaattcttggtgggactttttaatcatgtagattctcaggcccctgcctggcctgtggaaccacagactctataggtgggcccttccagaaggcctcatgggtggttctcatgtggaacctgtgttgcaagccactgcatggtgttactgctattaacattaaaacttatattttccttattgtgtggatatatctgtggtgtttgcccatgtatacttcattttacatttcttaaagaatagaatggaatggttttaagcacgctacattgtccaggttatacccacagaagagctgttgtgtaacagaatcagcatcatacctgaatcatttgtacattgcatataagactatgtctaagtagaagatgctatgaaatcatgtctgctgtggggccaggcataattatgaatgttacttaagagcataggtgaggtgagaaaagggaatgtgactagtgttttagtattttcttggtgtgggatgaagtataattcttttttttttttctcaacaaagcagtaaaactagaaagaaggagaactcttccctcaagaatggctgtaccttcatatctagaggcacattaaaaaaaagaacgtctgtaccttaaaaatggaggtcatttcattgtgttcattttcaaggttgttgtatggctcggtcagaactttctgttaccagaagacactcacattcagaatgctccatttcaagtgtgtttcacatctttacggaatggcggccacctgcatataaaaataaaacttagtggagaggtaatgtttaatatcacggggcatagatttcttttttgaatttatttattcaaacacttagaccatggaatgagaggggcatagatttctcatgtggtgtttaccattcagtccaaagtgaggtgggggacatcaatgtcaaggtcataaaaccacgttttgttttatttttttcacatggtttaacttagtctgttagtgttaccattttagacactggggtataatttggaatagctgttttctgcctccttcccttcatctcttccttgtctaatttggaaagaattgggaatacagaggtcaacaaaaacattttcaatgtttggatgattttgtcatttaatttctaaggccagaggatttaccttttagctagctgctggaaataatgcagtttgtaatttctttgagagctaaactttcctttttcaacactgcatatatatatatatgcacaataattttgttgagtatggggaaattcaggtactattttagctaagtttgtctaacatctgaggatgctaaacttgtctattttttctctgggtagatcactataaatactgatgatattgatttggctggtgatatcatccagtcaatggcatcattttttgctattgaagaccttcaagtagaagcggattttcctgtctattttgaggaattacgaaaggtgctagttaaggtgagggaatgcggtagatgcatttgtgagaatgtggtagtctaataatatttgaggagattaatggtactacaaatgtacttatgttatagtgatgttttcaagaatttttgcaattcttgaagtaaaaattgaactagtattggagagtttactacttaaggatttattttataaaaggaagtgtttagctcctgagcaccatgcttgctttgtttggtttaaagtgatgcatttaaatattaacattttcctttgttagctcttcatcttatttgtagtatctgctttggtcttcttcagtttgggtctttccaaaaacccaaattcaagataaaagagcaaaataaagatgattctgattggccccaaagtatacaatattcccactgcaaatccctaaaatattaatatgtgtgttgtgggggctcctggtgctaaagcatggggaagattcacatggagtgtcgtgttgaaattggaggcagcacagatgagttaacttgttgagacagagatgaaataacgggaagtagcttaattggtataagcgaacaggggaaagaagggggtctctgtatctggtaaatagtgtcttttcatttgtctgggttcaagaagtttgtgaggcctttttcattcctgagtgttcatggtctccaggtggatgaatatcattcagtgcatcagaagctcagtgctgatatggctgatcattctaatttgatccgaagtttgctggtcggagctgaggatgctcgtctgatgagggacatgtgagtatttgtcatggttagtacaggtgcagggttaaaaatgtgagcagtatggaatagcaactctcagatgttaccaatagaagtataaattgttacagtgactttggaaaataacttggcattatcagtaaagttgaaaatgcatgtcctctatgacccagcaattctattcctggtttatagcttagggaaagttacagcttagttatatgtatgcttataaaccaggatatttatataagaatatttgtaaaggcattgtttataaaaatctcaaaatggaaacaatccaaattagcatgaacagtgtagcgacagtggatgaattgtgatatattcatgcaatggaatactacacagcagtgagagcacatgaatctccatgacacataagagcaaggaaaaatctgataagcataatggacactgaaagaagacagacttaaaagactataaaatgtatccgtgtgtatagttagagaaaagagtaaactatagtttgggaaacatgcaataaataaaaatataaattcagggaagagattatcatataagatagtattttctcctagagaaggagggattatgttcagaaaaaacacattgggaaacttcctgtctgaagtcttgtttaacttcattaaatattctgaatttttctgaatatgtaacattttacaataaaaaagttaagtatgtacagtacaggtcttccttggtgcttgctaggatgccaaatttaccttgccaataaaatgtactgaaaaaaattcagtaaaatagttaacaaattatagatgaaatttatgtgtatatattaggggcaagagttcactcagagtgctgcttgtgttttttcctgagacgcctgaattattggcaaataattataatggttttgctcagaggtaaatggtttttaaaataattgtattgttgaaaatttcaaacacatacagaagtacttaaatataatgatttcatatataccacccacccaacttcaacagttatcaactaaagactgatcttttttcatctctacactcaccctctttccctcccaggcactagataattttgaggcaaattttggacattgtgtaattctagccacaactatttcagacaaagggcctttcaatatcatatatatatatatacatatatatacacacacacacacacacacacacatatatacacacgtctgtataaaaatcacaatgccatatcacacttagaaaaatttacaataattgcttaatattacaaatacctcatctgtttagatgttcccagttgtcttataaatgtggacatgtgtgttttaagttggcttgctcaaatcaaaatccagatcaaagtccatacattggatttggttggaaatcgtttaatcttttaatccacacttttgcttgcccactcagtctcttctctccttctcctgtggggtgccattttggattttgctggtggtatccttgtggtaatgtttagtattattcttctgtcccctgtatagaaagataatggtagatctggaggcttgattagattcaatttcaaattttggcaagaatacttcgtgagtagtgttgtttacttccatgaggaagcatgcaatttttgattgtttctttttatgatattatcagccattgatgatcattgcctagattcattatttcttttggggtttgcaaaatagtgatattctaattctgttattcttttcttcatatattagttgaaatacttctatgaaaaataatgttccctcatgaattaatgaattatttggttccctgaggtacagtttgtacaggaaagacagtttctttatcagctttaaaataatgtgttgatctccagcatgcactaggtgaccaatgagatttttaagtccttacatactcatgtatttgaacatatttaatgtgtttcaatttatatctgttattattaatttttatggctagttttttttttttttttcgagacggagtctcgctctgtcgcccaggctggagtgcagtggtgcaatctcggctcactgcaacctccgcctcccgggttcatgccattctcctgcctcagcctcccgagtagctgggactacaggcgcccgccaccaagcccggctaattttttgtattttcagtagagacagggtttcaccgtgttagccaggatggtctcgatctcctgagctcgtgatctgcccgcctcagcctcccaaagtgctgggattacaggtgtgagctactgcgcccggccttttacggctagattttccagtctgtgggcaatggaagtctctttaggttggatacagttacctttggacatggtcccattaatttggttggttctttgttttcttgtatgatgaaatgtttcaggcttatctggtacatttcccagtcttcatatggaaccagccatttctctcgagtcctggttcttttacatgagaaatggtatttagagatcatggtctgaccactaaagatgttcattgctactgggttgattattgtttttaggccttttcaatgcgtagagctaggaattttttttttcaatgagaaaatatgagttcatactatttaccattcagatttatgaatataggctcttcgattttattactgcgcctcttctctctcacattgaaaatcatggcttcaggttgggcacggtagtttacacttgtaatcccagcactttgcgatgctgaggtgggaggatcacatgagcccagggattcgagaccagcttgggcaacatagtgagacccagtctctgcaaaaaaaaaaaaaaaaaaaaaaattagctgggcatagtggtgcatgcctgtagtcctagttactcaggaggcagaggtaagaagatctctggaacctaggagtttgaggctgcagtgagctatgatcatgacactgcaatccagcctgggatgacagagcaagatctcttaaaaaaaagtgggggaatatcatggctccaatcagtatcaacataactatttgcttcattttacagcacagacacaacatttaagaatattagccaagttgttatcaacaatatgattgctgaaaacagtttaagattttttgtgtgttaattctttgtgtctttagggcatatcccagcagggagtttccgtcaaattactgtatcttaaaatcatttgagattatttctcttttggttatgccacagatttgatagagagttaggttcattgtcttattttgctctcagttttggaggattggcatttttacctttttggtttaattctattacatatttactaaaacctttttgtaattccaaagttagatctataagacaggcatgcacggaaaagtctaactttccattcctgtgaccttcattctgttctctcccttttactataaataaccagttgaacatttaagtatatatatgcagatacacacagatatatacacacacacccctcttcatgtcttagattaagtcatagtatgtatatatctttttctccaccttggttttttttttttttttttttttttttgagacaaggtcttgctgtcacccaggctggaatgtagtgatgcaatcacagctcactgcagcttcaaccacccgggctcaagggatcatctcacctcagcctcctgagtagatgggactaaaggcatgagccaccagcccggctaattttttatttttttgtagagacagggtctcaccacattgcctgggctggtcttgaactcatgggatctactgatcctcccaccttggcttcccaaagtgctgggattacagatgtgagccactgtgtccagcctccaccttgctttttacatttaaaatatatcttggagatttctccaccatggtgtagagaaatacatctcatttgtctttacggctacatagtactccattttctggctgtttttcagccagtttcctctatttggattgttttttttttactgtagataatgcttaagtgaatagttttgttacgtaaatctttttatatttttgccaggatagtttgagaaaaaggcttaacaaatgggattactgcagtaaatgatacatgcatacagaattttgcaaggtcttgtcaaattctccataggtgttacctcattttgtattcccataagcaatgtatgagattgcctgtttctcttcagccttgccagtggagtttgtgggcatactccaggggatgagaaatggtctcttagttttaatttttattttttaaattttattttattgtggtaagaccacagcatcagatctaccttcttaacacatttttaagtgtataatacattatcgttgactataggtgcagtgttgtacagcacatctttagagctgattcttcttgcttaactgaaactattggtaagcaaattcccatttcttcttcccctctttcaactatcattctactctttgattttatgaatttgactattttagatactccatgcaaatatataatatttgtccttctatgactggcttatttcactcagtgtaacatcctcagagttcgtccatgttgtcacatattgcagaatttccctctcttttaagactgaatagtgttccattgtttatatgtactaaattttctttatccattcacctgttgatgaacatttatgttttttccacatgttggttattgtaaatagtgtggtgatgaacgtgggagtgctaataggtcttcagggtcttgtcttcagttcatttggataaatacccggaagtgagattgctagatcatatatggtagttctatttttaattttttgattacatttttaatatttaatcattaaaaattaaaaatttaaatttttaatatttaatcattaaaaatttaaatttttaatatttaaatgttttccatagtggctgcaccatttttcattgtaatcaacagtgtacaagggttccagtttctctacatccttgccaacacttgttgtcttttttttgataattttcatcctgacaaaggtgaaatgatacttcattgtggttttgatttgcatttccctgatgactagtggcattgggcgtctttttatatacctgtcggtcatttgcttttcttgtttggagaaatttctattcaagtccctagctcattttttaattggattactagtgtttttttttttttttttttttgctgttgagttgtaggagccatttattatgttcagtattgggcatttttcattgttttaattcagggccatttccatttcttttttgtgtgaactatttgtctgtttacatatcaggtactgttgtagtccattttgtgcctctataacagaatacccgagaatgggtaatttataaaggaaagaagttgatttagcttatgggtctgtaggctgggaattacaagaaacatggcactggcatccgcttgacttctgttgagggccatgtgtgaagtcaaaacatggcagaaaaggtcaaaggagaaggggacatgtgtgaagaggcaaagcctgaggggtgccctaactttataacaacctgctcttttgataacttcattcctgcatgagcgagaactcactcctgagagatggcattaatggcattaatctattcatgagggatctgcccccatgacccaaacactccctactaggcccacctcccaacactgctgtgctggcatttcaacttcaacatgagttttggcggggacgaaccacatccaaaccatagtgggtatattaatctcttacgtgtgatatgagttgcaaatatgttttccggagtttgtcatttgggttttccctttgcttagatttttaaaaaattttgctttaatgggccaggcgcggtggctcacgcctgtaatcccagcactttgggaggctgaggcaggtggatcatgaggccaggagatcgagaccgtcctgactaacatggtgaaaccctgtctctactaaaaatacaaaaaatcagccggtcgtggtggcgggcgcctgtagtcccagctattcgggaggctgaggcgggagaatggtgtgaacccgggaggcggaggttgcagtgagctgagatcgcaccactgccctccagcctgggtgacagagtgagactccatctcaaaaaaaaaaaattttgctttactgttggttttaccttgtaagagcttttaaaattttgtatatagtcaaattataagaaaatttgactacattaagaaaatgtaagtcattttcttaatactttatttatttatttttgagacagagtctcactctgttgcccagcctggagtgcagtggcgtgatctcggctcactgcaacctctgcctcccagattcaagtgattctcctgcctcagcctcccaagtagcgctaccacacctggctgatttttgtatttttagtagagacgaggtttcaccatgttggccaggctggtctcaaactcctgacctcaggtgatctgcccgccttggcctcccaaagtgctgggattacgggtgtgagccactgtgcccagccacattttcttaatacttttacattttgaattactgttagaaaagttttctttaacagcagggtatagagtaattcatctgttttcctttagtacttgtatattttgcttttttacattaagtctctgttccagttggagtttatcctggtgttcatataaataataaactcagttttatcattttccttatgactatcacattattattatattattattatttttgtgtgtgtgtgtgtgtgtgtgcgtgtgtgtgtgtgtgagatagggtctcactgtgtcacccaggctggagtgcagagagatcacagctcacagcagcctcgatctcctgggctcaagttatcctcccacctcagctgctggagtagctgggactacaggcgtgtgctaccatagccagctaatttttgtgtagacccagggtctcgctctgttgcccagactggtcttgaactcctgggctcaagcgatctgcctgccgtggcctgtcaaaatgctgggatttcaggcgtgagccactgtgcctggccacattgcattattttaatactactactttttttttttctttgagatggagtttcgctcttgttgcccaagctggagtgcaatggcgctatcttggctcactgcaacctctgccttcctggttcaagccattctcctgcttcagcctcccgagtagctgggattacaggcatgcgccaccatgcccagctaattttttttgtatttttagtagagatggagtttcactatgttggccaggctggtctcaaactcctgacctcaggtgatccaccaacctcggcctcccaaagtgctgggattacaggtgtgagccactgtgcccagcctgatactacttcttttaaagttcatcatgcttacaatgatttcagatactgcccttatcatatatcatatttctgtacacagttgaatctatttctggattttctgtactattccattggtctgacttgtcacttcatttgacaatatcattcttttttaaaaaaaattattttgagacagaatcttattctgttgcccaggctggagcacagtggtgtgatcacagctcactgcaacctcggcctcccaggtacaagggatcctcctacctcagcctcctgagtaggtgggactacaggcatgtgccaccacacccagctaatttttttttatttttggtagagacagggtctcactatattgcccaggctagtctcaaactcctgaggttaagccatcctcttgcctcggccattttttttttttaatgtttggctgggtgcagtagcttatgtctataatcccagtgctttgggaggttgaggcatgaggatggcttgaggccaggagctcaagaccagcctgggcaatatagcaagaccccatctctaaaaaagaaaatataaatttcattgtgatattctgaaatacatatttgatcttcaaccctgtttcctgacataataactcctaaaatcttaggctctccaaagtgatgtctttttgtatgctattgattggtttatggctggcagctcctaggtagcttcaggataggggtcagtcaccagaacgaccaaggcaggattagaggattgggactttctgcccacccctctcccaacctccagggagtggagaggggctgagagttaagttgatcacctatggccagtggtttagtcagtcatgcccaaataatgaagattccatcaaaacccaaagggacagcattcagagattttctagacatctgaacacacagagtttcctgaaggttgatgcacctagggagggcatggaagctccaagcgccttccctaatacttcgttctatgcatctcttcatctgtatcctttgtaatatcctttataataaactagcaaatgccattaagtttccctgggttctatgtactgctctagtaaattaatcaaacccacagagggggtcatgggaaccctaacttgaagcagatcagtcagaaattctggcagcctgaacttgtgatatgtatctgaagtcaggcagtcttgtgggactgagcccttaatctgtgagatctgacagtgtctccgggggaatcgtgtcggaacggaattggaggacacccagctggtgtctgctatagaactgattgttttcttggtgtgtgggaaaaacctccacacagttgaggacagaagtcttctgtgttgattgttgtggtgtgggagcagaggaggaacagtttgtttttttccccactcatggtgaactacacaatgtgaaatttaccatcttaactactgtatactacttttagtgtacggttcagtggcattaaatacgttcataatgtgtaaccatcaccaccagcagcatctctataattctttatctcttaaacctgaaactctgtacccgttaaacagtaactacccattctcccttccctttagctctggcaactaccagtgatggtgccattctttcatgtatggatgttttgtatgtttcaatatctggtgtgggtagtgccccgtccccaacccctgttgcttttctttttcatggtttttcctagctacttgtgcttgtttgttctttccaatgaatttcatcagcaatttttgtagctccgtaacaaaaataggtattttaattgagatgatgttaaatgcattaacttagggagaactgatgctgctgcagtgatgtttggtcttgctagctaagaacatgctatgtctttatatttgcttaagccatgttttgtgtctttctggagtgctttcatggtttactcttgtagatactggatgttaccaattttaagtttatgcttaggtattttctgtatttttagacaattacgaaatattttataattgtaaatattttttacattatcttattctataattatggttttgtgtttgtacatatgaacactgatttttatctgttgattttataatgtgccctttactaactatcttatagtttttccagatgtattcttgtatcatctgtaaattgagatagatatttgctctttttggccaactatctgtagggtccctagtttctctatctctctatctctctcttaagtcaaaaatggttgctggctttaggcatttgattgcaaaatgtcaacatttgtttttttttttaaatcaaattaattgatatataactcatacatgcagaaaatttatgcttttaaggtttacagtttaatcaattttgagaaacttatgtaatcatgttgctactactacaatcgagatataggatatttctatcactggccgggtggctcacacttgtaatcccagcattttgggaggccaaggtgggtggatcacttgaagccaggagttcgagaccagcctggccaacatggtgaaacccagtctctactaaaactacaaaaaattagccaggtgtggtggcgggtacctgtaatcccacctattcaggaggctgaggcaggagaatcacttgaacctgggaggtggaggttgcagtgatccgagatcgtgccattgcactccatctagcttactgggcaacaagagcaaaactccatctcaaaaaaaaaaaaaaaaaaaaaaaagaatatttctgtcactcttgtgactgtttgtatcaatacctcttctaacctccagttcctggaaaccactcatcttatttcttttcctgtagtttcaaccttttcaaaataccatataaatggaatcatactgtatctatatctatatatccttttgagtctggcttcattcacttacataatgtcttagagattcatccatgttgctgcatgtatttgtagttccttttttattgctgaatagtattccattgtatggatatatgatatttatctattcaccaactgaggataattgggttgtttccagactttggtgagtagaataaagctgctataaatacttgcatacaagttttttatagacataggttttcatttctcttgggtaaataccttacaatgggattgctgggtcatacattgtgtgtttaactttataagaaactgccaaatcacctgtcaaagtagttgcagctttttgtatttctgtccacaatgcatgaaagttccagttgtcccacatctttgctagcatttggtatcttcagctatatttttctttagttattttcattgttgtgtagtatagatctcatttctgttttaattttatgactttgttttaaacctttgataaaatacaaggctgagttgtcaaccaggccactttagtctaatgaatattcatctgaaacttggaaggtgggctgtcaccttgctcacttgtccctactcccagcacagtgggcttgagaattcttaaccacctaaatcaaccattgaccagtaaccaaggaaggccacttgtcttctgtttatttggaaggaaaagaatatttttatggaacttatccgtattttcaaagcaaactagcagttactcgattttaatgaaaatatagcttaaaaatggtgtcttttctttgtatgtctaagaaatttgcaagtttttcttaagcttgccatatcaacatgaaatgatgtcaaatttctactgatttgcacaggaaaacaatgaagagtcgttatatggaactctatgaccttaatagagacttgctaaatggatataaaattcgctgtaacaatcacacagagctgttgggaaacctcaaagcagtaaatcaagcaattcaaag

SEQ ID NO: 10955 - DNA, 716 bp, Homo sapiens
ttctgggccttgcattttgaaagaacattctatacaaaacaattctcttgtgtttcattgattggccatagcacccagtttcatgtatttgaatcgacaagacagctccctcgattctccatgtatgcgctgaccagcctggaccctgccagtgagccaatcagttatgttaactttaccattgcagaacgggcacagagggttgttgtatggctcggtcagaactttctgttaccagaagacactcacattcagaatgctccatttcaagtgtgtttcacatctttacggaatggcggccacctgcatataaaaataaaacttagtggagagatcactataaatactgatgatattgatttggctggtgatatcatccagtcaatggcatcattttttgctattgaagaccttcaagtagaagcggattttcctgtctattttgaggaattacgaaaggtgctagttaaggtggatgaatatcattcagtgcatcagaagctcagtgctgatatggctgatcattctaatttgatccgaagtttgctggtcggagctgaggatgctcgtctgatgagggacatgaaaacaatgaagagtcgttatatggaactctatgaccttaatagagacttgctaaatggatataaaattcgctgtaacaatcacacagagctgttgggaaacctcaaagcagtaaatcaagcaattcaaag

SEQ ID NO: 10956 - DNA, 18594 bp, Homo sapiens
gctgtttcgcgtccggcctgaggcggctggggccgcgcaggtagtgtccctgcacttcttgcccgggcgcgtgaggccagctccgctgcgcttgtctccagcttccagccctcctcccctaagccgccgccatcatgctgctgcctgtgttcaccctgaaactgcgccacaaaatcagcccccgaatggtggccatagggcgctacgacgggactcacccgtgcctggcggccgccacccaaacgggcaaggtaaccgctcccacccgcagggagcccgggccccagggaaccacaggatctccgccggccgcgcccctgggatcccgtcccctctccgaccccgcccccagcccgtgttgcccggcaaccggtcggcgagcaccttgtggctccatcctgcagaggacagtggggtcttagaggaagagcttttctgagaagttgacgttttcttgtcatcaggcacttggagtcaggcgaggtcggggtccctggacatagggagcttagaaaagagacgtctcctgagggaaggggtttggttcgggttagcagtaataaccgaccccagattcaagccaggggcctctgcttgtcacttggaactcggaattcctctgactctctaacactgcttcttcttcctttttttttttttttttttgagacggagtcttgccctgtcgcccaggctggagtgcagtggcgcaatctcgggtcgctgcagcctccgcctcccgggttcctgcaattctcctgcctcagcctcccgagtatctgagattacaggcgcccgccaccacgcctggctaatttttgtatttttagtagagacaggatttcaccatgttggccaggctggtctcgaactcctgacctcaagtgatttacctgcctcggcctcccaaagtactaggattacaggcgtgagccactgcacccagcctttcacagtcctttaccgaacaacgacaaaagaatgcaatacaaaaattaacttattcaaattgcacttttgatccttgcccatgtacattcagttctttccccgtaatttattcactaagtattaggtgtttactatgtgcgattactgggcaagatgtgagagtcaaagagataaaagagaaatcatgtaacattcaccagacttctactaaacaccttctgtatagattttggagactcggatgtaaaaggagtccctactttcagaaagcttatagtccagaagctaacagacaaggcaaatcagagccctgtgtatttgacggaggcatgcccaaaatacatggaatgtagtgacaacgctaataacttataacaggcacaaaactttattacatgagtcatctcagcgtcgttgtcacaaggccaacggcagcagcatggcatagggatggtgtttcttggctccagtacctactaatttcatgaccttgggcaaggcacttaataatagtacctaatacgtggggtcatgagctttaaaaaagttaatacatgtaaagtgcttgacatataggaagtggtcactgattgttacctgttattttctttttatggttctcactttattgactagaaattgcagttcagagaggttcaatacagtgcttggagccactcaactagaaagtgtggaatgtggtcagagtgcatgttctctgatccagtgtggatttaataagctaggatttgtgtaacaatttatagtttttaggacacttccatgtatattgtatgttatatgccttgggatacagaagtaaaaaataaggcttcattttcattaagtagtataacagagttaagctattaatacggggtctggcacatcatgatgttagttattgttacagttagaagtcactgacaggctgggtgcagtgactcatgcctgtaatcccagcactttgagaggctgaggcaggcagatcatctgaggtcaggagttcaagaccaacctggccagcatggtgaaaccctgtctctactaaaaatacaaaaattagccaggtgtggtaggtgcctataatactagctactcgggaggttgaggcaggagaatcacctgaacctaggaggtggaggttgcagggagccgagaccgtgccattgcactccagcctgggcgacagagtgagactcggtctcaaaaaaaaaaaaaaaagcactgacaaatgccaaaaagaacttcatgttgcttgtgctgtaggtgcatagcagatttataaatgggctgaaaatatcccattggtattaactcagcccctaatttgagggcttactatgtgctgggcagtcttcttagctctgcaggtgcattggagaatgtgacagacaagtttttgcccccttggagcttacatttgagagggggaaccaggtagttaactgaatatgcaagtgttttcataggagaaaaagaataagggattcagtgtgatgggagcttggtgtcttagacaggtggtcagatggcctctaataacatttgataagaggtttgaaggaactgaggaaacaagctctgcagatttgtgggataagcgccttgcaggcagagggatctgcaggtgcaagggccttgagctggagatatgcatggtgtgtttcaggagcacaaggaagccgctggggctggaaggcaatgagggtggtcatgaggtagacacaagccagatcatataggaacttgtaggccatggcaaagaccttggtttttatactgagtaagttaggaagtccctgaggattttgataaagtgggtgttggaatttgctttatgttttagataaaggctaactggctggtatgtggagaacagatgttctgtgacgggatgtagggaggtaggtgtcggagtagaagcagggagatcgggcagaggtccctagggcagcccttagatagagtgtgacctggagtggaaggcaggaatgcttgattgtagggctgttgtcgaaaatggcctaataataataataataataataaataaaataaaggagatcccttgtcctgtgtaactggatggatactttgtgttcagctctgtaaacaaatctaaaaagttctgacctgatcttttatcttgagaccttaaaaagaattagtagtattttatgactcaagtaatgccatgaatatattttcttaaaagcaattaaaacattccagctagggttaaagcctgcatgtctagaaacaggactttatccttacagctgggaccctgttgtgaacatggagctgactctgagccttagcaaggatatttttttaaaaggaatctctggccgggcatggtggctcaacacctgcaatcccagtactttgggaggctgagaggggcagatcaactgaggttaggagttcgacaccaacctggccgactgaaaccctgtctctactaaaaatacaaaaattagctgggcgtagtggcgcacccctgtaatcccagctactcgggaggctgaggcaggagaatccctaggacccaggaggcagaggttgcagtgagctgagattgcaccactgtactccagcctgggcaatagagcaagactccgtctcaaaaaacatataaataaataaaaggaatctcttgcagggtgaatattagagttttcctctggggacattttttctctcatggtaatgcttaggggtcagttgaatttatattgtttgcagcacctcctcagctagaacaaaagtgtgaacttcagcaagtcctttgaaagccctgggagtggtctttttgtcgtatgactgagattggctttctttccttgcctgaagggacagacttgtctccctgtggactctctttgagtgtagagaacagcaggagggaactgggggaaagtctgactcctgagatccttgttgctcttgacaaaaattgcaaactctttccattccggtaagaatgaatatggagcccgtaagctatttctgctcctgtactttctcagcatattggatttctggaaaactttgtaagaattggtttgttcagaactgttataaaaggaagtgtgatgtggtggtggctggagcgcagggcctggagcacaccaggctcttgtcttagccctgtcaccagtctcaagaccttggcaaagggccttaactcttccgacctcatatggaaatgaagggttggtgtcaggttcaaatgcaattaacattgaccaaggcatgttataaagtgttacacaaacggaacatgaaggcagtgttcagtggctgcacgttttctatgtttttagtcaattcttttgaaaattattttttgttgaataggctgccttgggtaggtgttaatttaaaattaattctgtttggatttatgtgaaagagatgaaatactcatgtaaattttaaaaattttagaactagaaggggctagagggatccctagtccagtgtttttcatcctcccaacctttttggtcatattgcccaccttggaacttttttagaccaagaaaattttcccagtgaaattctgatacctcagatatactttgtatctctttttgtactgtggtcctgcgaagggctacacgattccccatcgcaaacccatttacctgtcctgggagtgatctcgcccctcttaagactgcattttatagtccaaacctcctttttacaggtgaagtctaggaaagttgaataatttatgcagacactcagattatatttatgatagttgaaactgttgaatttattatctttgggctaattacttagttctatgtcactggtataaactgtgaaagccttcaagatacttgatttgcatgactcggtttaagtttgtgaaacaggtttactaactagcagaccattttaaggtctaggaagtgattcattaggtgcttggatgaaagataataaaggaagtgtttattctgttttccatgatcttcttggtgtgtggcaatcacattgaaggtggtagcagcttattctaggttgatcgggaaaaggctagctcctaagagtgctttgacatcctgctggtgggtagcatgtaagctggcctggtaagcagtgactagatcttgttcattaccttgttccttacaaggctaagaaccactggatttccgtgatttcataatgactgaaagttgtccatgcattgaactatgtacgagtgttttaagtttcataggagattaaagtgacctcttgttaatgtggatgtgttaataacctggttcttttttaaaaaaatgtatgatactaattttttatattttaagggaatgtaattagttatttttgtttcaggtttttattcataatcctcatacacggaaccagcatgtcagtgcatccagggtcttccagagccccctggaatctgatgtttctcttctcagcattaaccaggcagtcagctgtctgactgcaggcgtattgaaccctgagcttggctatgatgcccttttagtggggacacagactaatcttttggcttatgatgtctacaataattcggatttgttctacagagaggcaagtataacctttataaccataaaattgtcattactcattaatgtccattttttatgcttagaagagatcagatcatttattttggtctgtttgttgtatgactgttatagtataggtaaacaacatggagattttgctgttaacatctgctttatgtactcggaacttatttatttggttatggttgctaatcgcttggtgacactcgagcttatctctatgaggtatatctgtgatactgccatctgtcaagatctgttgagaattcagccaagagctgggaagccaatagacaggtctcctggtggacttgcattcaagtttagtgcaatagtttgtagaagcccttactgtagcctgccacctacaggctgctgcaactttaatacccaagcaattcatatttgttacagaaaagataaggaagtaaaaagtaaaagaaattacacctattttttcatctagaaagagcacttaactgttgagtttttgaatccagattttttaccaagcatatatgaatacattttgtagtaaaatggggtcatatatacatgtagccttttacttgtttttaccctatagcagctttattaagatatgattcacatgtacaactaacctacttaaagtatacaattcagtggtttttagtgtatccagagagctgtacaaccatcaccatcatcaattttcaacatttttattaccccctaaaaaacccatacccattagtatcactccccatttttctttaacctcctaaccttaggcaaccagttatctactttctgtctctagaagtttgcatattctagacatttcataaacaatggaattatataatatgtaatcatttgtgactgccttctttttcttagcatgatattttcaaggttgatccatgttgtagcatgtgtcagtaattcacttttatggctgaataatattccattgtatgtatataccacattttatttatccatttatcagttaatggacattccactccctggctattatgtgtggctctttcattcaataatatgttgtgaacatctttatatgaagttactacatacccgttatgtcattcttattggttctgtagtatttcattgtgttaatgtaatttgtttaaccgttccatgttgttgaacatttatgttatttccattgtttctgtattacagttcatagtgtaataactgtatctctttgaccacttccctgattatttcctgaggataagttcctgaaaatgcagatggttttctttctttttgtttttgttttctgagacagagtcttgctctgtcacccaggctggagtgcagtggcatgatcatggcttactgcagccttgacctcatgggctcaagcaattctcccacctcagccttctgagtagctgggactacaggtgtgtactaccacacccagctaattgtttattttttagagagatagggtctcactatgttggccaggctggtctcaaactcctgggctaaagcagtcttcctgcctcagcttcccaaagtgttgtaattatagatgtgagccactgcatttggctggttttcttctttgtctattttttgttgaggtaaaatgtacatacatgaaaatgcacagaccttctgtgtacagttcaatgagtttggatccctataaccaataccccaataaaaatagagaacattttcatcacctcagaaaatattgttgtaccccattccagtcaatttctatctcccatagacaatcactgttctgacttctgtcagcttagattagcttttcctgttgttgaactccatacaaatagtgtctggcttctttcacttaacataatacttgtaagaattatccatattgttgcatataaaagtagtcttttgttgttgttgctaagcaacaaaaatagtatattccattgtgtgaatatactatggtttgtttatccactctcttggtgatagacaagtggctggacatttggattgtttcagtttttaacaaccatttttgtttaagacttgtttttaataagacttttttatataagactttttgtagatatatgttttaatttatcttgggtaaatacccaagagtggaattgctgggctatgtggtttataagaactttatgacactgtgaaactgtttttgcaaagtggttgtatcactttatactcctgcctgcagtgtaggagagttccagttgctccacatcctttgtcaacatttgttgttgccagtctttaattttagccattttggaaggtgtgaagtgatatcttaggtgtggtttcattttgcatttccctgataatcattgatgcagagcaccttttcttgtgcataaatggacatttatgtgtcttccgtgaagtgtcttaagtcttttgcctattttttattggtagtttgtctctttattattgatttgtagacatttcttggatatactggatacaaactctttgtcagatttatatataataaatattttctcccagcctgtggcttgttccactaggcatgtgtcttttgatgagcaaaagttttgcatttttgtgaagtccagctgatcacattttttctttagtggttaggactttttctgccctttgcctatttcaaggtcacatcgtttttgttcagaagtgaaatcgagtttaggactgtattagtcagggttctccagagaaacagaaccaataggacatgtacatattagagggggaaatatttattttcaggaattggcttatgcagttgtggagcctggcaagtcaaaaatctgcatggtgggccagcaggctggagatctaggagagaattgatgttgaagctcaagtacaaaggctgtctgctggtagaatcccttcttccttgggggaggtcagtcttttttctattaagtccttcaatacttgatagaaagttcttaatagaaagtattgaaggacttaatagtaaagtagattattatccatatgtgcgtgggccagttaatgtgtgaggcccacccacattatggataataatctgttttactcaaaatctgctcagtttactcaaaatttggcccaattaatatgtgggcctgcatattatcgtgtctaagataatgtgtccttttacttttcttaggtagcagatggggcaaatgcaattgtgctggggacattgggagacatttcttcccctcttgcgattattggtggcaattgtgctctgcaaggtttcaatcatgaaggaagtgatctcttttggacggtatgaagaagaaaacattctttttggtacccttaagcatttttacttttaatgttcttttttaaccaccaactctactgagtaataatatttataattctgtgcattaaaaaaggatatgaataattcgaatagcattcattcgtgttttgtgtaatcctctccttcatgtagctaatatatttggagtaaatggagaaacgatggcatgctaatggtttggggttttattttcaggttactggagacaatgttaattccttggccttgtgtgactttgatggtgatggaaagaaagaggtatgtgggggaggagatatctctcttgtgtgttcagccaaatgaattttgccatgacagtgacattagtgttgacagaagtgtaagcttctcctggctgattttggtgctctgttgcctaaatgctcagccagttggccccattcgtctttctcttctcttttgaacaataaatcacttgtgcttgtgtaataaatacaaagatcaaagccatggtgtttcagagacacaggagagggcagagagggtagaagagttgggatttcagtcatattcacggtcttatgaattgctcctgatgctttgaaaccatattagtatatagttttcaattttggccaactgttttgaggaatctaaatgttttagagattggcttttagcctttgaaattattcttatggttaccctagaaattagcttcttgagcagttagtaggtgtgacgtgctgtgttgggcaccgacttgcccctctcttgtccatggacactggactctggtgtttgaacagggcttccatctgtaggcagagaaagttgctgatccagggagccttttcaggtactcagggaaataacgtattctggcaagatgtgcagctcccatggcaggataaaagctgcagtagcccctgttccttcattgattgaatctgctgatcctcccattagagggagcatttctgagcatcaaacgattatgaggttgtcaatcttgggtggcagaagcagcatgcaaagtactgtgcaattttttgttttgtttacagaaattttgttgtttgcacttactcacctgaacatgtatgatatttccccttcagcttcttgttggatctgaggattttgatatccgagtttttaaggaagatgagattgtggcagaaatgacagaaacagaggtaagaagctccacctcgaactatggtaaccttgagcaagatagatcagtactgtcagatgaaacatcaagtgagagtgctggggcatctccaaacccaggtggttttaggataaaagcttggggagggggtcagacagagctgtatgttatggtaagaaaagcaataaaaatcctaattaagatatattttgaaaagactgattaaatagagaaaaattattgcatatagttgaatacataaaggcatttcttttaatgagttaatacatgcaaataataataatggcaatcatttattatgtacctattgtatgccaggtagtgctctaagtactttatatgaagtaacatattgaatccttacaacaaccctaataggaagataaattattattatttctatagatgaggaaaatggtgttctggttttttgtttgtttgtttgtttgttttgaggcagagttttactccatcacccaggctggagtgcggtggtgcgatctcggcttactgcaagctccacctcccaagttcaagtgattcgcatgcctcagcctcctgagtagctgggactacaggcacgcaccaccacgcctgggtaatttttgtgtttttaatagagacggggtttcaccatgttggccaggctggtgttgaactccagacctcaagtgatccgcccaccttggcctcccaaagtgttgggattacaggggtgacccaccgcgcctgtattttttgttaagttacttgtacgtagtcttggctatgaaatggcatggtcagcatttgaacctttatgccccttcctcctcatcatgtgtattcagtagggctgaagtgcataaatgagatgtctatatttttttcttcctgcaaattcagtacttctttggcacatttctgtaggtaaacttaaaaattatagaacttgtgattagaatcactcatgtaactgaacctgagatatttcttaatatcccaggttgtttaggcctgatgtttaggcctggtgcagtggctcatgcctgtaatcccagtgctttgggaggccaaggtgggaggatcacttgaggccaggagtttgagacccgcctgggcaacataacaagactccatctctacaaaaaatattaaaaaattagccagaaggtgatggcacacgtctgtagtcccagctgcttgggagactgaggcaggaggatcccttgagcccaggagcttgaggctacagtgagctatgatcacgccactgcattccacccaggggcaacgagaacaagactctgtctcaaaaataaaatttttaagaagtaacagtgttaagagttaggaaaataaagacaaaaataaagcaaaaagcactatctaaagattacctgtatcctttatggttttgacattcttaggatatttatttgctgctggttttccaggattgggcaagactcaaacagaaaaaaataagatattcttaattaaggaataagaggataaaggagcaatagcttgtgaacgttgtaagtggacagaaagaaaccagtaaaagagagtcttagagatcagaatggtgggattttgcaaaatttagttatgtggtatttaggagtctgtatcagaaaagctcgagggcactagtctcaaaactgaccttggccacttgtctttaaattacttgcttcatgtcactcataaaagctgcctaagaaggtcagacttcttttctcctaactataaaaggagacaaaaagcaaaacctacacattgacatacagtgctaccaatgattttaactaagttatcctatagcaagagtcatcagtttttatttagtcctactatactttttatatattcacagttatcatgatgtaagatgatagttgtggacagagaagaaatgaagaggagaaatgggtgccaaaaggagcagtctgaggatgtgtgtttatacagggagtctgttttttattttattatttttttgagatggagtttcgctcttgtcgcccatgctggagtgcagtggcgtgatcttggctcactgcaacctccgcctcccaggttcaagtgattctcctgcctcagcctcccgagtagctgggattacaggcacctgccaccgcgcccagctaatttttgtatttttagtagagatggggtttcgtcatgttggccagactggtcttgaactcctgacctcaggtgatccacccgcctcagcctcccaaagtgttgggattacaggcatgagccaccatgcctggcccgggagtctgttttgtgtgtatgtgcttatatgtgctttctgaagagagggcccggagccttcattacattcttaaaggggtttgcaacctcccccaccaccaaaaaaaaacaacttgagaatccctggctgatagatggtgtgtcccgaattctcatatccctttcattctaatttgtggtaaatcttttctcctttggtgggaatcattcagattttgttggatttttattgcttgttaatattagatttgaggagactgaattctttgaaacatctctttcctaaatcctagaaaagaggacaagaacctggaatagagttagggatttgaggggacttgttgatcttctagtccacaaaaggaagaaactggtgaactaaggaagcagtaaaagagctgaggaatctggggctaaatttatgaaaatatggacttcataacattgttcacttgcagggccattttcctgttctctttgttaggttttgctcctagctcaaatatcatttcccagatcagcaaaatcatgattcatttggcagttgaacagtatgaagtattgtcagaagaatgccttgagctaaataattctggaatcctacacagcactttgtattcatagttaagtgaagtgggtggttttgtagaaaagctgtaggtgtaaaggaaattatataactattctctgctttatacaatttatttcttaatatctcttgtattaggaacagaattagaaagtagatctgcaggatcatggatatcattaagctttggttttaactttaaaggaaagttttgttcagtacctaaaattttatccttttaaggatgtcaaatccttgaacagtcctataaatatttctgtatcatatatgcattctgtatattgttatatactacacaaatccacgtgcctgggtttttacttttcaaaggattatgtgttctttcttttacctctagcaaacaaattatgtcatagaaagaaaagtgtatacatgaagtaagatattcaattgtgtattgttataagtcttttaaaaattgagactgtaggatgttataagttaagtaataatcattaaagcctcttgggtgaacatatataatatctattgtatatgcatattttcgatcttgtgtagttagcttatgttttccttagtccttcagttttcatgtgttttttaaaaataattttgtgaaacttgccacataaggttgctctaaaacaccaaaccctgtgagtttatttaaatctgattatacaactctgaagtagatgacatgtatcgtagagaagaggaatacattccccactaatggattggaagcgcttttaaatctaattttaacatagttgtaacaaggagtgtgaagtcttataaagccgtacttgacagtaaactgagtcttaatgaaaagatgttgtgtttttgtggattgttttgcagatagtcacctctctttgtcccatgtatggcagtcgatttggttatgccctttccaatggcacagttggagtttatgacaaaacatcccgatactggagaattaaagttagtataatttagcctttgatattcaggcgcttgatagttattgtgagacttctgtgctaattattaaaattctttttcagtcgaaaaatcatgccatgagcattcatgcttttgaccttaattctgatggagtgaatgaactgataactggttggtccaatgggaaggtaagtttgaatagcaaagttcaggtataattcagagtagtaattgtccaaggtgtattggctgtaggacttagaacagtaacattgggatgtaaacttcagttcgttccttggcaatgtttttacatttaacttaataatcttgacacattcttcctgctatcattgtcaagagctgcacagtgagagagtgtaagtcttataagcggtgtttgggggaaatcttcggggagattctgtctaaatctcttatttgaagtgctgagaatccatcagccagattgattctaggtagtacaacagtaaaaaaggagttttaaggaattgtttgaatagctcttttccaatacatcttcaaaactgcctgaaaacttagcactaataggaagaatcatgttagcatattgttttctgagctataactttaaaataaaatccttttgcttgctttccttttttaacttcaaatcagaattttttacagtcttttggcaagtcaggattgtcttcttagaagctgcctaggtagctgccagatctccatggataccatttgccctcgctttcttgtctgtcagtgttggattgcctgaaggggatcagcaaattcttatcttttcttctttgatttatctttacttttctctagcaccttgtaagcattcctttggtgttacgtgaagaacggattctaaaaagctgttatgttggtttctgcttcttcacttagttttgtcattagtatgggtactaaaaattataagactgtatagttgcttattaagaaatatgaaagtctgtgaaatgggtgtcttagttggtttgggctgctgtaacaaaataccatagggtgggtggcttataaacaacagaaatttatttcttatagttctggaggctgggaagcccccatcaaggtgttggcagtttcagtgtctggtgagggaccacttcctcataggagccttacagggtggaaggggcaagggatctctctgggccttcttttatagggcactaatcctgttcatgggggctctgcccttatgacctaatcacctctcacaagctctacttgccaataccattcattaccttggctaataggattcagcataggaatttgtgggggcaaaaacattcagatcatagcagtggatcatattttgagggaatataaattattatgactgacttaagaattagaaaactactagacttgaaaacttgtcaggttaccttgaaatataattgttgacctagatgtttttatagttaaatgcttttgaaattttaagggatttctattatgtaatgcgttcctgagcatgaaaaagataagaaaattatataagtggaaaaaccgattatctacatctaacagaaatatacaaaaaggaaatatacagatccaacttgtgaatacaggtgtgaaaatattaaataaatgctgctagacaattaactttgtcttttgtatgtcatttgatgagttggagggccatcctttcctttcagggtaaaacctcccagttggattaagcaaaagatcagaatatccacagaaatattaatttgtagtcctgcttcttagttagcaaatgagccttcttatttgctaaatattgtggaaatgcagtggtagaagccattaggtagctaggctttaactagaaagaagcaagttcaggtcagtctgagttagagggctacattaatgtgctttgttaaaaatgcaggtcattcgttctttcacaggctttagcattcataattttcaggcttccatgatgttattaatagcattaatacttgacagtgatatactgtagacaaggggtaggctgtaacctaaattactttatgttttggttgcaaagttttgcccagaagattgtttatgaaaagacaaaactagtgagtagcattggtcatcgaaatgattgctatgctagattttctgtagctagccttttgttgataatacctgtgtccttgcctggaacataatcatctttttttttttttttgagactggagtctcgctttgtcacccaggctggagtgcagtggcgcaatctcggctcactgcaacctccgcctcccgggttcaagcgattctcctgcctcagcctccctagtagctgggactacaggtgcgtaccaccacacccagctaattttttgtatttttagtacagacagggtttcaccatgttagccagaatggtctcgatttcctgacctcgtgatccgcctgcctcggcctcacaaagtgctggcattacaggcgtgagccactgtgcccggcctcataatcttcattttaagtgatggtcacttattatcacttttgagatgcatttgtttctgatcagtcatttatttatttgttctctctcttggaaatgggagacttagaggataggagagctctctaaagtatctgaatagtttttatgtggaagaggaactcttaacagggttgttgtaaaaggttgcatggtggaagactgggctaactccgtagtttctgaacttcagattcaacatactttatacatttatatataataaagatacaatttttatatagagctaacatttattacgtacttctgtgtgtcaggccctgttgatatatgttaacttcattaggcctcagttatacccaatgggatatagtactgttaatttctccatgttctggttattgaaccccagatgaaaagaccaagcacagaatggttaagaaacttgcaagatgctgtggatagtacgtggcagagctagattctgaacctgagcggtttggccattaagcccatgcccttttgcactgtgctgtgtgtactatatgtactggctcttagcagacccgtttcttcaagtgaagcattgtgtgaaggcctatgaaaaacagcttttatttaaaaagaaggaagcacagctggttgaggctctttagggtccctcttggccccagcagtcataggtatctcctgagaagttgtagggcttcatagaatactcttgaaaactgctagactaaatgacctttaaagctgatttttatttttaaattttgtggtttttaaacatgtagcataagcaacttttaaatttgtgttttatttgtaggttgatgctcgaagtgaccgaactggggaggtcatctttaaggacaatttttcttctgcaattgccggtgtggtagagggagattaccggatggatggccacatacagttaatctgctgctcagtggatggggaaagtaaattgggatgagaaaaatccttaaaaagtcacgttttccatttgattgggtcaaaatatcaggaaatttcacctgaagtatttgtaccgagatcctgtagttctaataaattcaccaaagttggggagaacttaggtttttgtttttaagagcaggtaattgatgacctaaaagtatacctggttatacttgcggttttttccttctgttcagtccggggctacctgcctggcacggctgagatgaggggcaacctcatggacaccagtgcagagcaggacctgatccgagagctgagtcagaagaagcagaatctgttgctggaactccgtaactatgaggaaaatgccaaggtaggtgtaggtcctaatgtgaccaggtaatggaggctgaaatgttgagactgaccgggaggatcagcaaatatggaagaatgagagtgtcattgccagggtgtggcctttttgccattgtcagaattgagaggggatatatgctttcgtcttgaaatttcatttccaggtagttaaactgtagaaatgttttcctgattgtttaaggacatttcctgcagcactatttatttatagcagtgaaaacagctggaagaaacttagatgttcgtcagcagtagggagtatgtgctaaggaatattaagcagctcaaagaatgaatacttggactgatatggaaggatatctgtcgtcttaccaagtgacaaaaggcaagaacaatatagaatgtcttttatctttttcaaaaacaaacatgttaaaaacagacaactgtaaaaactgtgtgtgtgcatacagcaaactggctgaaatattcctttaatttgtcctgtaatgcattactgtatttgaatttgatgtaacaagggaatttgtttgcttactttaaaagaacaatacttcaaaaatgttaaagtcatgatgggatacagtggaccatacccatagaaagatgcaagggtattttcccacagggccagatagagcaagggagcactaatgaggtgagttctctgaattctaaagaatcagattactataataataataatatgctggaggctctgtcttttgaagctgaatagcaatattatttaaaattgatattagttcagtgttttggtgactgagtaggaaatgggtggggtgttttgcaggctgaattggccagtccactgaacgaggctgatgggcatcggggcataatcccagccaataccaggctccacaccacgctctcagtcagcctggg

SEQ ID NO: 10957 - DNA, 1525 bp, Homo sapiens
gctgtttcgcgtccggcctgaggcggctggggccgcgcaggtagtgtccctgcacttcttgcccgggcgcgtgaggccagctccgctgcgcttgtctccagcttccagccctcctcccctaagccgccgccatcatgctgctgcctgtgttcaccctgaaactgcgccacaaaatcagcccccgaatggtggccatagggcgctacgacgggactcacccgtgcctggcggccgccacccaaacgggcaaggtttttattcataatcctcatacacggaaccagcatgtcagtgcatccagggtcttccagagccccctggaatctgatgtttctcttctcagcattaaccaggcagtcagctgtctgactgcaggcgtattgaaccctgagcttggctatgatgcccttttagtggggacacagactaatcttttggcttatgatgtctacaataattcggatttgttctacagagaggtagcagatggggcaaatgcaattgtgctggggacattgggagacatttcttcccctcttgcgattattggtggcaattgtgctctgcaaggtttcaatcatgaaggaagtgatctcttttggacggttactggagacaatgttaattccttggccttgtgtgactttgatggtgatggaaagaaagagcttcttgttggatctgaggattttgatatccgagtttttaaggaagatgagattgtggcagaaatgacagaaacagagatagtcacctctctttgtcccatgtatggcagtcgatttggttatgccctttccaatggcacagttggagtttatgacaaaacatcccgatactggagaattaaatcgaaaaatcatgccatgagcattcatgcttttgaccttaattctgatggagtgaatgaactgataactggttggtccaatgggaaggttgatgctcgaagtgaccgaactggggaggtcatctttaaggacaatttttcttctgcaattgccggtgtggtagagggagattaccggatggatggccacatacagttaatctgctgctcagtggatggggaaagtaaattgggatgagaaaaatccttaaaaagtcacgttttccatttgattgggtcaaaatatcaggaaatttcacctgaagtatttgtaccgagatcctgtagttctaataaattcaccaaagttggggagaacttaggtttttgtttttaagagcaggtaattgatgacctaaaagtatacctggttatacttgcggttttttccttctgttcagtccggggctacctgcctggcacggctgagatgaggggcaacctcatggacaccagtgcagagcaggacctgatccgagagctgagtcagaagaagcagaatctgttgctggaactccgtaactatgaggaaaatgccaaggctgaattggccagtccactgaacgaggctgatgggcatcggggcataatcccagccaataccaggctccacaccacgctctcagtcagcctggg

SEQ ID NO: 10958 - DNA, 6175 bp, Homo sapiens
actgggggaaagtctgactcctgagatccttgttgctcttgacaaaaattgcaaactctttccattccggtaagaatgaatatggagcccgtaagctatttctgctcctgtactttctcagcatattggatttctggaaaactttgtaagaattggtttgttcagaactgttataaaaggaagtgtgatgtggtggtggctggagcgcagggcctggagcacaccaggctcttgtcttagccctgtcaccagtctcaagaccttggcaaagggccttaactcttccgacctcatatggaaatgaagggttggtgtcaggttcaaatgcaattaacattgaccaaggcatgttataaagtgttacacaaacggaacatgaaggcagtgttcagtggctgcacgttttctatgtttttagtcaattcttttgaaaattattttttgttgaataggctgccttgggtaggtgttaatttaaaattaattctgtttggatttatgtgaaagagatgaaatactcatgtaaattttaaaaattttagaactagaaggggctagagggatccctagtccagtgtttttcatcctcccaacctttttggtcatattgcccaccttggaacttttttagaccaagaaaattttcccagtgaaattctgatacctcagatatactttgtatctctttttgtactgtggtcctgcgaagggctacacgattccccatcgcaaacccatttacctgtcctgggagtgatctcgcccctcttaagactgcattttatagtccaaacctcctttttacaggtgaagtctaggaaagttgaataatttatgcagacactcagattatatttatgatagttgaaactgttgaatttattatctttgggctaattacttagttctatgtcactggtataaactgtgaaagccttcaagatacttgatttgcatgactcggtttaagtttgtgaaacaggtttactaactagcagaccattttaaggtctaggaagtgattcattaggtgcttggatgaaagataataaaggaagtgtttattctgttttccatgatcttcttggtgtgtggcaatcacattgaaggtggtagcagcttattctaggttgatcgggaaaaggctagctcctaagagtgctttgacatcctgctggtgggtagcatgtaagctggcctggtaagcagtgactagatcttgttcattaccttgttccttacaaggctaagaaccactggatttccgtgatttcataatgactgaaagttgtccatgcattgaactatgtacgagtgttttaagtttcataggagattaaagtgacctcttgttaatgtggatgtgttaataacctggttcttttttaaaaaaatgtatgatactaattttttatattttaagggaatgtaattagttatttttgtttcaggtttttattcataatcctcatacacggaaccagcatgtcagtgcatccagggtcttccagagccccctggaatctgatgtttctcttctcagcattaaccaggcagtcagctgtctgactgcaggcgtattgaaccctgagcttggctatgatgcccttttagtggggacacagactaatcttttggcttatgatgtctacaataattcggatttgttctacagagaggcaagtataacctttataaccataaaattgtcattactcattaatgtccattttttatgcttagaagagatcagatcatttattttggtctgtttgttgtatgactgttatagtataggtaaacaacatggagattttgctgttaacatctgctttatgtactcggaacttatttatttggttatggttgctaatcgcttggtgacactcgagcttatctctatgaggtatatctgtgatactgccatctgtcaagatctgttgagaattcagccaagagctgggaagccaatagacaggtctcctggtggacttgcattcaagtttagtgcaatagtttgtagaagcccttactgtagcctgccacctacaggctgctgcaactttaatacccaagcaattcatatttgttacagaaaagataaggaagtaaaaagtaaaagaaattacacctattttttcatctagaaagagcacttaactgttgagtttttgaatccagattttttaccaagcatatatgaatacattttgtagtaaaatggggtcatatatacatgtagccttttacttgtttttaccctatagcagctttattaagatatgattcacatgtacaactaacctacttaaagtatacaattcagtggtttttagtgtatccagagagctgtacaaccatcaccatcatcaattttcaacatttttattaccccctaaaaaacccatacccattagtatcactccccatttttctttaacctcctaaccttaggcaaccagttatctactttctgtctctagaagtttgcatattctagacatttcataaacaatggaattatataatatgtaatcatttgtgactgccttctttttcttagcatgatattttcaaggttgatccatgttgtagcatgtgtcagtaattcacttttatggctgaataatattccattgtatgtatataccacattttatttatccatttatcagttaatggacattccactccctggctattatgtgtggctctttcattcaataatatgttgtgaacatctttatatgaagttactacatacccgttatgtcattcttattggttctgtagtatttcattgtgttaatgtaatttgtttaaccgttccatgttgttgaacatttatgttatttccattgtttctgtattacagttcatagtgtaataactgtatctctttgaccacttccctgattatttcctgaggataagttcctgaaaatgcagatggttttctttctttttgtttttgttttctgagacagagtcttgctctgtcacccaggctggagtgcagtggcatgatcatggcttactgcagccttgacctcatgggctcaagcaattctcccacctcagccttctgagtagctgggactacaggtgtgtactaccacacccagctaattgtttattttttagagagatagggtctcactatgttggccaggctggtctcaaactcctgggctaaagcagtcttcctgcctcagcttcccaaagtgttgtaattatagatgtgagccactgcatttggctggttttcttctttgtctattttttgttgaggtaaaatgtacatacatgaaaatgcacagaccttctgtgtacagttcaatgagtttggatccctataaccaataccccaataaaaatagagaacattttcatcacctcagaaaatattgttgtaccccattccagtcaatttctatctcccatagacaatcactgttctgacttctgtcagcttagattagcttttcctgttgttgaactccatacaaatagtgtctggcttctttcacttaacataatacttgtaagaattatccatattgttgcatataaaagtagtcttttgttgttgttgctaagcaacaaaaatagtatattccattgtgtgaatatactatggtttgtttatccactctcttggtgatagacaagtggctggacatttggattgtttcagtttttaacaaccatttttgtttaagacttgtttttaataagacttttttatataagactttttgtagatatatgttttaatttatcttgggtaaatacccaagagtggaattgctgggctatgtggtttataagaactttatgacactgtgaaactgtttttgcaaagtggttgtatcactttatactcctgcctgcagtgtaggagagttccagttgctccacatcctttgtcaacatttgttgttgccagtctttaattttagccattttggaaggtgtgaagtgatatcttaggtgtggtttcattttgcatttccctgataatcattgatgcagagcaccttttcttgtgcataaatggacatttatgtgtcttccgtgaagtgtcttaagtcttttgcctattttttattggtagtttgtctctttattattgatttgtagacatttcttggatatactggatacaaactctttgtcagatttatatataataaatattttctcccagcctgtggcttgttccactaggcatgtgtcttttgatgagcaaaagttttgcatttttgtgaagtccagctgatcacattttttctttagtggttaggactttttctgccctttgcctatttcaaggtcacatcgtttttgttcagaagtgaaatcgagtttaggactgtattagtcagggttctccagagaaacagaaccaataggacatgtacatattagagggggaaatatttattttcaggaattggcttatgcagttgtggagcctggcaagtcaaaaatctgcatggtgggccagcaggctggagatctaggagagaattgatgttgaagctcaagtacaaaggctgtctgctggtagaatcccttcttccttgggggaggtcagtcttttttctattaagtccttcaatacttgatagaaagttcttaatagaaagtattgaaggacttaatagtaaagtagattattatccatatgtgcgtgggccagttaatgtgtgaggcccacccacattatggataataatctgttttactcaaaatctgctcagtttactcaaaatttggcccaattaatatgtgggcctgcatattatcgtgtctaagataatgtgtccttttacttttcttaggtagcagatggggcaaatgcaattgtgctggggacattgggagacatttcttcccctcttgcgattattggtggcaattgtgctctgcaaggtttcaatcatgaaggaagtgatctcttttggacggtatgaagaagaaaacattctttttggtacccttaagcatttttacttttaatgttcttttttaaccaccaactctactgagtaataatatttataattctgtgcattaaaaaaggatatgaataattcgaatagcattcattcgtgttttgtgtaatcctctccttcatgtagctaatatatttggagtaaatggagaaacgatggcatgctaatggtttggggttttattttcaggttactggagacaatgttaattccttggccttgtgtgactttgatggtgatggaaagaaagaggtatgtgggggaggagatatctctcttgtgtgttcagccaaatgaattttgccatgacagtgacattagtgttgacagaagtgtaagcttctcctggctgattttggtgctctgttgcctaaatgctcagccagttggccccattcgtctttctcttctcttttgaacaataaatcacttgtgcttgtgtaataaatacaaagatcaaagccatggtgtttcagagacacaggagagggcagagagggtagaagagttgggatttcagtcatattcacggtcttatgaattgctcctgatgctttgaaaccatattagtatatagttttcaattttggccaactgttttgaggaatctaaatgttttagagattggcttttagcctttgaaattattcttatggttaccctagaaattagcttcttgagcagttagtaggtgtgacgtgctgtgttgggcaccgacttgcccctctcttgtccatggacactggactctggtgtttgaacagggcttccatctgtaggcagagaaagttgctgatccagggagccttttcaggtactcagggaaataacgtattctggcaagatgtgcagctcccatggcaggataaaagctgcagtagcccctgttccttcattgattgaatctgctgatcctcccattagagggagcatttctgagcatcaaacgattatgaggttgtcaatcttgggtggcagaagcagcatgcaaagtactgtgcaattttttgttttgtttacagaaattttgttgtttgcacttactcacctgaacatgtatgatatttccccttcagcttcttgttggatctgaggattttgatatccgagtttttaaggaagatgagattgtggcagaaatgacagaaacagag

SEQ ID NO: 10959 - DNA, 564 bp, Homo sapiens
actgggggaaagtctgactcctgagatccttgttgctcttgacaaaaattgcaaactctttccattccggtttttattcataatcctcatacacggaaccagcatgtcagtgcatccagggtcttccagagccccctggaatctgatgtttctcttctcagcattaaccaggcagtcagctgtctgactgcaggcgtattgaaccctgagcttggctatgatgcccttttagtggggacacagactaatcttttggcttatgatgtctacaataattcggatttgttctacagagaggtagcagatggggcaaatgcaattgtgctggggacattgggagacatttcttcccctcttgcgattattggtggcaattgtgctctgcaaggtttcaatcatgaaggaagtgatctcttttggacggttactggagacaatgttaattccttggccttgtgtgactttgatggtgatggaaagaaagagcttcttgttggatctgaggattttgatatccgagtttttaaggaagatgagattgtggcagaaatgacagaaacagag

SEQ ID NO: 10960 - DNA, 2467 bp, Homo sapiens
gcagcggtgggctgagctaaaatggctgaggagagagtcgcgacgagaactcaatttcctgtatctactgagtctcaaaaaccccggcagaaaaaagctccagagtttcctattttggagaagcagaactggttgattcatcttcattatatccggaaagattatgaagcctgcaaggctgttatcaaagaacagcttcaagagactcagggattgtgtgaatatgctatctatgtccaagcattgatatttcgcctagaaggaaatatccaagaatccctagaactcttccagacatgtgcagttcttagtcctcagagtgctgataacctcaagcaggtggccagatctttatttcttttgggaaaacataaagctgccattgaagtatataatgaagcagctaaactcaaccagaaagattgggagatcagccataacctaggagtttgctacatatacctgaagcagttcaacaaggcacaagaccagttgcacaatgccctgaatcttaataggcacgatctgacttatataatgctggggaagatccacttgctggagggagacttggacaaggccattgaagtctacaagaaagcagtggagttctcaccagaaaatacagagcttcttacaactttaggattactctacttacagctcggcatttaccagaaggcatttgaacatcttggcaatgcactgacttatgaccctaccaactacaaggccatcttggcagcaggcagcatgatgcagacccacggggactttgatgttgccctcaccaaatacagagttgtggcttgtgctgttccagaaagtcctccactctggaataacattggaatgtgtttctttggcaagaagaaatatgtggcggccatcagctgcctgaaacgagccaactacttggcaccctttgattggaagattctgtataatttgggccttgtccatttgaccatgcagcagtatgcatcagcttttcattttctcagtgcggccatcaacttccagccaaagatgggggagctctacatgctcttggcagtggctctgaccaatctggaagatatagaaaatgccaagagagcctacgcagaagcagtccacctggataagtgtaaccctttagtaaacctgaactatgctgtgctgctgtacaaccagggcgagaagaagaacgccctggcccaatatcaggagatggagaagaaagtcagcctactcaaggacaatagctctctggaatttgactctgagatggtggagatggctcagaagttgggagctgctctccaggttggggaggcactggtctggaccaaaccagttaaagatcccaaatcaaagcaccagaccacttcaaccagcaaacctgccagtttccagcagcctctgggctctaatcaagctctaggacaggcaatgtcttcagcagctgcatacaggacgctcccctcaggtgctggaggaacatcccagttcacaaagcccccatctcttcctctggagccagagcctgcggtggaatcaagtccaactgaaacatcagaacaaataagagagaaataagaatagaatgaatgaccccaaaatagggttttcttgggcgaggatgtgctggattaggaaaggtgacatgacacaggcagagcagagtggcacccaccacagaatacagtgtgtgttattacgaggagccagcagttgagcctaaggtccttctacctacctggtattggcatttgaggtcggaaaccctctactgccccataagccaggaaaagtgaaaagagaacacagttcctttaagaactggcagcaaggcttgaggccttatgtatgtagctgagtcagcaaggtacatgatgctgtctgctttcaaaaggacttttctctcctagctgactgactccttccttagttcaaggaacagctgagacagacctctgctgagtagctctgtgatgacaaagccttggtttaactgaggtgatcctcaggttgtgaggtttattagtccccaaggcaaacacaaatattagattaataatccaactttaatagtatacatttaaaagaaaaaaaacaaaagccctggaagttgaggccaagcctgctgagtattgcagctgcatttgcccaaagggaatccagaacaagtccctccctgtattttgttcttgagaggggtcagtctagaagctagatcctatcaggatgaggagcagcagcccagggcttgtctggatcagcaccaacgattttaaagaaaaaaggaagagtttcttagatgagtaattgttattgaagatagtcagtgataaccactgaccagatgctatcaatacactatgtgtcctttttagaataaagattacatatcatcattcctttggggaaaattgttattcaggtataaaaacaagagatcataataaaaacctaaaagaaccta

SEQ ID NO: 10961 - DNA, 2450 bp, Homo sapiens
gtctgggaaaccgccgacttccggccgcgcagcggtgggctgagctaaaatggctgaggagagagtcgcgacgctccagagtttcctattttggagaagcagaactggttgattcatcttcattatatccggaaagattatgaagcctgcaaggctgttatcaaagaacagcttcaagagactcagggattgtgtgaatatgctatctatgtccaagcattgatatttcgcctagaaggaaatatccaagaatccctagaactcttccagacatgtgcagttcttagtcctcagagtgctgataacctcaagcaggtggccagatctttatttcttttgggaaaacataaagctgccattgaagtatataatgaagcagctaaactcaaccagaaagattggcctaggagatcagccataacctaggagtttgctacatatacctgaagcagttcaacaaggcacaagaccagttgcacaatgccctgaatcttaataggcacgatctgacttatataatgctggggaagatccacttgctggagggagacttggacaaggccattgaagtctacaagaaagcagtggagttctcaccagaaaatacagagcttcttacaactttaggattactctacttacagctcggcatttaccagaaggcatttgaacatcttggcaatgcactgacttatgaccctaccaactacaaggccatcttggcagcaggcagcatgatgcagacccacggggactttgatgttgccctcaccaaatacagagttgtggcttgtgctgttccagaaagtcctccactctggaataacattggaatgtgtttctttggcaagaagaaatatgtggcggccatcagctgcctgaaacgagccaactacttggcaccctttgattggaagattctgtataatttgggccttgtccatttgaccatgcagcagtatgcatcagcttttcattttctcagtgcggccatcaacttccagccaaagatgggggagctctacatgctcttggcagtggctctgaccaatctggaagatatagaaaatgccaagagagcctacgcagaagcagtccacctggataagtgtaaccctttagtaaacctgaactatgctgtgctgctgtacaaccagggcgagaagaagaacgccctggcccaatatcaggagatggagaagaaagtcagcctactcaaggacaatagctctctggaatttgactctgagatggtggagatggctcagaagttgggagctgctctccaggttggggaggcactggtctggaccaaaccagttaaagatcccaaatcaaagcaccagaccacttcaaccagcaaacctgccagtttccagcagcctctgggctctaatcaagctctaggacaggcaatgtcttcagcagctgcatacaggacgctcccctcaggtgctggaggaacatcccagttcacaaagcccccatctcttcctctggagccagagcctgcggtggaatcaagtccaactgaaacatcagaacaaataagagagaaataagaatagaatgaatgaccccaaaatagggttttcttgggcgaggatgtgctggattaggaaaggtgacatgacacaggcagagcagagtggcacccaccacagaatacagtgtgtgttattacgaggagccagcagttgagcctaaggtccttctacctacctggtattggcatttgaggtcggaaaccctctactgccccataagccaggaaaagtgaaaagagaacacagttcctttaagaactggcagcaaggcttgaggccttatgtatgtagctgagtcagcaaggtacatgatgctgtctgctttcaaaaggacttttctctcctagctgactgactccttccttagttcaaggaacagctgagacagacctctgctgagtagctctgtgatgacaaagccttggtttaactgaggtgatcctcaggttgtgaggtttattagtccccaaggcaaacacaaatattagattaataatccaactttaatagtatacatttaaaagaaaaaaaacaaaagccctggaagttgaggccaagcctgctgagtattgcagctgcatttgcccaaagggaatccagaacaagtccctccctgtattttgttcttgagaggggtcagtctagaagctagatcctatcaggatgaggagcagcagcccagggcttgtctggatcagcaccaacgattttaaagaaaaaaggaagagtttcttagatgagtaattgttattgaagatagtcagtgataaccactgaccagatgctatcaatacactatgtgtcctttttagaataaagattacatatcatcattcctttggggaaaattgttattcaggtataaaaacaagagatcataataaaaacctaaaagaacctatg

SEQ ID NO: 10962 - DNA, 777 bp, Homo sapiens
cgcgcagcggtgggctgagctaaaatggctgaggagagagtcgcgacgagaactcaatttcctgtatctactgagtctcaaaaaccccggcagaaaaaagctccagagtttcctattttggagaagcagaactggttgattcatcttcattatatccggaaagattatgaagcctgcaaggctgttatcaaagaacagcttcaagagactcagggattgtgtgaatatgctatctatgtccaagatttcttttgggaaaacataaagctgccattgaagtatataatgaagcagctaaactcaaccagaaagattgggagatcagccataacctaggagtttgctacatatacctgaagcagttcaacaaggcacaagaccagttgcacaatgccctgaatcttaataggcacgatctgacttatataatgctggggaagatccacttgctggagggagacttggacaaggccattgaagtctacaagaaagcagtggagttctcaccagaaaatacagagcttcttacaactttaggattactctacttacagctcggcatttaccagaaggcatttgaacatcttggcaatgcactgacttatgaccctaccaactacaaggccatcttggcagcaggcagcatgatgcagacccacggggactttgatgttgccctcaccaaatacagagttgtggcttgtgctgttccagaaagtcctccactctggaataacattggaatgtgtttctttggcaagaagaaatatgtggcgg

SEQ ID NO: 10963 - DNA, 1864 bp, Homo sapiens
gagctaaaatggctgaggagagagtcgcgacggtgagcgccgagattctctttagttgcccggccgcagggcaaggcaagctggcgggtggcttttgtcccatgcagcggttcctggagagaggcggagctgggtgccgagcgtctcagggtgggcggggcgacacggtcccctttttactgtcccgggaactggtcgcctggggcaagtctggatacttagcagcacaggtcctgttctaggactgtagtccctcttggggtgcgctggacggagaagggagacttttcaccagtaatggctcttaccgtagtgccatctttttctgtctcgggggtttggaagagaactcaatttcctgtatctactgagtctcaaaaaccccggcagaaaaaagctccagagtttcctattttggagaagcagaactggttgattcatcttcattatatccggaaagattatgaagcctgcaaggctgttatcaaagaacagcttcaagagactcagggattgtgtgaatatgctatctatgtccaagcattgatatttcgcctagaaggaaatatccaagaatccctagaactcttccagacatgtgcagttcttagtcctcagagtgctgataacctcaagcaggtggccagatctttatttcttttgggaaaacataaagctgccattgaagtatataatgaagcagctaaactcaaccagaaagattgggagatcagccataacctaggagtttgctacatatacctgaagcagttcaacaaggcacaagaccagttgcacaatgccctgaatcttaataggcacgatctgacttatataatgctggggaagatccacttgctggagggagacttggacaaggccattgaagtctacaagaaagcagtggagttctcaccagaaaatacagagcttcttacaactttaggattactctacttacagctcggcatttaccagaaggcatttgaacatcttggcaatgcactgacttatgaccctaccaactacaaggccatcttggcagcaggcagcatgatgcagacccacggggactttgatgttgccctcaccaaatacagagttgtggcttgtgctgttccagaaagtcctccactctggaataacattggaatgtgtttctttggcaagaagaaatatgtggcggccatcagctgcctgaaacgagccaactacttggcaccctttgattggaagattctgtataatttgggccttgtccatttgaccatgcagcagtatgcatcagcttttcattttctcagtgcggccatcaacttccagccaaagatgggggagctctacatgctcttggcagtggctctgaccaatctggaagatatagaaaatgccaagagagcctacgcagaagcagtccacctggataagtgtaaccctttagtaaacctgaactatgctgtgctgctgtacaaccagggcgagaagaagaacgccctggcccaatatcaggagatggagaagaaagtcagcctactcaaggacaatagctctctggaatttgactctgagatggtggagatggctcagaagttgggagctgctctccaggttggggaggcactggtctggaccaaaccagttaaagatcccaaatcaaagcaccagaccacttcaaccagcaaacctgccagtttccagcagcctctgggctctaatcaagctctaggacaggcaatgtcttcagcagctgcatacaggacgctcccctcaggtgctggaggaacatcccagttcacaaagcccccatctcttcctctggagccagagcctgcggtggaatcaagtccaactgaaacatcagaac

SEQ ID NO: 10964 - DNA, 12816 bp, Homo sapiens
ctgaagcagttcaacaaggtaatttatagaagtggtgatagatttcactgagggtgcacttgttgcagaagttgttacattgctcatttggtattatccctagtgcttgcagaggtttttggaactgaaaattgaaagtacctttatacatttttttctgttttaattctcacttgtcattattcatctgttgttttctgcttgtaataagaacatggaaagttctagaaatatgagggaatggcagtttttctcctttcttctttttctctacctccagttaaatttcccagtttagaaacagatgcttaataaaacatacatatcaaaaagtggacccttaagtcttaaaggtgtgatcatgaccatgtgagctatctccatgccctgacggcaacttagtttttagggtcattgaaaataaattttaaattttaagtggatctgatttctgagttttcagttttaattttatagttattttccatgatgagaaattatatttcactgtgattaagctatagactcctatatcagagaagacaagttgagcttacctcaaatttggtactcaggtaagaaaaagtatatatcataattgaggagtagacaaaattactgagagctctaaaacttagtgatgagagcgttgggtagtttccttcatagagctcacagttagtgattgtgaagttttattctcctttctccgatgccaccaggactgagaatctgaattggttagtacccatttgacaatgtttagtttgtgtcaatttgcagactggtgtaactagtatcccacactggtgtgaaaaaaaatatgcacattagcagttggggtgtaaaagtaacttttctcctgagataacaatatatatacataaaatacatttagtgggccccttaggttttgtagatggatctatagttttatatacttggttaggagatttttctcttcagagacaatttcaaacaggcacatttctattcacaggattattctgagtcaggggaaaagaaggatttgtctttggttggatctgtgctgagaagaaatatatttagattttactgtacagctaacaggctaggcaaatacaatacctggcatttatataaatgcttgttgaatctgtgaatgactaaacaaagcccttttgtttactaggagaaggtaagctcctccagagcaaggagttggttttataaactcaaatatatttagcatctagaacagcaagcagttgggtgaataaatgagaacaatctatttattcatttatcatcacattgatggggaaacctggcccaccatagggaaggttgtgcacttggtcagtgttacagctgggatttagtttagtgtagtactctacactgtactatgatggcccttttgacttatgaagtatgagtcataggtgtgaatatcaggcagaaaacattcagaaagattaatcgtcttgtataaattcttccaagtggctccagaagcagatatcccatgttgccagctgtcttttcaacaaggacagttttggtatgttttggtctttgggtagtgggggctgtttgctgaaatgtgatgttcctatgtcaatacagcagaaagtgtctttacattagccatataaaggtatagttcgttcagtggtagtgatttggttttctttattttgttaaacttgtcaggcacaagaccagttgcacaatgccctgaatcttaataggcacgatctgacttatataatgctggggaagatccacttgctggagggagacttggacaaggccattgaagtctacaagaaagcagtggagtaagtgtatctgtttcctttaaaacagtgagaaactaaaaaaattgagtggatatgtgaactcccaagcctaaaagagtgaatatgtttgattaattacttactgtatgagttaaaggttaagctgaagtttaagagctcccagtagcttcaataaggtagactgtgtttctttcttacctataaggatgactgctgctttaggttagctgggcagctctattctacaaggtcagccagggatccaggtttcttccttattaactcaccattccttaggctgttgtctttacctgcatggttgatgctgaatgtaacatccacatccaggctgtggtggaaggagatggtttgggaagctaagcatggaataagcatctggctatatatatatatatatatagagagagagagagagagagagagagacatgatcttactccatcactcaggctggagtgcagtggagaacacagctcactgcagcctcaacctcttgggctaaagcaatcttcctacctcagcctcccaagtagttgggactacaggcatgtgccaccatgcccagctaatttaaaaaaaaaaactgtttttgtgttgacagggtcttgctgtgttgcccaggctggtcttaaacttctgggctcaagcgatcctcctgcctcagccttccaaagtgctggaattacaggtgtgagccactgcacctggccttggtaataagttttaaatgacccagaaattgcacacatcgttcctgcttacattccatggttcaaaactacatgatagttacaagggaagtgggcagacatgcactcaagaagaaggaaataacagatttaagagttggccgacagtctgccattttggtatcatatgttaataacagatcttctgttttcagagatattattagggacagaaatctcctgattcagtaaaaaacaaaacaaaacaaaacaaaacatttggccttattagcatgagaccagtatcttttttcccccttccccattttcccttccccttccccgttttccccttccctttccccgttttcccttcccccttttctcttccccctttccctttcccccttcccccttcccccttcctcttccccttcctccttccctcttcccccatcccccttcccccatccccctttccccatccccctttccccatccccctttccccatccccctttccccatccccctttccccatccccctttccccatccccctttccccatcccccttccccctttccccttccccctttccccttcctcctttcccttccccctttccccttttcccatctcccttcccctttcccctccctctctcccttccttcctttttctctcttttctttccatcctttccctccctcccattcccatctttctttgtttctttcttttcttcctttcttccttcctttctttccttcctttcatttatttcaacagtctcgctctgtcgcccaggggtgagtgcagtggcgcgatctcgcctcactgcaacctctgcctcctgggttcaagcgattctcatgcctcagcctcctgagtagctgggactgcacgagcacgccaccacccctggctaatgtttgtatttttagcagagacagggtttcaccatgttggtcaggctggtctcgaattcctggcctcaagtgatctgcttgccttggtctcccatagtgctgggattgcaggcgtgaaccactgcgcccagccttgtgttgttacttttaaatgggatagctgtagcaaaatgccttgtctcatttgtttggtcccttaatagaatgtctggtctgtggttcaaggcttattattcctaataattagattctgaactaaacttagatttctattaatttgttaatcatctttgtcttctaccatggtagtaaattttctggttatatcagtcacagcactgctttctgaattttcttcaaccatattttgtgtctaaaacagaaaaatcccttggtttgttaagctacagaacagacttttgtcatcaagaggctgtatatttgggcaagtagtaaggagccatgtaacatgttcagtgcctctgtggtgctaggtagtagccctgatccctgacccctgccttctagaggttagctctttgagaatagcatacataaatcccaaggggaacattcttccagtaactgatcaaggactttggtcactaaatttcctaagggagaaatgtggacagctaaaatctgaagccttactgagaagatagagaccattgttcatgacctacagctttgaagagagtagtcatgttgtagtggggaagccaatattgctagaattacagaagttacctggctttggggagggaagtgatcaaagtggatgtttattatggcagaaagtgaaaggcggattcccagttgaattgagaaagctctgtttggtcagctcaggcctcccctggctggggctttgcatcttctggttcaggtcttcctataggtaaccagtgccctatatcattccttagaagcagaagacattgttcatagccctttggtgttttactgttgaaactgtctgatgatcctatggtcagatcatctcaactcagtgttgccttggttttgtgacaaagacaaatactagtgagggattgagcaggcaatccctgatgtgagtattttacttacatcagtgtttactcccaaaggtcagtagcaccttctttcctaggattggtatgtatcttccttcttttgtttagtttggctacttggtatagctctttgtttaagtggagagaacagcattaggggccttgggatcctaaattacatagaaaattatgctgcctggcattgtgagcacaatgaggatagaaaaaaaattccacaagagaggactggtgaaactgtgtgtgttctaggctgacttggtttataaagcattgttctttaattttatcagtgtgaccaagacagtcatgcaaaacattctataggttctttcttaggacttttaccctaagaaaggaatctgaattctaagcctcatttttcttgctgagcagttctccttatcaccagggttgagatgacctacttttgatggcaattcccaaattgccttcaggtatttccacggggaggaagaggctcagtggggtctgtcaagtattgcacgagggcatattactgtgcatgtgtcttcgtgtttctcatctacatcttgtttccctctgagcatctctatgttgcaggttctcaccagaaaatacagagcttcttacaactttaggattactctacttacaggtaatgaaaactctgtactcattcatgcactgatgttagaaatggttttgggtttgtgtgtatggtggttttcctgcattctgatatttattttattaaaggtcatataaagttcatgaactacactctctctattcgatactctttgctaaaggaattaattttctgcatttaaattggaagcaattctattttagcctagtgcaattataattcttatctaggctgggtgtggtctcatgcctgtaatcccagcaatttgggaggctgaggctggtggatcacttgagctcaggagttggagaccagcctgggtaacatagtgagaccctgtctctacaaaaaataaaaaaattagccaggcatggtggcatgcttctgtagtcccagctacttgggaggctgtgatgggaagattgcttgaactcggaaggcagaggttgcagtgagctgagattgagtcactgcactccatcctgggtgacagagccagatcctgtctcagaaaaaaaaaaaaattcttatgctatccaggaaagagcatatatgagaaataactctggtcttggaggctgttattttgttgtgaggagagaaacagatacaagtgagcacttagggctttggggcaaagccatttcttttgatctttcttcccagccagagtcttattggaaagagagaaggcaaagtatacttttatctagaataagaagttttctgtcccctcaacattcctgaatgtgaatgggattcttttagctccattgattctctggctgaggacccagggcccaggtatccaaggggcttttccctcttccccaatatacacatttgccaagttccttggtcagctgattctgcctccagccctgcctctgtggtggcctttatgtctatttcatttttctttaaaaggaatcaggagcttaaccctgggtcttcctgggctttggcttgggaggttggctccacgggagatgaggatacccagctcatttcctgcaaagaggcattaatgtggaacagtactagtgtggcagagatggttcttatcaaatagatactttgaccttatcaggtgacaaattaacaaaaatagaaggaaaaccatgactggggatttttagttttctttctttattatctggtaactgtagctgctttttttttttttttttttttttttaaagtcaagagaactcaaaaaagccagagcatttctgttctgggtgaggttggccagactgtttttttttttttttttttggagacggagtttcactctttttgcctaggctagagtgcaatggcgtgatctcggctcactgcaacctctgcctcctgggttcaagcgattctcctgcctcagcctcccaagtagctgggattacaggcatgtgccaccatgcctgggtaattttgtatttttagtagagatggggtttctccatgttggtcaggctggtctcgaactcctgacctcaggtgatccacccaccttagcctcccaaagtgctgggattataggcattagccaccacgcctggtctggccagactcttttaactgccgtctccttgctgatgtaaattgtcttgtttgctttttttccaagctcggcatttaccagaaggcatttgaacatcttggcaatgcactgacttatgaccctaccaactacaaggtattacaggctgtgaaggctctggccttcatatagacggtcccactgctcctagaggtgatctgaccctggaaagcaaaggaatagcttcttaaatttggatacctgagaaatagaaaaaatataaataaaaggtggctcttcttatttgaaaatagtgtcaagtatgctctacttatcttctaaaagtgcacatttgttataatagacgtgtaacccctgcagaaggcagatcatagtgctagtaaagcttatgtgttacttaggaaattagcaatgcctccacaactattgtcaaaaataaatctgcggcccggcgcggtggctcacgcctgtaatcccagcactttgggaggctgaggtgggcagatcacgaggtcaggagatcgagaccatcctggctaacacagtgaaaccccgtctctactaaaaatacaaaaaaattagccgggcgtggtggcgggcgcctgtagtcccagctcctcgggaggctgaggcaggagaatggcgtgaacccgggaggcagagcttgcagtgagctgagatcacgcgccactgcactccagcctgggtgacagagcgagactctgtctcaaaaaaaaaaaaaataaaaaataaaaaaaataaatctgctgggcatggtggcttatgcctgtaatcccagcactttggaatgctgaggcaggaggatcacttgaggccaggagttcaagaccaggctgggccacatagtgagacccccatttctacaaaaaaaattatccaggcatggtggcacacacctgtagtcctagccactcggaaggtggaagagggaagatcacttgagcccaggagtttgagtctacagtgggctatgatggcaccactatactccagcctgggtgacagagaccctgtctctaaaaagaaacaataattatgttgaaatgacttctagagtcctaatgatttgatactacaactttttttctagatgtgactttgggaatgagaaggaatagcatcaaatggatgaacatcattgaggagatgcagcaagacaagctgtttattaaaggatacaaactgaattctgatttaggaagtaacattagactgtcagctcccaccttgatacctttccttagagaaatgaaagggctgggctgatgaagcctaaagctgactcgccctctgttctacggtagaaagaaatttaccttaagtagccacgtacaggtgtatttcaggtatctagaacacttggtataccaaataggggctgcagagaacagattaaaggaagtttttacttaaagggctctggtattcattctgaaatactgactttcctggctagaagtaggaaacagatgggtaaagcaagtaacattttatctttttttttttttttttttttttttttttttgtgctgtgccagagagccacagtgtagagtgcaaggacattcctcaggaacatttgtcccaataggttggatatatttatgtccctggaagaaattttccagtcccatctatgctgatgggcctgctgagtatagactcaggaaagctgccccactgctacagccttttgggaatgactgaatgactttctctgtgccatgttttcaggccatcttggcagcaggcagcatgatgcagacccacggggactttgatgttgccctcaccaaatacagagttgtggcttgtgctgttccagaaagtcctccactctggaataacattggaatgtgtttctttggcaagaagaaatatgtggcggtgagtgtcccctcatgttctttgtttgtatttctacatgtggttattgggtctgtttagcttgcccttctcattgagtgccccttctctctcataggccatcagctgcctgaaacgagccaactacttggcaccctttgattggaagattctgtataatttgggccttgtccatttgaccatgcagcagtatgcatcagcttttcattttctcagtgcggccatcaacttccagccaaagatgggggagctctacatgctcttggcaggtaagaaacatttatgtggaaaactctctctgccatctgtaatgagggaaaaatggattagaatcatagaagatcagtggctgtctcataggagccattcccttagagatcctgtaggaatctggattactgtcctggagcttgaagaaatagaaaaagatgacaaaggaacttggttgtttctaacttgggggagtttgactcagagaccaacaggttaaataaagatcatccctagttcaccttttaccagttttttcctcttgccttgacaattcatttatgtatatattgagtccaactaagttccagacagcaagtgttaagagcttgggttttaggtagggtcctgcctctactacttattatatgtacctagggctgatgtgaggattgcatgattaagctctcaattaataatactggttttgttgaaatactgatttttgaaaactgttggttttactgtggttatataattggtctattattatcaatattgttgttactataattggcccctaggtgatacttccaagtcaagctaccttatgttgaaacccttatctcttctgagcatgttatatagaatgccattctcttcctgaaactccattttatgccatgcaaatactaaaattgatcataaaaataagttaaaattaatcaaacactttaacaattatgcacaaccattttaaagtactgactagtctttctaggaatttttttctccatatacatttacttactaaatgtaagacccaaagcagatttccatgtcctcatttggcagtcgtcttccagtggctttttgttcattactgtgggttcttatttaaaagagaaagcttgcaaaagcaattgtggttatttgagggttgcctgaatacaaagataactttaaaaaaaaaacataggttttattattattcagatatggtatgggcaacagatcagaagacatctgccactggaaagatagtctgttacaattcctgagaaggagggcatgctacaccgtgcagggccacatggggaagcaccaggtcaatcaggaggtagagggagcaaggggtaaatgtgggcacaattctttattgtagttttcatgggtagaaatgccctccccggggcaagaccgggaaagcaggttaaccaggttggggattggccagtttgaataatttcagtgggctctgggctatagggctgtctctaggtgtctggtacctgaccctcgggtgactaggactagggaatattggcccagtgtcagggcccagtaaaggaggcagttaagaatatgaacactgggttggtcggtctgcatacagaaggtactcttgtaggggttatatctaggaattagctgactgtgggagggacagtctccccagggtcagtaaggccccagatgtcaaaacatcagaataaaaaggctaaagtggggtgtgatggtacatacctgtagtgctggctacttgggaggctaaggcaggaagtttgcttaagcccaggagttgggagtacagcctgggcaacacagtgagactccattcctctctctttttttaaaaattttattttaggttcaggggtacatgtgcatcctgttacacaggcacgtgtgtcatggggattagttgtacagattatttcatcacccaggtactaagcctagtacccaatagttatttttttctggccctccccctcctccagtaagctccagtgtctgtttccctctgtgtctccatgtgttctcatcatttagctcttatagtgagaacatgcaggatttggttttctatcctttattaatttgctaaggatggtggcctccagctccatctatgttgctgcaaaggacacgatcttgttcttttgtatggctgtgtcgtattccatggtgtacatttacattttgtttatccagtctaccattgatgggcatttaggttgatttcacatctttgctattgtgaatagtgctgcattgaacacacacatgcatgtgtctttatggcagaacgatttacattcctttgggcatatacccagtaatgggattgctgggtcgaagggtagttgtatttttagctctttggggaattgccagattgctttccacaatggttgaactaatttacactcccatcaacagtgtataagcattcccttttctctgcagcctcaccaggatgttatattttgagtttttaataatagccattttgactggtgtgagatggttatctcactgtggtttcaatttgcatttctctaatcagtgatagagtttttcatatgcttgttggctgcatacatgacttcttttgaagtgtctgtttatgtcctttgcccattttaatgggattgtattcttcttgtaaatttgcttaagttccttatagatcctggatattagacctgcatggtttgcaaatattttctcccattttgtacattgtctgtttactgtgttgatagtttctttagatagctgggttctaatggaacacagaaatgtaaacagccataatgtaagagataacagcgatgctaactttacaaagtagagatggcattcaaactggatcctgaacaacaagctaaaatggaatagcacagaatggctgaggagccactgtgaagaaaggcatgcagccatgaaactgcagtgtcccttgctgttagtgggggttagtgttagagaatatgatgggagatgaatcaggaaagatattctggggtcagattatggaggtcatgcgtacagtgcaaggactttatcttagaggccatgtttgtccagctgtcttcctagatctcctcttaggtgcctggtaggagtgagtgcatagctggtggggaggtggaatgggcagggcttccagagcagctgtttttgttttatatattaggtgtcaaggaaatactgattttaaaaagtggggggagtgttttactgctaaatgaaagtgtaaagatcatggttatagatgtggggggccagtgaggattcctaagtaggatggtaatgtggtcagatttgtaaggcagtgagatacctggcagcgctgtggaaggtggaatggaggcaggtggggactttgacactggggaataaatggaaagcctaaaactacttgggcctgaacaagggcagtgtcagaaaagaaactgcaaaaaaaggatgcatagaacctggcaactgattgactgtagaagagatggttgaagatagcaccaggtatctaagctgacttagtaaactctggtgccatgagctgacagggtgaagtttactttgggggtagtctttaatactccttttgtcttctaagctgagctctccagctgcagtgctttctttgttgcagtggctctgaccaatctggaagatatagaaaatgccaagagagcctacgcagaagcagtccacctggataagtatgcactttgttgagaatggtactggcgggggttggactctccaaagccatgaggtggtgccatacatagcattggtgctgcctgtgtcagcccagctgttcctctatggcattagtacatagcagacctcagtgtggagggatgtgtctcctaagtatgtggtggctcagcaggaattgacactctgagaaaatgtttccagtcctaaactgagtaatcaggaggctagagaatgtcagaactggcagtgggcttgggttgctgatagctatgggctagctggaatatcagatgggactctgggctgtttaattcaagataaaacttgactcttccaggatttactccgctggcatcttctagacagcagggtagagatccctttttcaaccctggcctaggtagtctctgttgagggctgagatgccagatttggtcccaataccagctttgcttgtta

SEQ ID NO: 10965 - DNA, 1004 bp, Homo sapiens
ctgaagcagttcaacaaggcacaagaccagttgcacaatgccctgaatcttaataggcacgatctgacttatataatgctggggaagatccacttgctggagggagacttggacaaggccattgaagtctacaagaaagcagtggagccatcttggcagcaggcagcatgatgcagacccacggggactttgatgttgccctcaccaaatacagagttgtggcttgtgctgttccagaaagtcctccactctggaataacattggaatgtgtttctttggcaagaagaaatatgtggcggccatcagctgcctgaaacgagccaactacttggcaccctttgattggaagattctgtataatttgggccttgtccatttgaccatgcagcagtatgcatcagcttttcattttctcagtgcggccatcaacttccagccaaagatgggggagctctacatgctcttggcagtggctctgaccaatctggaagatatagaaaatgccaagagagcctacgcagaagcagtccacctggataagtatgcactttgttgagaatggtactggcgggggttggactctccaaagccatgaggtggtgccatacatagcattggtgctgcctgtgtcagcccagctgttcctctatggcattagtacatagcagacctcagtgtggagggatgtgtctcctaagtatgtggtggctcagcaggaattgacactctgagaaaatgtttccagtcctaaactgagtaatcaggaggctagagaatgtcagaactggcagtgggcttgggttgctgatagctatgggctagctggaatatcagatgggactctgggctgtttaattcaagataaaacttgactcttccaggatttactccgctggcatcttctagacagcagggtagagatccctttttcaaccctggcctaggtagtctctgttgagggctgagatgccagatttggtcccaataccagctttgcttgtta

SEQ ID NO: 10966 - DNA, 557 bp, Homo sapiens
gcagcggtgggctgagctaaaatggctgaggagagagtcgcgacggactgtagtccctcttggggtgcgctggacggagaagggagacttttcaccagtaatggctcttaccgtagtgccatctttttctgtctcgggggtttggaagagaactcaatttcctgtatctactgagtctcaaaaaccccggcagaaaaaagctccagagtttcctattttggagaagcagaactggttgattcatcttcattatatccggaaagattatgaagcctgcaaggctgttatcaaagaacagcttcaagagactcagggattgtgtgaatatgctatctatgtccaagcattgatatttcgcctagaaggaaatatccaagaatccctagaactcttccagacatgtgcagttcttagtcctcagagtgctgataacctcaagcaggtggccagatctttatttcttttgggaaaacataaagctgccattgaagtatataatgaagcagctaaactcaaccagaaagattgggagatcagccataacctaggagtttgct

SEQ ID NO: 10967 - DNA, 527 bp, Homo sapiens
acagaactgctaatatagaggaacccgatgaattcaggatgacctagtcgctattttttgaggcatatatctataattggatctaatttcgagaactcaatttcctgtatctactgagtctcaaaaaccccggcagaaaaaagctccagagtttcctattttggagaagcagaactggttgattcatcttcattatatccggaaagattatgaagcctgcaaggctgttatcaaagaacagcttcaagagactcagggattgtgtgaatatgctatctatgtccaagcattgatatttcgcctagaaggaaatatccaagaatccctagaactcttccagacatgtgcagttcttagtcctcagagtgctgataacctcaagcaggtggccagatctttatttcttttgggaaaacataaagctgccattgaagtatataatgaagcagctaaactcaaccagaaagattgggagatcagccataacctaggagtttgctacatatacctgaagcagttcaacaagg

SEQ ID NO: 10968 - DNA, 681 bp, Homo sapiens
gacttccggccgcgcagcggtgggctgagctaaaatggctgaggagagagtcgcgacgagaactcaatttcctgtatctactgagtctcaaaaaccccggcagaaaaaagctccagagtttcctattttggagaagcagaactggttgattcatcttcattatatccggaaagattatgaagcctgcaaggctgttatcaaagaacagcttcaagagactcagggattgtgtgaatatgctatctatgtccaagcattgatatttcgcctagaaggaaatatccaagaatccctagaactcttccagacatgtgcagttcttagtcctcagagtgctgataacctcaagcaggtggccagatctttatttcttttgggaaaacataaagctgccattgaagtatataatgaagcagctaaactcaaccagaaagattggcctaggagatcagccataacctaggagtttgctacatatacctgaagcagttcaacaaggcacaagaccagttgcacaatgccctgaatcttaataggcacgatctgacttatataatgctggggaagatccacttgctggagggagacttggacaaggccattgaagtctacaagaaagcagtggagttctcaccagaaaatacagagcttcttacaactttaggattactctacttacag

SEQ ID NO: 10969 - DNA, 5842 bp, Homo sapiens
tcaacttccagccaaagatgggggagctctacatgctcttggcaggtaagaaacatttatgtggaaaactctctctgccatctgtaatgagggaaaaatggattagaatcatagaagatcagtggctgtctcataggagccattcccttagagatcctgtaggaatctggattactgtcctggagcttgaagaaatagaaaaagatgacaaaggaacttggttgtttctaacttgggggagtttgactcagagaccaacaggttaaataaagatcatccctagttcaccttttaccagttttttcctcttgccttgacaattcatttatgtatatattgagtccaactaagttccagacagcaagtgttaagagcttgggttttaggtagggtcctgcctctactacttattatatgtacctagggctgatgtgaggattgcatgattaagctctcaattaataatactggttttgttgaaatactgatttttgaaaactgttggttttactgtggttatataattggtctattattatcaatattgttgttactataattggcccctaggtgatacttccaagtcaagctaccttatgttgaaacccttatctcttctgagcatgttatatagaatgccattctcttcctgaaactccattttatgccatgcaaatactaaaattgatcataaaaataagttaaaattaatcaaacactttaacaattatgcacaaccattttaaagtactgactagtctttctaggaatttttttctccatatacatttacttactaaatgtaagacccaaagcagatttccatgtcctcatttggcagtcgtcttccagtggctttttgttcattactgtgggttcttatttaaaagagaaagcttgcaaaagcaattgtggttatttgagggttgcctgaatacaaagataactttaaaaaaaaaacataggttttattattattcagatatggtatgggcaacagatcagaagacatctgccactggaaagatagtctgttacaattcctgagaaggagggcatgctacaccgtgcagggccacatggggaagcaccaggtcaatcaggaggtagagggagcaaggggtaaatgtgggcacaattctttattgtagttttcatgggtagaaatgccctccccggggcaagaccgggaaagcaggttaaccaggttggggattggccagtttgaataatttcagtgggctctgggctatagggctgtctctaggtgtctggtacctgaccctcgggtgactaggactagggaatattggcccagtgtcagggcccagtaaaggaggcagttaagaatatgaacactgggttggtcggtctgcatacagaaggtactcttgtaggggttatatctaggaattagctgactgtgggagggacagtctccccagggtcagtaaggccccagatgtcaaaacatcagaataaaaaggctaaagtggggtgtgatggtacatacctgtagtgctggctacttgggaggctaaggcaggaagtttgcttaagcccaggagttgggagtacagcctgggcaacacagtgagactccattcctctctctttttttaaaaattttattttaggttcaggggtacatgtgcatcctgttacacaggcacgtgtgtcatggggattagttgtacagattatttcatcacccaggtactaagcctagtacccaatagttatttttttctggccctccccctcctccagtaagctccagtgtctgtttccctctgtgtctccatgtgttctcatcatttagctcttatagtgagaacatgcaggatttggttttctatcctttattaatttgctaaggatggtggcctccagctccatctatgttgctgcaaaggacacgatcttgttcttttgtatggctgtgtcgtattccatggtgtacatttacattttgtttatccagtctaccattgatgggcatttaggttgatttcacatctttgctattgtgaatagtgctgcattgaacacacacatgcatgtgtctttatggcagaacgatttacattcctttgggcatatacccagtaatgggattgctgggtcgaagggtagttgtatttttagctctttggggaattgccagattgctttccacaatggttgaactaatttacactcccatcaacagtgtataagcattcccttttctctgcagcctcaccaggatgttatattttgagtttttaataatagccattttgactggtgtgagatggttatctcactgtggtttcaatttgcatttctctaatcagtgatagagtttttcatatgcttgttggctgcatacatgacttcttttgaagtgtctgtttatgtcctttgcccattttaatgggattgtattcttcttgtaaatttgcttaagttccttatagatcctggatattagacctgcatggtttgcaaatattttctcccattttgtacattgtctgtttactgtgttgatagtttctttagatagctgggttctaatggaacacagaaatgtaaacagccataatgtaagagataacagcgatgctaactttacaaagtagagatggcattcaaactggatcctgaacaacaagctaaaatggaatagcacagaatggctgaggagccactgtgaagaaaggcatgcagccatgaaactgcagtgtcccttgctgttagtgggggttagtgttagagaatatgatgggagatgaatcaggaaagatattctggggtcagattatggaggtcatgcgtacagtgcaaggactttatcttagaggccatgtttgtccagctgtcttcctagatctcctcttaggtgcctggtaggagtgagtgcatagctggtggggaggtggaatgggcagggcttccagagcagctgtttttgttttatatattaggtgtcaaggaaatactgattttaaaaagtggggggagtgttttactgctaaatgaaagtgtaaagatcatggttatagatgtggggggccagtgaggattcctaagtaggatggtaatgtggtcagatttgtaaggcagtgagatacctggcagcgctgtggaaggtggaatggaggcaggtggggactttgacactggggaataaatggaaagcctaaaactacttgggcctgaacaagggcagtgtcagaaaagaaactgcaaaaaaaggatgcatagaacctggcaactgattgactgtagaagagatggttgaagatagcaccaggtatctaagctgacttagtaaactctggtgccatgagctgacagggtgaagtttactttgggggtagtctttaatactccttttgtcttctaagctgagctctccagctgcagtgctttctttgttgcagtggctctgaccaatctggaagatatagaaaatgccaagagagcctacgcagaagcagtccacctggataagtatgcactttgttgagaatggtactggcgggggttggactctccaaagccatgaggtggtgccatacatagcattggtgctgcctgtgtcagcccagctgttcctctatggcattagtacatagcagacctcagtgtggagggatgtgtctcctaagtatgtggtggctcagcaggaattgacactctgagaaaatgtttccagtcctaaactgagtaatcaggaggctagagaatgtcagaactggcagtgggcttgggttgctgatagctatgggctagctggaatatcagatgggactctgggctgtttaattcaagataaaacttgactcttccaggatttactccgctggcatcttctagacagcagggtagagatccctttttcaaccctggcctaggtagtctctgttgagggctgagatgccagatttggtcccaataccagctttgcttgttaggccattaactccttgattcttctccacaggtctgcttagcacgtatgtacctaccttgctgcataatggagaaatctctacttaaccagttttgttttgtttttgtgtaatgagaaggatctctaaatgaccatttgttgcagagcccccagctccatagaatctctgtctgccacaggtgtaaccctttagtaaacctgaactatgctgtgctgctgtacaaccagggcgagaagaagaacgccctggcccaatatcaggagatggagaagaaagtcagcctactcaaggacaatagctctctggaatttgactctgaggtatgtcttttattagctcccaagagtcataagtaagctctcaggagacttttaaaaatcaagcccagatcatccaaatccaaggtattacacgttcatggctgttctggctttgatgttcctagcagcatgagttcatcaattaataacagcctgagaaaaactttcctagaataataataaaaggaaattcaggcttactgagttgttattgctaattcaactcatcaaagttgaggtctgtgtctgtctgtagcttccttctatttcactttttttttttttttttttttgagacggaatctcgctctgttgcccaggctggagtgcaatggcgcaatctcagttcactgcaacctccgcctcctgggttcaagcaattctcctgcctcagccttccaagtagctgggactacaggcgcgtgccaccacgcccagctaatttttgtatttttagtagagacggggtttcaccatgttggccaggatggtcttgatctcttgacctcgtgatccacgtgcccagccctatttcacttgttgtaggaaatgcactgtttggcccggtaatgcaccaggcttgaattgttgggttttgagatcctatgtgaaccaccatgccatccagtaaaggcaatctgtaatctctactgtttgataagtacttcctgcctcaactgctagtacgaccagacactatttcagctaaaaccccagctcgaagaccaaagaagtgggttggcttgtctctgacagtcacgcttttgattcttttacttcctttgtggacacaagatggtggagatggctcagaagttgggagctgctctccaggttggggaggcactggtctggaccaaaccagttaaagatcccaaatcaaagcaccagaccacttcaaccagcaaacctgccagtttccagcagcctctgggctctaatcaagctctaggacaggcaatgtcttcagcagctgcatacaggacgctcccctcaggtaggaccatacagagctccatgaagacctggcaggtacaagccacatgtgtctgtcagcagagattatagctttcagtgaggttctcttcagactcatatgtccaacgtagtattggccacaaggggagaaaaaaaacacagggtggctaaattggcacttgtttccttaaggcgagctatgtagtaggtaacagctactcacagacttagttggatggtctatacactggtctttccaattttagcaatatgttattaagtatatcctgttatgcaatgtttaatttttactgctttatcagaagttgacacgtaaatatttttcagtgactcattgaaggcaaacttgactgttgctttatttctcagttatagtcttcccttatagttaatgggtcagtcccactggttccagaaaatatggggtttcctcttgaactctaacagcaaaaaagaatgatttcttctgaaattgtggaacatgaggattcaagtttttattttgttactaggtgctggaggaacatcccagttcacaaagcccccatctcttcctct

SEQ ID NO: 10970 - DNA, 541 bp, Homo sapiens
tcaacttccagccaaagatgggggagctctacatgctcttggcagctgagctctccagctgcagtgctttctttgttgcagtggctctgaccaatctggaagatatagaaaatgccaagagagcctacgcagaagcagtccacctggataagtgtaaccctttagtaaacctgaactatgctgtgctgctgtacaaccagggcgagaagaagaacgccctggcccaatatcaggagatggagaagaaagtcagcctactcaaggacaatagctctctggaatttgactctgagatggtggagatggctcagaagttgggagctgctctccaggttggggaggcactggtctggaccaaaccagttaaagatcccaaatcaaagcaccagaccacttcaaccagcaaacctgccagtttccagcagcctctgggctctaatcaagctctaggacaggcaatgtcttcagcagctgcatacaggacgctcccctcaggtgctggaggaacatcccagttcacaaagcccccatctcttcctct

SEQ ID NO: 10971 - DNA, 2055 bp, Homo sapiens
aaaccgccgacttccggccgcgcagcggtgggctgagctaaaatggctgaggagagagtcgcgacgctccagagtttcctattttggagaagcagaactggttgattcatcttcattatatccggaaagattatgaagcctgcaaggctgttatcaaagaacagcttcaagagactcagggattgtgtgaatatgctatctatgtccaagcattgatatttcgcctagaaggaaatatccaagaatccctagaactcttccagacatgtgcagttcttagtcctcagagtgctgataacctcaagcaggtggccagatctttatttcttttgggaaaacataaagctgccattgaagtatataatgaagcagctaaactcaaccagaaagattggcctaggagatcagccataacctaggagtttgctacatatacctgaagcagttcaacaaggcacaagaccagttgcacaatgccctgaatcttaataggcacgatctgacttatataatgctggggaagatccacttgctggagggagacttggacaaggccattgaagtctacaagaaagcagtggagttctcaccagaaaatacagagcttcttacaactttaggattactctacttacagctcggcatttaccagaaggcatttgaacatcttggcaatgcactgacttatgaccctaccaactacaaggccatcttggcagcaggcagcatgatgcagacccacggggactttgatgttgccctcaccaaatacagagttgtggcttgtgctgttccagaaagtcctccactctggaataacattggaatgtgtttctttggcaagaagaaatatgtggcggccatcagctgcctgaaacgagccaactacttggcaccctttgattggaagattctgtataatttgggccttgtccatttgaccatgcagcagtatgcatcagcttttcattttctcagtgcggccatcaacttccagccaaagatgggggagctctacatgctcttggcagtggctctgaccaatctggaagatatagaaaatgccaagagagcctacgcagaagcagtccacctggataagtgtaaccctttagtaaacctgaactatgctgtgctgctgtacaaccagggcgagaagaagaacgccctggcccaatatcaggagatggagaagaaagtcagcctactcaaggacaatagctctctggaatttgactctgagatggtggagatggctcagaagttgggagctgctctccaggttggggaggcactggtctggaccaaaccagttaaagatcccaaatcaaagcaccagaccacttcaaccagcaaacctgccagtttccagcagcctctgggctctaatcaagctctaggacaggcaatgtcttcagcagctgcatacaggacgctcccctcaggtgctggaggaacatcccagttcacaaagcccccatctcttcctctggagccagagcctgcggtggaatcaagtccaactgaaacatcagaacaaataagagagaaataagaatagaatgaatgaccccaaaatagggttttcttgggcgaggatgtgctggattaggaaaggtgacatgacacaggcagagcagagtggcacccaccacagaatacagtgtgtgttattacgaggagccagcagttgagcctaaggtccttctacctacctggtattggcatttgaggtcggaaaccctctactgccccataagccaggaaaagtgaaaagagaacacagttcctttaagaactggcagcaaggcttgaggccttatgtatgtagctgagtcagcaaggtacatgatgctgtctgctttcaaaaggacttttctctcctagctgactgactccttccttagttcaaggaacagctgagacagacctctgctgagtagctctgtgatgacaaagccttggtttaactgaggtgatcctcaggttgtgaggtttattagtccccaaggcaaacacaaatattagattaataatccaactttaatagtatac

SEQ ID NO: 10972 - DNA, 551 bp, Homo sapiens
ccctttttactgtcccgggaactggtcgcctggggcaagtctggatacttagcagcacaggtcctgttctaggactgtagtccctcttggggtgcgctggacggagaagggagacttttcaccagtaatggctcttaccgtagtgccatctttttctgtctcgggggtttggaagagaactcaatttcctgtatctactgagtctcaaaaaccccggcagaaaaaagagtttcctattttggagaagcagaactggttgattcatcttcattatatccggaaagattatgaagcctgcaaggctgttatcaaagaacagcttcaagagactcagggattgtgtgaatatgctatctatgtccaagcattgatatttcgcctagaaggaaatatccaagaatccctagaactcttccagacatgtgcagttcttagtcctcagagtgctgataacctcaagcaggtggccagatctttatttcttttgggaaaacataaagctgccattgaagtatataatgaagcagctaaactcaaccagaaagattggg

SEQ ID NO: 10973 - DNA, 563 bp, Homo sapiens
gcagcggtgggctgagctaaaatggctgaggagagagtcgcgacgctccagagtttcctattttggagaagcagaactggttgattcatcttcattatatccggaaagattatgaagcctgcaaggctgttatcaaagaacagcttcaagagactcagggattgtgtgaatatgctatctatgtccaagcattgatatttcgcctagaaggaaatatccaagaatccctagaactcttccagacatgtgcagttcttagtcctcagagtgctgataacctcaagcaggtggccagatctttatttcttttgggaaaacataaagctgccattgaagtatataatgaagcagctaaactcaaccagaaagattggcctaggagatcagccataacctaggagtttgctacatatacctgaagcagttcaacaaggcacaagaccagttgcacaatgccctgaatcttaataggcacgatctgacttatataatgctggggaagatccacttgctggagggagacttggacaaggccattgaagtctacaagaaagcagtggagt

SEQ ID NO: 10974 - DNA, 1876 bp, Homo sapiens
gcagcggtgggctgagctaaaatggctgaggagagagtcgcgacgagaactcaatttcctgtatctactgagtctcaaaaaccccggcagaaaaaagggggagttggagtgagcaatgatttggaataccagaaattcaacttatatatttacagctccagagtttcctattttggagaagcagaactggttgattcatcttcattatatccggaaagattatgaagcctgcaaggctgttatcaaagaacagcttcaagagactcagggattgtgtgaatatgctatctatgtccaagcattgatatttcgcctagaaggaaatatccaagaatccctagaactcttccagacatgtgcagttcttagtcctcagagtgctgataacctcaagcaggtggccagatctttatttcttttgggaaaacataaagctgccattgaagtatataatgaagcagctaaactcaaccagaaagattgggagatcagccataacctaggagtttgctacatatacctgaagcagttcaacaaggcacaagaccagttgcacaatgccctgaatcttaataggcacgatctgacttatataatgctggggaagatccacttgctggagggagacttggacaaggccattgaagtctacaagaaagcagtggagttctcaccagaaaatacagagcttcttacaactttaggattactctacttacagctcggcatttaccagaaggcatttgaacatcttggcaatgcactgacttatgaccctaccaactacaaggccatcttggcagcaggcagcatgatgcagacccacggggactttgatgttgccctcaccaaatacagagttgtggcttgtgctgttccagaaagtcctccactctggaataacattggaatgtgtttctttggcaagaagaaatatgtggcggccatcagctgcctgaaacgagccaactacttggcaccctttgattggaagattctgtataatttgggccttgtccatttgaccatgcagcagtatgcatcagcttttcattttctcagtgcggccatcaacttccagccaaagatgggggagctctacatgctcttggcagtggctctgaccaatctggaagatatagaaaatgccaagagagcctacgcagaagcagtccacctggataagtgtaaccctttagtaaacctgaactatgctgtgctgctgtacaaccagggcgagaagaagaacgccctggcccaatatcaggagatggagaagaaagtcagcctactcaaggacaatagctctctggaatttgactctgagatggtggagatggctcagaagttgggagctgctctccaggttggggaggcactggtctggaccaaaccagttaaagatcccaaatcaaagcaccagaccacttcaaccagcaaacctgccagtttccagcagcctctgggctctaatcaagctctaggacaggcaatgtcttcagcagctgcatacaggacgctcccctcaggtgctggaggaacatcccagttcacaaagcccccatctcttcctctggagccagagcctgcggtggaatcaagtccaactgaaacatcagaacaaataagagagaaataagaatagaatgaatgaccccaaaatagggttttcttgggcgaggatgtgctggattaggaaaggtgacatgacacaggcagagcagagtggcacccaccacagaatacagtgtgtgttattacgaggagccagcagttgagcctaaggtccttctacctacctggtattggcatttgaggtcggaaaccctctactgccccataagccaggaaaagtgaaaagagaacacagttcctt

SEQ ID NO: 10975 - DNA, 1576 bp, Homo sapiens
cttccaggatttactccgctggcatcttctagacagcagggtagagatccctttttcaaccctggcctaggtagtctctgttgagggctgagatgccagatttggtcccaataccagctttgcttgttaggccattaactccttgattcttctccacaggtctgcttagcacgtatgtacctaccttgctgcataatggagaaatctctacttaaccagttttgttttgtttttgtgtaatgagaaggatctctaaatgaccatttgttgcagagcccccagctccatagaatctctgtctgccacaggtgtaaccctttagtaaacctgaactatgctgtgctgctgtacaaccagggcgagaagaagaacgccctggcccaatatcaggagatggagaagaaagtcagcctactcaaggacaatagctctctggaatttgactctgaggtatgtcttttattagctcccaagagtcataagtaagctctcaggagacttttaaaaatcaagcccagatcatccaaatccaaggtattacacgttcatggctgttctggctttgatgttcctagcagcatgagttcatcaattaataacagcctgagaaaaactttcctagaataataataaaaggaaattcaggcttactgagttgttattgctaattcaactcatcaaagttgaggtctgtgtctgtctgtagcttccttctatttcactttttttttttttttttttttgagacggaatctcgctctgttgcccaggctggagtgcaatggcgcaatctcagttcactgcaacctccgcctcctgggttcaagcaattctcctgcctcagccttccaagtagctgggactacaggcgcgtgccaccacgcccagctaatttttgtatttttagtagagacggggtttcaccatgttggccaggatggtcttgatctcttgacctcgtgatccacgtgcccagccctatttcacttgttgtaggaaatgcactgtttggcccggtaatgcaccaggcttgaattgttgggttttgagatcctatgtgaaccaccatgccatccagtaaaggcaatctgtaatctctactgtttgataagtacttcctgcctcaactgctagtacgaccagacactatttcagctaaaaccccagctcgaagaccaaagaagtgggttggcttgtctctgacagtcacgcttttgattcttttacttcctttgtggacacaagatggtggagatggctcagaagttgggagctgctctccaggttggggaggcactggtctggaccaaaccagttaaagatcccaaatcaaagcaccagaccacttcaaccagcaaacctgccagtttccagcagcctctgggctctaatcaagctctaggacaggcaatgtcttcagcagctgcatacaggacgctcccctcaggtaggaccatacagagctccatgaagacctggcaggtacaagccacatgtgtctgtcagcagagattatagctttcagtgaggttctcttcagactcatatgtccaacgtagtattggccacaagggga

SEQ ID NO: 10976 - DNA, 781 bp, Homo sapiens
cttccaggatttactccgctggcatcttctagacagcagggtagagatccctttttcaaccctggcctaggtagtctctgttgagggctgagatgccagatttggtcccaataccagctttgcttgttaggccattaactccttgattcttctccacaggtctgcttagcacgtatgtacctaccttgctgcataatggagaaatctctacttaaccagttttgttttgtttttgtgtaatgagaaggatctctaaatgaccatttgttgcagagcccccagctccatagaatctctgtctgccacaggtgtaaccctttagtaaacctgaactatgctgtgctgctgtacaaccagggcgagaagaagaacgccctggcccaatatcaggagatggagaagaaagtcagcctactcaaggacaatagctctctggaatttgactctgagatggtggagatggctcagaagttgggagctgctctccaggttggggaggcactggtctggaccaaaccagttaaagatcccaaatcaaagcaccagaccacttcaaccagcaaacctgccagtttccagcagcctctgggctctaatcaagctctaggacaggcaatgtcttcagcagctgcatacaggacgctcccctcaggtaggaccatacagagctccatgaagacctggcaggtacaagccacatgtgtctgtcagcagagattatagctttcagtgaggttctcttcagactcatatgtccaacgtagtattggccacaagggga

SEQ ID NO: 10977 - DNA, 528 bp, Homo sapiens
ctaaactcaaccagaaagattgggtaagtagagaactttcagttctttcttattagtaaacttgctaatggttccatttatcatctggctgtcttatttctgaattcttacattccaaaaatgtcttgattttaacctcatacttaattcatgatttgtataagtataggatcaaaaaccatgtttcctcataactttgcaggcattgctgcatgattttctagcagtttgctgacgagcagtctcttaccagtctgattcttgttgatgacccctagaagctttgggtatttttttcgtcattggaattccacagtatcagcaataggcatctagttgtgtttcatgtctttttcccgtccccatctgtgtgacattcaattgactctttcattctgaagacccttgcctttctttgggtcagggcctttgagtagttctttatttttcccctccccttctctttgtgtcaattgaggattgtgtgtaaatgcaacagaaaatttgactaaacattggctttacaaa

SEQ ID NO: 10978 - DNA, 349 bp, Homo sapiens
ctaaactcaaccagaaagattgggcattgctgcatgattttctagcagtttgctgacgagcagtctcttaccagtctgattcttgttgatgacccctagaagctttgggtatttttttcgtcattggaattccacagtatcagcaataggcatctagttgtgtttcatgtctttttcccgtccccatctgtgtgacattcaattgactctttcattctgaagacccttgcctttctttgggtcagggcctttgagtagttctttatttttcccctccccttctctttgtgtcaattgaggattgtgtgtaaatgcaacagaaaatttgactaaacattggctttacaaa

SEQ ID NO: 10979 - DNA, 3658 bp, Homo sapiens
catcagctgcctgaaacgagccaactacttggcaccctttgattggaagattctgtataatttgggccttgtccatttgaccatgcagcagtatgcatcagcttttcattttctcagtgcggccatcaacttccagccaaagatgggggagctctacatgctcttggcaggtaagaaacatttatgtggaaaactctctctgccatctgtaatgagggaaaaatggattagaatcatagaagatcagtggctgtctcataggagccattcccttagagatcctgtaggaatctggattactgtcctggagcttgaagaaatagaaaaagatgacaaaggaacttggttgtttctaacttgggggagtttgactcagagaccaacaggttaaataaagatcatccctagttcaccttttaccagttttttcctcttgccttgacaattcatttatgtatatattgagtccaactaagttccagacagcaagtgttaagagcttgggttttaggtagggtcctgcctctactacttattatatgtacctagggctgatgtgaggattgcatgattaagctctcaattaataatactggttttgttgaaatactgatttttgaaaactgttggttttactgtggttatataattggtctattattatcaatattgttgttactataattggcccctaggtgatacttccaagtcaagctaccttatgttgaaacccttatctcttctgagcatgttatatagaatgccattctcttcctgaaactccattttatgccatgcaaatactaaaattgatcataaaaataagttaaaattaatcaaacactttaacaattatgcacaaccattttaaagtactgactagtctttctaggaatttttttctccatatacatttacttactaaatgtaagacccaaagcagatttccatgtcctcatttggcagtcgtcttccagtggctttttgttcattactgtgggttcttatttaaaagagaaagcttgcaaaagcaattgtggttatttgagggttgcctgaatacaaagataactttaaaaaaaaaacataggttttattattattcagatatggtatgggcaacagatcagaagacatctgccactggaaagatagtctgttacaattcctgagaaggagggcatgctacaccgtgcagggccacatggggaagcaccaggtcaatcaggaggtagagggagcaaggggtaaatgtgggcacaattctttattgtagttttcatgggtagaaatgccctccccggggcaagaccgggaaagcaggttaaccaggttggggattggccagtttgaataatttcagtgggctctgggctatagggctgtctctaggtgtctggtacctgaccctcgggtgactaggactagggaatattggcccagtgtcagggcccagtaaaggaggcagttaagaatatgaacactgggttggtcggtctgcatacagaaggtactcttgtaggggttatatctaggaattagctgactgtgggagggacagtctccccagggtcagtaaggccccagatgtcaaaacatcagaataaaaaggctaaagtggggtgtgatggtacatacctgtagtgctggctacttgggaggctaaggcaggaagtttgcttaagcccaggagttgggagtacagcctgggcaacacagtgagactccattcctctctctttttttaaaaattttattttaggttcaggggtacatgtgcatcctgttacacaggcacgtgtgtcatggggattagttgtacagattatttcatcacccaggtactaagcctagtacccaatagttatttttttctggccctccccctcctccagtaagctccagtgtctgtttccctctgtgtctccatgtgttctcatcatttagctcttatagtgagaacatgcaggatttggttttctatcctttattaatttgctaaggatggtggcctccagctccatctatgttgctgcaaaggacacgatcttgttcttttgtatggctgtgtcgtattccatggtgtacatttacattttgtttatccagtctaccattgatgggcatttaggttgatttcacatctttgctattgtgaatagtgctgcattgaacacacacatgcatgtgtctttatggcagaacgatttacattcctttgggcatatacccagtaatgggattgctgggtcgaagggtagttgtatttttagctctttggggaattgccagattgctttccacaatggttgaactaatttacactcccatcaacagtgtataagcattcccttttctctgcagcctcaccaggatgttatattttgagtttttaataatagccattttgactggtgtgagatggttatctcactgtggtttcaatttgcatttctctaatcagtgatagagtttttcatatgcttgttggctgcatacatgacttcttttgaagtgtctgtttatgtcctttgcccattttaatgggattgtattcttcttgtaaatttgcttaagttccttatagatcctggatattagacctgcatggtttgcaaatattttctcccattttgtacattgtctgtttactgtgttgatagtttctttagatagctgggttctaatggaacacagaaatgtaaacagccataatgtaagagataacagcgatgctaactttacaaagtagagatggcattcaaactggatcctgaacaacaagctaaaatggaatagcacagaatggctgaggagccactgtgaagaaaggcatgcagccatgaaactgcagtgtcccttgctgttagtgggggttagtgttagagaatatgatgggagatgaatcaggaaagatattctggggtcagattatggaggtcatgcgtacagtgcaaggactttatcttagaggccatgtttgtccagctgtcttcctagatctcctcttaggtgcctggtaggagtgagtgcatagctggtggggaggtggaatgggcagggcttccagagcagctgtttttgttttatatattaggtgtcaaggaaatactgattttaaaaagtggggggagtgttttactgctaaatgaaagtgtaaagatcatggttatagatgtggggggccagtgaggattcctaagtaggatggtaatgtggtcagatttgtaaggcagtgagatacctggcagcgctgtggaaggtggaatggaggcaggtggggactttgacactggggaataaatggaaagcctaaaactacttgggcctgaacaagggcagtgtcagaaaagaaactgcaaaaaaaggatgcatagaacctggcaactgattgactgtagaagagatggttgaagatagcaccaggtatctaagctgacttagtaaactctggtgccatgagctgacagggtgaagtttactttgggggtagtctttaatactccttttgtcttctaagctgagctctccagctgcagtgctttctttgttgcagtggctctgaccaatctggaagatatagaaaatgccaagagagcctacgcagaagcagtccacctggataagtatgcactttgttgagaatggtactggcggg

SEQ ID NO: 10980 - DNA, 272 bp, Homo sapiens
catcagctgcctgaaacgagccaactacttggcaccctttgattggaagattctgtataatttgggccttgtccatttgaccatgcagcagtatgcatcagcttttcattttctcagtgcggccatcaacttccagccaaagatgggggagctctacatgctcttggcagtggctctgaccaatctggaagatatagaaaatgccaagagagcctacgcagaagcagtccacctggataagtatgcactttgttgagaatggtactggcggg

SEQ ID NO: 10981 - DNA, 843 bp, Homo sapiens
gagagagtcgcgacgagaactcaatttcctgtatctactgagtctcaaaaaccccggcagaaaaaagctccagagtttcctattttggagaagcagaactggttgattcatcttcattatatccggaaagattatgaagcctgcaaggctgttatcaaagaacagcttcaagagactcagggattgtgtgaatatgctatctatgtccaagcattgatatttcgcctagaaggaaatatccaagaatccctagaactcttccagacatgtgcagttcttagtcctcagagtgctgataacctcaagcaggtggccagatctttatttcttttgggaaaacataaagctgccattgaagtatataatgaagcagctaaactcaaccagaaagattgggagatcagccataacctaggagtttgctacatatacctgaagcagttcaacaaggcacaagaccagttgcacaatgccctgaatcttaataggcacgatctgacttatataatgctggggaagatccacttgctggagggagacttggacaaggccattgaagtctacaagaaagcagtggagttctcaccagaaaatacagagcttcttacaactttaggattactctacttacaggccatcttggcagcaggcagcatgatgcagacccacggggactttgatgttgccctcaccaaatacagagttgtggcttgtgctgttccagaaagtcctccactctggaataacattggaatgtgtttctttggcaagaagaaatatgtggcggccatcagctgcctgaaacgagccaactacttggcaccctttgattggaagattctg

SEQ ID NO: 10982 - DNA, 579 bp, Homo sapiens
gcagcggtgggctgagctaaaatggctgaggagagagtcgcgacgagaactcaatttcctgtatctactgagtctcaaaaaccccggcagaaaaaaggtgactttcttctggctttcagttgaagatcttacccatcattgagctccagagtttcctattttggagaagcagaactggttgattcatcttcattatatccggaaagattatgaagcctgcaaggctgttatcaaagaacagcttcaagagactcagggattgtgtgaatatgctatctatgtccaagcattgatatttcgcctagaaggaaatatccaagaatccctagaactcttccagacatgtgcagttcttagtcctcagagtgctgataacctcaagcaggtggccagatctttatttcttttgggaaaacataaagctgccattgaagtatataatgaagcagctaaactcaaccagaaagattggcctaggagatcagccataacctaggagtttgctacatatacctgaagcagttcaacaaggcacaagaccagttgcacaatgccctgaatcttaataggcacgatctg

SEQ ID NO: 10983 - DNA, 16451 bp, Homo sapiens
acgggggaggagttccgggcacgcggacgggggtcctgggcaccgggcgaggtcctggccacgagggaggggttctgggcacgcgggagggggtcctgggatttcgggcagggaaccgggcacacgtgaggggtcctgggtaggcgcttacgttcctggtagagggttctgggttcgaggctgcaagcccactcaccccggtcctggagactagggaagcatctgtgctggcttttgtgtggagctcagggagaagctgggctgccctttctcccgcctttccctccctctcccttgctcccgcagcagctccatgggtgtcagcgggcagcacgggcgcctgcaggaagtcaggcgagggtgaaccgaagtgctgggggtttctaggagggagatcgggctccggggttccaggtccctcttaatccatcttcttgaacgagtaatgtgaacaacatcccacagggcctctggtgaggacaccgtggctcgaaagggacctgaagctccctgcggaggggaagggagaacaaggaggcagtgacatgccgccactgtggtcttcccttccgtctttccctgctggttggcagccccgctgtactccttagggaggcctttccctcttagcaccttcacgtctcacctggctgcgtggcgtttgcacctgagcacgcgggtagaactcggtctgtgtctgtgcagattatgccgacaagcccctggagaagcctctaaagctagtcctgaaggtcggaggaagtgaagtgactgaactctcaggatccggccacgactccagttactatgatgacaggtcagaccatgagcgagagaggcacaaagaaaagaaaaagaagaagaagaagaagtccgagaaggagaagcatctggacgatgaggaaagaaggaagcgaaaggtaaaggagcagcggcggtggcccggacgctgcccacgaggagcccgtggggagcctggtcccaggacccaggcagagtgcgcctgcgtggctggaggaggggagggggtgttccgttggtagcaaaacgcgaaccgctgaggcccgcagactcagttccaggatcctgggtgtgctgttcctcagcagaccctgccagggtctctgtgaggagggagcctggcatgaggaggatctcggagggggtttcccttagttctgtccctcccctgagaactgcgaggggattgggcagacctgtccggatcccgcctactcctgcctttctcactcccttgactctgccgcccaggaagagaagaagcggaagcgagagagggagcactgtgacacggagggagaggctgacgactttgatcctgggaagaaggtggaggtggagccgcccccagatcggccagtccgagcgtgccggacacagccaggcaagggtgcacttttagagactctcctggtgttcacagctcatcgttgtaaatgaggggtcggcaccgtgtcctgttgctttggggagaagcatgggagggaggagagctggtatttccagggcctcatcccaggtgtcctctggcctgaggtttcctccggtgtctctgaatgtctagagcaaggcgtggccagttaccactggtgcccttcagttttgttttttaacttgttagctaaggatggcttatatgttttttaagcgttcataaaaagaaacaaaaaggcatctccacagagaccaatcgtatgtgacccgcaaagcctagactgttttttgtctggcctttatgtaaaaagtttgccagccctgggtcttgaagtttggttttgtttgcacttaagacagtattggaacagtagccccatctgggtcagactggtaagagagatgcatgtcagtgaaaacgcaggtaattccccttgggaagaagggacctcgaggcccaaatggtgggtctgaagttgctgaaagtgaccataggctgagacaaaggaagctggaggcctttagtagaatctctgtcgtgggcaccatctgcgaaggatggcatttggctggaatttccagttgacaaggacttgccctctgagttctctttgtccccagccttcctgtgcacaactcacagtgatgaggcatttgtacctaagacaaggggtgtctcttcccagcaactctcagcatccagtggttcctggattatagggaaacagacggctgggctttgggacatgggacatcagggagtggggaggctagtgctgcgatcattcaggccgtcagaaactgtctgaggcctgctggctccactgaaggaaagttctggaaagctggtggccttctgagctcctgtggtcatttggctcttcaggcactttctttttttaatttatttttgaaacatggtcttgctgtgtcgcctaggctggagtgcagtgtcgtgattcactcctgggctcagataaccctgggctcaagcgatcctcccacctcagcctcccaagttgctgggactacaggcacgcaccaccacgccggccatttatttactttttgttgaattttaagggacctcaagtgaaataataatcggtgaattcaggatcaacctttatgtccagagcgtttgttccgtcgtccatttcttgtctagagtagtggtatgagctgaaaacattgctaagtgatcaccacatattgttgatgtaagggctaccggttattacaagagatttttatgactcctgctgtgggggtgccctttctacccggctgagcttggtgggagccaaggctgagtcggatgtatctttatatccccagttctcggtggaacttaaaatgctgtgagacaccagacagacagatactgtgaacttggagctctctaatgaagggataccaaagtcttgtattcaatttttttttccttaaattgtcagccgaaaatgagagcacacctattcagcaactcctggaacacttcctccgccagcttcagaggtaaaccggggcgtttctgaagagctagtgtctgggggggtgtggtgtcatcttttctgaggccttattccccacgccagcctcgtcagctgtgaaacagaccctgcaccttctcttggtgactcccagtccacttcggggtgcgtaggaagagttcatgaactcattagtggctcactctgaagtcagagtagagtgagggaagtcaaggctagagctgggacattgatggccgccaggatgcgttgggggaatttttattatatctgaaatacctatcacaataaattaaaagacgctcgtaacttttttatttttaagaaacaaaattcggtcagttgtatccaatttttggattgtaagagattttgtatcatttagaaatctagatttttccgctttaagatgtctttgctttcagaaaagatccccatggattttttgcttttcctgtcacggatgcaattgctcctggatattcaatgataataaaacatcccatggattttggcaccatgaaagacaaaattgtagctaatgaatacaagtcagttacggaatttaaggtaagttactttcattgcccgaagtaatcgtggcatagttctgtgtattcatgtcttgtgaagacttcattcaccttagatcatttctagtttttgagctttcacaggtgtttctgtgttcggatgatgttttacagacacagcattaaggaaatgattggtcgtgaacgttttctctgtgctttggtctagaaactaggtcaggttgcacgctgttagaagtctgtttcttttctttctaagttactgcgctggcgtaaataggacatgttgtttcaagcagtgaggtgtccggtgtggcacggcttgagactagacatttttaaaaacatacttctttttaattcttagttttgtcttacactaattgagcatttagtttttttagcatagtaagtttttctgtctcctgagtactttgctcttagctctgtttcttgctactggctgtgagaattagcaactgctcattggttttgcaacccaggggaagaaagcaaaacaaatgcttgataaagttggcattagtgtagtttagaaaggcattagatttctctcttaggttccattcccctggggaaagcttgacttttctattttatgcttactgaagggtttgctgactcacagaaacacaacagaacagacttaaaggagagtgggagaaaaggaaactcgatgagaggatcaggcagcgcctgagggtagatgttaagagcactccatgcccgaaagccctctgtattccctgcttcgggccccagtctggccattcctagcaacaaagtgagaaggggagcagcattcactccgtggagtgtccgcagtggagtcttcaggggaggggctccacagcctcgggccgggccctagggctgctggctctggaaccgggacttggggagggtccagatggcacgttctcagttagggtggccggcctccggggtcatgctccagcctgacgttggtactcacctttgagaggcctgtgctgaggaaactggcctctcataataaaatactgatgcttccgtattttcaccataaattacaaaataaggttgtccttttgtggggcaaagtctttttctagtagtttgagggaaccatttggtgacagaattttaaattcgattctgtggagaaattctagagatagaggctatcactgtgccgcacgcctgccttcatcccttgacttgcacttgaaagaatcgggtcgttgcttctcgttcctgtttatgttctggagaaatgcaagaagcgcaggaaacgctttttcctcacacagcatttgtatgtgatgcttagaaagaagttacaggcttggccaactgtttgctgtaatatttttcatgcaagaccaatgtgcaactaagaaaacttctcttaagttcttaaacgttatgtttagatcagagagcccagttgaattgttttctactcgattgtagctttttccttttggtctcttggtagtcatctagagctttgctgttgtctgtggcatttcaaacctgataagtctttcctgttttcttttcaggcagatttcaagctgatgtgtgataatgcaatgacatacaataggccagataccgtgtactacaagttggcgaagaagatccttcacgcaggctttaagatgatgagcaaagtaagaaactcactggcagcagcgagctacggaaagcaggggctctgccccccgtcgcttgtgcccgaagggagcctcacagtgaacacgtgctccatccacccgccaccctcatggtgttgccccctttgctctagggtagacgtccccggccgccctctctgctcatgacctagctgtaacatctcattgagggttggtggaaagttccgcatctcttgatcttaagcctgggtgtcaggtgtcagtcttgctggatggcagccagcattgcgggcttgttttgcgtgactgcctcactgaatccagacgggacatccttgtcttccttggccatcctgagtggcttcccagatctgtgccgtgagccaggctgcatgcatcccacgtaggagaaggtaaaggggaggtgcggcacctgccgcgctctggcggtgggtcaagcccccacaaccacctcccgctgctccgccgtggaaagttagctcttaggccaggtgaggctgtgaccatccccatcccatcccatcgtcacggcaccctggctgtgagggagaggtaaatccctgctgctctgtcctttctgattctaggagcggctgttagctttgaagcgcagcatgtcgtttatgcaggacatggatttttctcagcaggcagctcttttgggcaatgaagatacagctgttgaggaacctgtccctgaagttgtaccagtacaagtagaaactgccaagaaatccaaaaagccgagtagagaagttatcaggtaaaggttctgtggaaaccacatttgcttttggagttgagcaccatagccaggaaagcaggtgccttgtaggggagagtgagtgagtgagagaacggatgtcatgtcacatagacattcttggtgtagcttattctggcaggaggagtgtggccagacagcccctcctgcccaccggccacgtgcactctctgacccaggtgtggtacccaagcccgtccgatcacccctgcccccaactgctagtgactggtggtctctgtctctacacgccgttaagatcattggcccctccctcccctgcacagcgcctgccggcagccaaggctgtgcccttgtcccagactgtgccgcacaagcgggctgactttgggcagccagcattggcagggggcttctttgttgctgtggggcagatgcacactcctgaactgctcgcttctgtgtctgtgtagacgctggagtggagcaggtgcaggcctgtggtcaggaaggtgtggatgctgcgggggaagcaggtgaggactgcaggccacagctccctgtagctctgctccctcccacagggagcagccgacttggctggtccttcagggaaccttcttcctttttttctaaaccccagagtggttttcatgggggctctttgtctcatggtggctgagcattgagattgtatcaaagtccgtatcacacgtcattcctgtagacgctcctccacctatgtgaggtggctgcctgataggaccaaacaaagcgagagtatcgccaggggccttagaggcaccaagagcacttaacatagcctgcagcgggcagaagcgcctggcacagagcctgcttcatcacgtgtcacttgctgagtgcaggccccagagagcgcagtctcaggacatccaccctcatggccgtgtgtctgacagcactgtggctcgcggtcttcccagtatcctgagaggactggcctgttgccatcctggggacagatcagatttgaaggatggtttctgctgaagtgtattgcttttgtgccatcttgtgggaagtcagggaccgtctggagttggtactgaacgtccttgaggcaattgtgatggtcacggccctccattgtttgtttccttctcacatgtgtatgggactcacgtggatttaacaggtggggcggcagcggtgctgggctcggtgcttctgctctgagcagctccctccaaccgtcaaaagggagagtggtcttgagaccagcccctcaggtcctgcagccttggcttaggagacagggtgcgctgcgtggccagagtgtgttgcttggcaacggacgacagtcccctaaggcggtctccccacgtgcgttgcatttcccaccccgctgccgtgtgaacactcactgcgtggttggctggtggctgtgtccggcctcagcccccgactcgagtgtgctgctggccttcaggggtcggggtttcatggccgccctttgccgcctcatggtgactgagcatcgagggggaattgaagttggtgctggtcagcatgctcagctgcggtggggttgtgtcctggcagacccaccccaggttggttttgggtgtctctggtgctgcagcttcacccttgcctgtgggatccaggccctttagatggatccccagctgtcagtctgcaggcaggagagcgtgccgagctcaggcagtcaccttcacctagtgtcacagcagtgcgcatcggtaatgggctcacgcaggtgcctgagtggagcccctccctgcggagctcatggggctgtgactcctgtgtagggttgccaggttgtcactgtaggtcaggcaagggcagggccgctctcatgggcagggcttgtcctgggcctgcacctggccctaggccactcagacccatgcccaggcaagtgcccagggtgggaaggagcccactcgcttgcttctagaaccttccacactccttgggtgctacagcctgtgcccctcagctgttggagaactgcttcaggtggaacctgggaccacttgctgacgtccttgtgtgttctttgtgccacccagtggccacagcagagggggctgctgtccacccagcccagcagcaccagaccacacccgagcagccccgcctatcctgccttgctgtgaaccctgcgtagtcaggggtggcttttccagtcacttttctgatggggcctttaataactaaccagtgtgggcatctgttactttgttgcttttgttgctaaagcactttaactgagtttgcactgcgttgaaaaataggaagtctgtctacttggcttacacttaccctttattttaataaaagtgtcttaatttgtcatttggttagggtgaaaagggatgctttgagacctaaaaggagttaagtatgctctgccagctctgtgtctgagggcagggtcggtagaagctgggttaggtgccgacgcatggggagcaggtgtgcggtggggacgctgcctccaggtgacttggttgtccccacctcacagctgcatgtttgagcctgaagggaatgcctgcagcttgacggacagtaccgcagaggagcacgtgctggcgctggtggagcacgcagctgacgaagctcgggacaggatcaaccggttcctcccaggcggcaaggtagtgctctgtggccaccgagagagggtgccacgtggccccagactctctgtgtgcctctccttctgggttggtgctgtgtgatctagcacagccaccgggatccagaggtcagcgtggggccctgacgggaggtccggatcagacacacataaggctggtctcttcagtcggggtccaggtgcctctggcagggctgccgctggtgtttcatgcatcgtggaggccacgtggtcactgacctcatttccttgatggaggccctgctgcaggctaatcctttctcttggagtgaatgctgacttctgtgtctctgtcactgggtgttgacgtgaggcaccgcccttgttattccagtgggggtgctggtgttggatccgacagatggtccataataggccaccgactgtgttcacgtggctcctgccacagatggtctttgtggtggtggggcccactcagctgaccacgctctcctttctggcaggagacgttctagacccagtgtcttcagtggaaacagagcacaggctgtctgcagtctcaggcttcctagcagccctgataagagaagtagagcaatgcaggtgacattaatccttgcaggtttcatttcacctctatatccaacattttatctcaacatgtagtctgtagaaaacgttaatttgagctttatgggtttttttcatattaagtcttcaaaatgcacatgggatgggatgtaaagaacgctgaagtgggggcatttcagaggtgtctgctgctttttgcctgtgcctgctgggaagttgcagtgctctgtgtggcttgcgtgttgcgaggttgcggtctgcgtggctcacgtgttgggaggtcgtggtctgcgtggctcacgtgttgggaagttgcagtggtctgtatggcttgcgtgttgggaggttgcagtctgtgtggcccgtgtgttgggaggttgtggtctgcgtggcttgtgtgttgggaggttgtggttcacgtggcttgcatgttgggaagttgctgtggtctgcgtggcttatgtgttgggaggttgtggtttgtgtggcttgtgtgttgggaggttgcagtctgcgtggctcgtgtgttgggaagttgctgtggtctctggcttatgtgttgggaagttgctgtggtttgcgtggctcgtgtgttgggaggttgcagtttgcgtggcttgcgtgttgggaagttgctgtggtctgtgtggcttatgtgttgggaggttgtgggtttgtgtggctcaagtgttgggaggttgtggtctgcgtggctcacgtgtggggcggttgcttggctcgcctgttgggagtttgtggtttgcatggcttgtgtgttggaaagttgctgtggtctgtgtggcttatctgttgggaggttgtggtttttgtggcttgcgtgttggggggttgtggtctgtgtggctcacgtgttgggaggttgtggtctgcgtggctcacgtgttgggcagttgtctgcttggctcacgtgttgggaagttgtggtctgcgtggctcatgtgttgggaagttgtttatgtggcttgtgtgctggaggttgtggcctgcgtggctcacgtgttgggcggttgtctgcttggctcatgtgttgggaagttgtggtctgcgtggcttgtgtgttgggaagttgtttatgtggcttgtgtgctggaggttgtggtctacgtggcttgcactgtagttcttttggacagccttgttctgcagtctgtgtttcagccctggaattgccacattctccaagaagccctggtttcttgactagagagccttgtgtagaagccaggacctgggttctgggtgaagccctctgcagatagagctgggagatgcctgttgtgtgtgtctgcaccacatacatggacactgtgcagagggattctgttggcacctgtgtttacatgggttgaaaactgtttttacacggaaacttccagttccctcgtgccccgtgggttccgcccacttcttccctttcagttttgtatctgcgccgtgaggacttgtctcctaatcttcgtatcaactccgtgtcccattgagctgaccttccgcctctcccccagggccctggccatcctgtgggctctgagactttgcatggatccgcggtggggagctgcccccacacaaacgtccggctcttctcaggccaggtggctgccctgacatggcatgatgtccagcgcatggacgtcacccttgcactggagcccagccaaccgctgcatgacagccctcttcccccttgaaccccaagtctgcacacaccagtgcctcctcttcctggatcctcctgatggcctgtacacagaactggggtgtgggtggtgggtttttaaatgaaaaccagtccacacatgcttgagggctggagccgcctgccgtcagggcagtgccatgctgacctgctgaccgttccattttgtcaaggctcatgagcaattttaaatgtttactcgtgggtgaaggtttttgtttcagctgtaccccctatagcagggccatggggagcctaagaggttctccttggcacctgtgcgcgctctgctgttgccggtgagtctgaaattccagggaatgccgtgaggggccctctggcgtttgttcttggacaaatgtgctttcacccccattaagccctgcttgttggtcttcatttcatttgtgctgcgctgcccctcctgagggacagacgctcaggcagtgcttccttccagatgggctatctgaagaggaacggggacgggagcctgctctacagcgtggtcaacacggccgagccggacgctgatggtgggtgcccgctcagggctggctttatgctctccgtacactgctttttgggcctccgttgatattctgtaatgaaaagctgagccatggccatggggcagcatgagaggctgcccggcttcccgaccttgctcgcaccccaacgtgacacgtgcgctgagtggaggtgtggacggccatctcgcggggcgggggtgctggtcagacctcggtcagggctccttgggagcagcgggactcgagccatgttcctgaaaagctgccgagaggcctttaaggccaaacctcactagcatcaggaagggttcacatcccgagctcagtcttcagcaaagaccagagtgctggcccaccctgctccttgaatctggaaagcagtcttagaagagctgttagatgatgacgtcaggacagtgttgaaggatggtgcacactaggcctgtccagcccgtcaggggcactttgttggcctggaagtaattaagaggcttgtcctttgaacgaaagtgtgatcacttgggtttgaaacgcactcgcgggctcgcgtgaggaacgtgcagcctggcacgggttgcctctagattcctgcttccctcgctctcaccctcatgcctgctggtggtctttcacccagctccaccatgccagcgtggttttctccagtgtgtgaaggatagaaacgggctgatctatataatcttcagcttattttcctaaagaggatggaccgttgatccatatttagcttatgagagtgttgagaccgaggcagcggttgggaactgaggaactcctgctctgatcccatgagtggtgtgtgggtggtgacttgagcatggcagacatgctgtcagatgcacgcgctccaggtacacgccaccgtttcgctgttagaacacgcaggacaagatttcttcttggagttgttgagtgatccatttgaaaatgttctcaaagtattgctggtgtggtggccaaagatgtggtattttttattgtgttgactttggggtgataaagaaatgaaattgaaatgcagttagttttgagaatggtagttggcttttgcaaatttgttttcaggtgatcattataaaatccccccacctgcaccaatcacatccactgtgatgtggagaaagggctcatggcactgcactggggcaccgcgttggggtcacacctgccactcacggcccgccatgtccgtgttgcagaggaggagacccacccggtggacttgagctcgctctccagtaagctactcccaggcttcaccacgctgggcttcaaagacgagagaagaaacaaaggtaaatccatagtcccgtcccaggagccagccggagcagggaaggtggcaggggtttagtggagtgatggcaaatgctgctgattcgtacttcagagtttcctcactgtacctggattcatgttttcacatgggtaagattgagatcagttacagtgacaggaatgaaactcgtgttggatggggacacacacagcgggcaccttggttgcatcactggacttcaccttggtcagtgttttggggtccttgtgtttctgtccctgtcgcattacagaacatcccttcaggggtcagaatgtgtggcccctgggccttgggtctggcctgtgtgttctctccatctgcactgctgcctcctggctgcgctgctgctgggacctcctgcatggccccaccctccacttctccacctctgctgggtccctcccatgcagacagctgcatggacactgctcctgccggccctttctgcctcagccactcacaccatctgctaatgggacagctcactcttccctccaaaccatggccttggctcaagagcttccttgtttctggaatgttctttcctccagctccaggtgttgaaattctgcctggtctgggtctcctgttgaaggacgccctccactgggaaggatcctcttgccttcaccacttgtcttcaccagcccctgctcccctcttcctcttggggctgttgtggttgttgatactttttttttgttgtgtttgacacacatcttcttctcaccctctaacacagttctcaaccacagcacttttgtccctggagatgttggcagtgtccagaggcgtgttgatggtcccactggggttgggggtgctgctggcaccagatggtagggagatgccaggggtgctgctccacaccctatgggacactgcacagtacacctggcctgtgtcccccacagcgagagctggccctgggcaggcgtggtccctgcggtgtgtgttggttgggatcctccacagtgacagacggtgcgctctgcccacgtttccacacagctcttttgcttgtggagctcacccctttgcagagagctcatttccctgcggtctttggcctgcagaagtaaaatgaggggtggtgaattacacccctgctggttacacatggaaaactcaggagtgagaattttgtggagagcaagagaggtgagactggggtgctggctgccagccaggcggtccctcagcccctggagaagcggggtggggcctgcacaccgagtccttccagtgagtccagtgatgctctctcctcttcctcccagtcacctttctctccagtgccactactgcgctttcgatgcagaataattcagtatttggcgacttgaagtcggacgagatggagctgctctactcagcctacggagatgagacaggcgtgcagtgtgcgctgaggcaagtgtcggccccggggagcccttggctgctgtgcagcttgagctgtgccctggtgtgggacgtggagtcccacatgtgtgcgggtggggagagagccatcttgcagccgtccatatggcagcctgggtcttcccgttgctttcagtcatccacacaggtctgccacaggccagtcctgaaatctgggtaactcagtcagaaggtggtgatcagggcgtagcttgtgaaggggttgggggtgtgttgagcacactggatcgtattgaattgtgtttcctaagtgaccgtgctagctcaggctgcagtgacaaagcaccacagactggggtcttattcctgggggctggcatttgccatgaaggtgtgggcagggctggttcctcccgagccctctctcctgggcctgcaggtgccgtctttccgtcttttccctgtgccttcccggggccatcctgcgtgtgtctgtgtcctcggctctcctggagaccctaccgttctcaaggaccctggtcatattggatcagggccaccctaatggcctcatgtcactgcagttacctctaaaggccgttaaagtccccagctccaagtataatcacattccaaggcactggggtcgggatttcaacttacgaactctgagcgggagatacaattcaggccatggcaggctaaagtataatactaaaatcacaaatgtagcagcctgcttttccgtagaatgttgctgtgtgtattttttgttttctgtggcaaaataaaagtgggtcactcttgtaaaatttggcagtttttaatggagaaagcaacttaattttgctagcctttaagaaatggcatcttgacatatcaggtcttcattttattccaacaagaatgcagaatatgttttaaaaataaacaagaatccccttagtgcttcataaaataagtgaaaacctgaccctgatttttgtagcaaaaaatgaagtaaacgtggaaaatgaagaggaaattctagtaggagacgatggggtcataagtcagaaattaaagagttgtttgctccccaccctcccgccagccctcacctcacccctgctgtggggcctctgcccagcctgggccaaggccgtggctcccctggtgccatcctgtccgcagtcggctccctgtccacggcgtgtggctccttcaggacatcagtcacctgttgtccatgtggcacatcagtggactgtgcacaccccccgccttccccagctgtctgtccctagaacgcatcaggttccatgttgccgtgaagaaagatcattctgaccccgcctgccttgtggctgcaggggcaacactcagaagcacatctcctagggcctggcatgaggctacgtggtcccatgccagcctcagcgcacagacacccagatcctctgcccctgagtgctgcttccgtgcacgctgcgagtgccgagcttggcctgtcccgggctgtgggtgttttaacaaagacacggagtctccctgttgcctcctgtgaccgtggttcagcttctgaccagcagccatccttgttcctctctgtgaaggtctttggagtctggggagcccttctgaggcgcttgcttggtgctttgattctaagactatgcatttttgttcctggcctactttttagattgtattatattttattttttaagctgtttcatgtatatggccaagaatcaggatggtactaaaaggagtgccttggaagtgtcggcccacccctgccccacgcgcccattcctcaccggcaggcactgcccactggtgtgcttctgtccacacccacttgtgtttttaaacgcataacgagtggaaagataggagtattcttttacagatgataacatagcacacgtgtgtttctaggctgtgtgcatgtgtattcatgcttttctccctctccccactgagatctttttaacctttttgggtcatggaccactttgaaaatctaatgaaaactatcagccactccccacaaaatacccgctctgggagggtcacggggaccgaggagctgcgctggcacggcaggcttctgtgatcagggctgccgcgagggccaggcgacaagggctcctttcagcgtaccttctcccgcggcccctctagcctgcaggagtttgtgaaggatgctgggagctacagcaagaaagtggtggacgacctcctggaccagatcacaggcggagaccactctaggacgctcttccagc

SEQ ID NO: 10984 - DNA, 1417 bp, Homo sapiens
acgggggaggagttccgggcacgcggacgggggtcctgggcaccgggcgagattatgccgacaagcccctggagaagcctctaaagctagtcctgaaggtcggaggaagtgaagtgactgaactctcaggatccggccacgactccagttactatgatgacaggtcagaccatgagcgagagaggcacaaagaaaagaaaaagaagaagaagaagaagtccgagaaggagaagcatctggacgatgaggaaagaaggaagcgaaaggaagagaagaagcggaagcgagagagggagcactgtgacacggagggagaggctgacgactttgatcctgggaagaaggtggaggtggagccgcccccagatcggccagtccgagcgtgccggacacagccagttctcggtggaacttaaaatgctgtgagacaccagacagacagatactgtgaacttggagctctctaatgaagggataccaaagtcttgtattcaatttttttttccttaaattgtcagccgaaaatgagagcacacctattcagcaactcctggaacacttcctccgccagcttcagagaaaagatccccatggattttttgcttttcctgtcacggatgcaattgctcctggatattcaatgataataaaacatcccatggattttggcaccatgaaagacaaaattgtagctaatgaatacaagtcagttacggaatttaaggcagatttcaagctgatgtgtgataatgcaatgacatacaataggccagataccgtgtactacaagttggcgaagaagatccttcacgcaggctttaagatgatgagcaaacaggcagctcttttgggcaatgaagatacagctgttgaggaacctgtccctgaagttgtaccagtacaagtagaaactgccaagaaatccaaaaagccgagtagagaagttatcagctgcatgtttgagcctgaagggaatgcctgcagcttgacggacagtaccgcagaggagcacgtgctggcgctggtggagcacgcagctgacgaagctcgggacaggatcaaccggttcctcccaggcggcaagaggaggagacccacccggtggacttgagctcgctctccagtaagctactcccaggcttcaccacgctgggcttcaaagacgagagaagaaacaaagtcacctttctctccagtgccactactgcgctttcgatgcagaataattcagtatttggcgacttgaagtcggacgagatggagctgctctactcagcctacggagatgagacaggcgtgcagtgtgcgctgagcctgcaggagtttgtgaaggatgctgggagctacagcaagaaagtggtggacgacctcctggaccagatcacaggcggagaccactctaggacgctcttccagc

SEQ ID NO: 10985 - DNA, 29061 bp, Homo sapiens
gtttccggcgcggcccagcgagctcggcaacctcggcgcagcgagcgcgggcggccagccagggccagggggcggtggcggccaaggtccgaccgggtgccagctgttcccagcccccgcctcgggcccgccgccggcgccgccatgggcaagaagcacaagaagcacaaggccgagtggcgctcgtcctacgagggtgaggcggcggcgctttgtgacgcgcggcgggcggggtcccgggcacgggggaggagttccgggcacgcggacgggggtcctgggcaccgggcgaggtcctggccacgagggaggggttctgggcacgcgggagggggtcctgggatttcgggcagggaaccgggcacacgtgaggggtcctgggtaggcgcttacgttcctggtagagggttctgggttcgaggctgcaagcccactcaccccggtcctggagactagggaagcatctgtgctggcttttgtgtggagctcagggagaagctgggctgccctttctcccgcctttccctccctctcccttgctcccgcagcagctccatgggtgtcagcgggcagcacgggcgcctgcaggaagtcaggcgagggtgaaccgaagtgctgggggtttctaggagggagatcgggctccggggttccaggtccctcttaatccatcttcttgaacgagtaatgtgaacaacatcccacagggcctctggtgaggacaccgtggctcgaaagggacctgaagctccctgcggaggggaagggagaacaaggaggcagtgacatgccgccactgtggtcttcccttccgtctttccctgctggttggcagccccgctgtactccttagggaggcctttccctcttagcaccttcacgtctcacctggctgcgtggcgtttgcacctgagcacgcgggtagaactcggtctgtgtctgtgcagattatgccgacaagcccctggagaagcctctaaagctagtcctgaaggtcggaggaagtgaagtgactgaactctcaggatccggccacgactccagttactatgatgacaggtcagaccatgagcgagagaggcacaaagaaaagaaaaagaagaagaagaagaagtccgagaaggagaagcatctggacgatgaggaaagaaggaagcgaaaggtaaaggagcagcggcggtggcccggacgctgcccacgaggagcccgtggggagcctggtcccaggacccaggcagagtgcgcctgcgtggctggaggaggggagggggtgttccgttggtagcaaaacgcgaaccgctgaggcccgcagactcagttccaggatcctgggtgtgctgttcctcagcagaccctgccagggtctctgtgaggagggagcctggcatgaggaggatctcggagggggtttcccttagttctgtccctcccctgagaactgcgaggggattgggcagacctgtccggatcccgcctactcctgcctttctcactcccttgactctgccgcccaggaagagaagaagcggaagcgagagagggagcactgtgacacggagggagaggctgacgactttgatcctgggaagaaggtggaggtggagccgcccccagatcggccagtccgagcgtgccggacacagccaggcaagggtgcacttttagagactctcctggtgttcacagctcatcgttgtaaatgaggggtcggcaccgtgtcctgttgctttggggagaagcatgggagggaggagagctggtatttccagggcctcatcccaggtgtcctctggcctgaggtttcctccggtgtctctgaatgtctagagcaaggcgtggccagttaccactggtgcccttcagttttgttttttaacttgttagctaaggatggcttatatgttttttaagcgttcataaaaagaaacaaaaaggcatctccacagagaccaatcgtatgtgacccgcaaagcctagactgttttttgtctggcctttatgtaaaaagtttgccagccctgggtcttgaagtttggttttgtttgcacttaagacagtattggaacagtagccccatctgggtcagactggtaagagagatgcatgtcagtgaaaacgcaggtaattccccttgggaagaagggacctcgaggcccaaatggtgggtctgaagttgctgaaagtgaccataggctgagacaaaggaagctggaggcctttagtagaatctctgtcgtgggcaccatctgcgaaggatggcatttggctggaatttccagttgacaaggacttgccctctgagttctctttgtccccagccttcctgtgcacaactcacagtgatgaggcatttgtacctaagacaaggggtgtctcttcccagcaactctcagcatccagtggttcctggattatagggaaacagacggctgggctttgggacatgggacatcagggagtggggaggctagtgctgcgatcattcaggccgtcagaaactgtctgaggcctgctggctccactgaaggaaagttctggaaagctggtggccttctgagctcctgtggtcatttggctcttcaggcactttctttttttaatttatttttgaaacatggtcttgctgtgtcgcctaggctggagtgcagtgtcgtgattcactcctgggctcagataaccctgggctcaagcgatcctcccacctcagcctcccaagttgctgggactacaggcacgcaccaccacgccggccatttatttactttttgttgaattttaagggacctcaagtgaaataataatcggtgaattcaggatcaacctttatgtccagagcgtttgttccgtcgtccatttcttgtctagagtagtggtatgagctgaaaacattgctaagtgatcaccacatattgttgatgtaagggctaccggttattacaagagatttttatgactcctgctgtgggggtgccctttctacccggctgagcttggtgggagccaaggctgagtcggatgtatctttatatccccagttctcggtggaacttaaaatgctgtgagacaccagacagacagatactgtgaacttggagctctctaatgaagggataccaaagtcttgtattcaatttttttttccttaaattgtcagccgaaaatgagagcacacctattcagcaactcctggaacacttcctccgccagcttcagaggtaaaccggggcgtttctgaagagctagtgtctgggggggtgtggtgtcatcttttctgaggccttattccccacgccagcctcgtcagctgtgaaacagaccctgcaccttctcttggtgactcccagtccacttcggggtgcgtaggaagagttcatgaactcattagtggctcactctgaagtcagagtagagtgagggaagtcaaggctagagctgggacattgatggccgccaggatgcgttgggggaatttttattatatctgaaatacctatcacaataaattaaaagacgctcgtaacttttttatttttaagaaacaaaattcggtcagttgtatccaatttttggattgtaagagattttgtatcatttagaaatctagatttttccgctttaagatgtctttgctttcagaaaagatccccatggattttttgcttttcctgtcacggatgcaattgctcctggatattcaatgataataaaacatcccatggattttggcaccatgaaagacaaaattgtagctaatgaatacaagtcagttacggaatttaaggtaagttactttcattgcccgaagtaatcgtggcatagttctgtgtattcatgtcttgtgaagacttcattcaccttagatcatttctagtttttgagctttcacaggtgtttctgtgttcggatgatgttttacagacacagcattaaggaaatgattggtcgtgaacgttttctctgtgctttggtctagaaactaggtcaggttgcacgctgttagaagtctgtttcttttctttctaagttactgcgctggcgtaaataggacatgttgtttcaagcagtgaggtgtccggtgtggcacggcttgagactagacatttttaaaaacatacttctttttaattcttagttttgtcttacactaattgagcatttagtttttttagcatagtaagtttttctgtctcctgagtactttgctcttagctctgtttcttgctactggctgtgagaattagcaactgctcattggttttgcaacccaggggaagaaagcaaaacaaatgcttgataaagttggcattagtgtagtttagaaaggcattagatttctctcttaggttccattcccctggggaaagcttgacttttctattttatgcttactgaagggtttgctgactcacagaaacacaacagaacagacttaaaggagagtgggagaaaaggaaactcgatgagaggatcaggcagcgcctgagggtagatgttaagagcactccatgcccgaaagccctctgtattccctgcttcgggccccagtctggccattcctagcaacaaagtgagaaggggagcagcattcactccgtggagtgtccgcagtggagtcttcaggggaggggctccacagcctcgggccgggccctagggctgctggctctggaaccgggacttggggagggtccagatggcacgttctcagttagggtggccggcctccggggtcatgctccagcctgacgttggtactcacctttgagaggcctgtgctgaggaaactggcctctcataataaaatactgatgcttccgtattttcaccataaattacaaaataaggttgtccttttgtggggcaaagtctttttctagtagtttgagggaaccatttggtgacagaattttaaattcgattctgtggagaaattctagagatagaggctatcactgtgccgcacgcctgccttcatcccttgacttgcacttgaaagaatcgggtcgttgcttctcgttcctgtttatgttctggagaaatgcaagaagcgcaggaaacgctttttcctcacacagcatttgtatgtgatgcttagaaagaagttacaggcttggccaactgtttgctgtaatatttttcatgcaagaccaatgtgcaactaagaaaacttctcttaagttcttaaacgttatgtttagatcagagagcccagttgaattgttttctactcgattgtagctttttccttttggtctcttggtagtcatctagagctttgctgttgtctgtggcatttcaaacctgataagtctttcctgttttcttttcaggcagatttcaagctgatgtgtgataatgcaatgacatacaataggccagataccgtgtactacaagttggcgaagaagatccttcacgcaggctttaagatgatgagcaaagtaagaaactcactggcagcagcgagctacggaaagcaggggctctgccccccgtcgcttgtgcccgaagggagcctcacagtgaacacgtgctccatccacccgccaccctcatggtgttgccccctttgctctagggtagacgtccccggccgccctctctgctcatgacctagctgtaacatctcattgagggttggtggaaagttccgcatctcttgatcttaagcctgggtgtcaggtgtcagtcttgctggatggcagccagcattgcgggcttgttttgcgtgactgcctcactgaatccagacgggacatccttgtcttccttggccatcctgagtggcttcccagatctgtgccgtgagccaggctgcatgcatcccacgtaggagaaggtaaaggggaggtgcggcacctgccgcgctctggcggtgggtcaagcccccacaaccacctcccgctgctccgccgtggaaagttagctcttaggccaggtgaggctgtgaccatccccatcccatcccatcgtcacggcaccctggctgtgagggagaggtaaatccctgctgctctgtcctttctgattctaggagcggctgttagctttgaagcgcagcatgtcgtttatgcaggacatggatttttctcagcaggcagctcttttgggcaatgaagatacagctgttgaggaacctgtccctgaagttgtaccagtacaagtagaaactgccaagaaatccaaaaagccgagtagagaagttatcaggtaaaggttctgtggaaaccacatttgcttttggagttgagcaccatagccaggaaagcaggtgccttgtaggggagagtgagtgagtgagagaacggatgtcatgtcacatagacattcttggtgtagcttattctggcaggaggagtgtggccagacagcccctcctgcccaccggccacgtgcactctctgacccaggtgtggtacccaagcccgtccgatcacccctgcccccaactgctagtgactggtggtctctgtctctacacgccgttaagatcattggcccctccctcccctgcacagcgcctgccggcagccaaggctgtgcccttgtcccagactgtgccgcacaagcgggctgactttgggcagccagcattggcagggggcttctttgttgctgtggggcagatgcacactcctgaactgctcgcttctgtgtctgtgtagacgctggagtggagcaggtgcaggcctgtggtcaggaaggtgtggatgctgcgggggaagcaggtgaggactgcaggccacagctccctgtagctctgctccctcccacagggagcagccgacttggctggtccttcagggaaccttcttcctttttttctaaaccccagagtggttttcatgggggctctttgtctcatggtggctgagcattgagattgtatcaaagtccgtatcacacgtcattcctgtagacgctcctccacctatgtgaggtggctgcctgataggaccaaacaaagcgagagtatcgccaggggccttagaggcaccaagagcacttaacatagcctgcagcgggcagaagcgcctggcacagagcctgcttcatcacgtgtcacttgctgagtgcaggccccagagagcgcagtctcaggacatccaccctcatggccgtgtgtctgacagcactgtggctcgcggtcttcccagtatcctgagaggactggcctgttgccatcctggggacagatcagatttgaaggatggtttctgctgaagtgtattgcttttgtgccatcttgtgggaagtcagggaccgtctggagttggtactgaacgtccttgaggcaattgtgatggtcacggccctccattgtttgtttccttctcacatgtgtatgggactcacgtggatttaacaggtggggcggcagcggtgctgggctcggtgcttctgctctgagcagctccctccaaccgtcaaaagggagagtggtcttgagaccagcccctcaggtcctgcagccttggcttaggagacagggtgcgctgcgtggccagagtgtgttgcttggcaacggacgacagtcccctaaggcggtctccccacgtgcgttgcatttcccaccccgctgccgtgtgaacactcactgcgtggttggctggtggctgtgtccggcctcagcccccgactcgagtgtgctgctggccttcaggggtcggggtttcatggccgccctttgccgcctcatggtgactgagcatcgagggggaattgaagttggtgctggtcagcatgctcagctgcggtggggttgtgtcctggcagacccaccccaggttggttttgggtgtctctggtgctgcagcttcacccttgcctgtgggatccaggccctttagatggatccccagctgtcagtctgcaggcaggagagcgtgccgagctcaggcagtcaccttcacctagtgtcacagcagtgcgcatcggtaatgggctcacgcaggtgcctgagtggagcccctccctgcggagctcatggggctgtgactcctgtgtagggttgccaggttgtcactgtaggtcaggcaagggcagggccgctctcatgggcagggcttgtcctgggcctgcacctggccctaggccactcagacccatgcccaggcaagtgcccagggtgggaaggagcccactcgcttgcttctagaaccttccacactccttgggtgctacagcctgtgcccctcagctgttggagaactgcttcaggtggaacctgggaccacttgctgacgtccttgtgtgttctttgtgccacccagtggccacagcagagggggctgctgtccacccagcccagcagcaccagaccacacccgagcagccccgcctatcctgccttgctgtgaaccctgcgtagtcaggggtggcttttccagtcacttttctgatggggcctttaataactaaccagtgtgggcatctgttactttgttgcttttgttgctaaagcactttaactgagtttgcactgcgttgaaaaataggaagtctgtctacttggcttacacttaccctttattttaataaaagtgtcttaatttgtcatttggttagggtgaaaagggatgctttgagacctaaaaggagttaagtatgctctgccagctctgtgtctgagggcagggtcggtagaagctgggttaggtgccgacgcatggggagcaggtgtgcggtggggacgctgcctccaggtgacttggttgtccccacctcacagctgcatgtttgagcctgaagggaatgcctgcagcttgacggacagtaccgcagaggagcacgtgctggcgctggtggagcacgcagctgacgaagctcgggacaggatcaaccggttcctcccaggcggcaaggtagtgctctgtggccaccgagagagggtgccacgtggccccagactctctgtgtgcctctccttctgggttggtgctgtgtgatctagcacagccaccgggatccagaggtcagcgtggggccctgacgggaggtccggatcagacacacataaggctggtctcttcagtcggggtccaggtgcctctggcagggctgccgctggtgtttcatgcatcgtggaggccacgtggtcactgacctcatttccttgatggaggccctgctgcaggctaatcctttctcttggagtgaatgctgacttctgtgtctctgtcactgggtgttgacgtgaggcaccgcccttgttattccagtgggggtgctggtgttggatccgacagatggtccataataggccaccgactgtgttcacgtggctcctgccacagatggtctttgtggtggtggggcccactcagctgaccacgctctcctttctggcaggagacgttctagacccagtgtcttcagtggaaacagagcacaggctgtctgcagtctcaggcttcctagcagccctgataagagaagtagagcaatgcaggtgacattaatccttgcaggtttcatttcacctctatatccaacattttatctcaacatgtagtctgtagaaaacgttaatttgagctttatgggtttttttcatattaagtcttcaaaatgcacatgggatgggatgtaaagaacgctgaagtgggggcatttcagaggtgtctgctgctttttgcctgtgcctgctgggaagttgcagtgctctgtgtggcttgcgtgttgcgaggttgcggtctgcgtggctcacgtgttgggaggtcgtggtctgcgtggctcacgtgttgggaagttgcagtggtctgtatggcttgcgtgttgggaggttgcagtctgtgtggcccgtgtgttgggaggttgtggtctgcgtggcttgtgtgttgggaggttgtggttcacgtggcttgcatgttgggaagttgctgtggtctgcgtggcttatgtgttgggaggttgtggtttgtgtggcttgtgtgttgggaggttgcagtctgcgtggctcgtgtgttgggaagttgctgtggtctctggcttatgtgttgggaagttgctgtggtttgcgtggctcgtgtgttgggaggttgcagtttgcgtggcttgcgtgttgggaagttgctgtggtctgtgtggcttatgtgttgggaggttgtgggtttgtgtggctcaagtgttgggaggttgtggtctgcgtggctcacgtgtggggcggttgcttggctcgcctgttgggagtttgtggtttgcatggcttgtgtgttggaaagttgctgtggtctgtgtggcttatctgttgggaggttgtggtttttgtggcttgcgtgttggggggttgtggtctgtgtggctcacgtgttgggaggttgtggtctgcgtggctcacgtgttgggcagttgtctgcttggctcacgtgttgggaagttgtggtctgcgtggctcatgtgttgggaagttgtttatgtggcttgtgtgctggaggttgtggcctgcgtggctcacgtgttgggcggttgtctgcttggctcatgtgttgggaagttgtggtctgcgtggcttgtgtgttgggaagttgtttatgtggcttgtgtgctggaggttgtggtctacgtggcttgcactgtagttcttttggacagccttgttctgcagtctgtgtttcagccctggaattgccacattctccaagaagccctggtttcttgactagagagccttgtgtagaagccaggacctgggttctgggtgaagccctctgcagatagagctgggagatgcctgttgtgtgtgtctgcaccacatacatggacactgtgcagagggattctgttggcacctgtgtttacatgggttgaaaactgtttttacacggaaacttccagttccctcgtgccccgtgggttccgcccacttcttccctttcagttttgtatctgcgccgtgaggacttgtctcctaatcttcgtatcaactccgtgtcccattgagctgaccttccgcctctcccccagggccctggccatcctgtgggctctgagactttgcatggatccgcggtggggagctgcccccacacaaacgtccggctcttctcaggccaggtggctgccctgacatggcatgatgtccagcgcatggacgtcacccttgcactggagcccagccaaccgctgcatgacagccctcttcccccttgaaccccaagtctgcacacaccagtgcctcctcttcctggatcctcctgatggcctgtacacagaactggggtgtgggtggtgggtttttaaatgaaaaccagtccacacatgcttgagggctggagccgcctgccgtcagggcagtgccatgctgacctgctgaccgttccattttgtcaaggctcatgagcaattttaaatgtttactcgtgggtgaaggtttttgtttcagctgtaccccctatagcagggccatggggagcctaagaggttctccttggcacctgtgcgcgctctgctgttgccggtgagtctgaaattccagggaatgccgtgaggggccctctggcgtttgttcttggacaaatgtgctttcacccccattaagccctgcttgttggtcttcatttcatttgtgctgcgctgcccctcctgagggacagacgctcaggcagtgcttccttccagatgggctatctgaagaggaacggggacgggagcctgctctacagcgtggtcaacacggccgagccggacgctgatggtgggtgcccgctcagggctggctttatgctctccgtacactgctttttgggcctccgttgatattctgtaatgaaaagctgagccatggccatggggcagcatgagaggctgcccggcttcccgaccttgctcgcaccccaacgtgacacgtgcgctgagtggaggtgtggacggccatctcgcggggcgggggtgctggtcagacctcggtcagggctccttgggagcagcgggactcgagccatgttcctgaaaagctgccgagaggcctttaaggccaaacctcactagcatcaggaagggttcacatcccgagctcagtcttcagcaaagaccagagtgctggcccaccctgctccttgaatctggaaagcagtcttagaagagctgttagatgatgacgtcaggacagtgttgaaggatggtgcacactaggcctgtccagcccgtcaggggcactttgttggcctggaagtaattaagaggcttgtcctttgaacgaaagtgtgatcacttgggtttgaaacgcactcgcgggctcgcgtgaggaacgtgcagcctggcacgggttgcctctagattcctgcttccctcgctctcaccctcatgcctgctggtggtctttcacccagctccaccatgccagcgtggttttctccagtgtgtgaaggatagaaacgggctgatctatataatcttcagcttattttcctaaagaggatggaccgttgatccatatttagcttatgagagtgttgagaccgaggcagcggttgggaactgaggaactcctgctctgatcccatgagtggtgtgtgggtggtgacttgagcatggcagacatgctgtcagatgcacgcgctccaggtacacgccaccgtttcgctgttagaacacgcaggacaagatttcttcttggagttgttgagtgatccatttgaaaatgttctcaaagtattgctggtgtggtggccaaagatgtggtattttttattgtgttgactttggggtgataaagaaatgaaattgaaatgcagttagttttgagaatggtagttggcttttgcaaatttgttttcaggtgatcattataaaatccccccacctgcaccaatcacatccactgtgatgtggagaaagggctcatggcactgcactggggcaccgcgttggggtcacacctgccactcacggcccgccatgtccgtgttgcagaggaggagacccacccggtggacttgagctcgctctccagtaagctactcccaggcttcaccacgctgggcttcaaagacgagagaagaaacaaaggtaaatccatagtcccgtcccaggagccagccggagcagggaaggtggcaggggtttagtggagtgatggcaaatgctgctgattcgtacttcagagtttcctcactgtacctggattcatgttttcacatgggtaagattgagatcagttacagtgacaggaatgaaactcgtgttggatggggacacacacagcgggcaccttggttgcatcactggacttcaccttggtcagtgttttggggtccttgtgtttctgtccctgtcgcattacagaacatcccttcaggggtcagaatgtgtggcccctgggccttgggtctggcctgtgtgttctctccatctgcactgctgcctcctggctgcgctgctgctgggacctcctgcatggccccaccctccacttctccacctctgctgggtccctcccatgcagacagctgcatggacactgctcctgccggccctttctgcctcagccactcacaccatctgctaatgggacagctcactcttccctccaaaccatggccttggctcaagagcttccttgtttctggaatgttctttcctccagctccaggtgttgaaattctgcctggtctgggtctcctgttgaaggacgccctccactgggaaggatcctcttgccttcaccacttgtcttcaccagcccctgctcccctcttcctcttggggctgttgtggttgttgatactttttttttgttgtgtttgacacacatcttcttctcaccctctaacacagttctcaaccacagcacttttgtccctggagatgttggcagtgtccagaggcgtgttgatggtcccactggggttgggggtgctgctggcaccagatggtagggagatgccaggggtgctgctccacaccctatgggacactgcacagtacacctggcctgtgtcccccacagcgagagctggccctgggcaggcgtggtccctgcggtgtgtgttggttgggatcctccacagtgacagacggtgcgctctgcccacgtttccacacagctcttttgcttgtggagctcacccctttgcagagagctcatttccctgcggtctttggcctgcagaagtaaaatgaggggtggtgaattacacccctgctggttacacatggaaaactcaggagtgagaattttgtggagagcaagagaggtgagactggggtgctggctgccagccaggcggtccctcagcccctggagaagcggggtggggcctgcacaccgagtccttccagtgagtccagtgatgctctctcctcttcctcccagtcacctttctctccagtgccactactgcgctttcgatgcagaataattcagtatttggcgacttgaagtcggacgagatggagctgctctactcagcctacggagatgagacaggcgtgcagtgtgcgctgaggcaagtgtcggccccggggagcccttggctgctgtgcagcttgagctgtgccctggtgtgggacgtggagtcccacatgtgtgcgggtggggagagagccatcttgcagccgtccatatggcagcctgggtcttcccgttgctttcagtcatccacacaggtctgccacaggccagtcctgaaatctgggtaactcagtcagaaggtggtgatcagggcgtagcttgtgaaggggttgggggtgtgttgagcacactggatcgtattgaattgtgtttcctaagtgaccgtgctagctcaggctgcagtgacaaagcaccacagactggggtcttattcctgggggctggcatttgccatgaaggtgtgggcagggctggttcctcccgagccctctctcctgggcctgcaggtgccgtctttccgtcttttccctgtgccttcccggggccatcctgcgtgtgtctgtgtcctcggctctcctggagaccctaccgttctcaaggaccctggtcatattggatcagggccaccctaatggcctcatgtcactgcagttacctctaaaggccgttaaagtccccagctccaagtataatcacattccaaggcactggggtcgggatttcaacttacgaactctgagcgggagatacaattcaggccatggcaggctaaagtataatactaaaatcacaaatgtagcagcctgcttttccgtagaatgttgctgtgtgtattttttgttttctgtggcaaaataaaagtgggtcactcttgtaaaatttggcagtttttaatggagaaagcaacttaattttgctagcctttaagaaatggcatcttgacatatcaggtcttcattttattccaacaagaatgcagaatatgttttaaaaataaacaagaatccccttagtgcttcataaaataagtgaaaacctgaccctgatttttgtagcaaaaaatgaagtaaacgtggaaaatgaagaggaaattctagtaggagacgatggggtcataagtcagaaattaaagagttgtttgctccccaccctcccgccagccctcacctcacccctgctgtggggcctctgcccagcctgggccaaggccgtggctcccctggtgccatcctgtccgcagtcggctccctgtccacggcgtgtggctccttcaggacatcagtcacctgttgtccatgtggcacatcagtggactgtgcacaccccccgccttccccagctgtctgtccctagaacgcatcaggttccatgttgccgtgaagaaagatcattctgaccccgcctgccttgtggctgcaggggcaacactcagaagcacatctcctagggcctggcatgaggctacgtggtcccatgccagcctcagcgcacagacacccagatcctctgcccctgagtgctgcttccgtgcacgctgcgagtgccgagcttggcctgtcccgggctgtgggtgttttaacaaagacacggagtctccctgttgcctcctgtgaccgtggttcagcttctgaccagcagccatccttgttcctctctgtgaaggtctttggagtctggggagcccttctgaggcgcttgcttggtgctttgattctaagactatgcatttttgttcctggcctactttttagattgtattatattttattttttaagctgtttcatgtatatggccaagaatcaggatggtactaaaaggagtgccttggaagtgtcggcccacccctgccccacgcgcccattcctcaccggcaggcactgcccactggtgtgcttctgtccacacccacttgtgtttttaaacgcataacgagtggaaagataggagtattcttttacagatgataacatagcacacgtgtgtttctaggctgtgtgcatgtgtattcatgcttttctccctctccccactgagatctttttaacctttttgggtcatggaccactttgaaaatctaatgaaaactatcagccactccccacaaaatacccgctctgggagggtcacggggaccgaggagctgcgctggcacggcaggcttctgtgatcagggctgccgcgagggccaggcgacaagggctcctttcagcgtaccttctcccgcggcccctctagcctgcaggagtttgtgaaggatgctgggagctacagcaagaaagtggtggacgacctcctggaccagatcacaggcggagaccactctaggacgctcttccagctgaagcaggtgggctgcactcgcaccggggttggggggcaggtgcccttggggtgctgctggcgggaagagcctgcagcctgaccaggctttcggggacgaggagctgtcgcagggactctgctgccggctcctcgtcaggatctgcgtgcttctctgcacgggcaggtgtcccccggagaccgtgactgtgtgctcaccactcccagcgcactcgtaactctctatttccatcttcatctttcatctctgtcactttccttcatcctgaagagtttaaaaaaatatttcctgtagttcagatttactgacagtgatctctcagcattggcttctctgaaagtctttatttcatcttcatttttgaaattcattttccctgtgtatggaattttagatgaccttttttcccatctactgtaaaataggtttgacttgcattgttgctataaaaaagcatctgggccaagcatggtggctcacacttgtaatcccagcactttgggaggccgaggcgggcagatccaaggtcaggaggtcgagaccatcctggctaacacggtgaaaccccgtctctactaaaaaatagaaaaaattagctgggcgtggtggcaggtgcttgtagtcccagctactcgggaggctgaggcaggagaatggcatgaacccgggaggcagagcttgcagtgagccgagatcatgccactgcactccagcttgggccacagagccagaccccatctccaaaaaaaaaaaaaaagcgtctgaagtcattgtcatctttgtttcccacatgtgacgtgtcttttcggccagatctgacctgaagtctgcttttgtacagaccacaagccaggaatgtcttttacatctttaaaagggtgtttacagaaaagaaaaggaagaagaagatgcttcgggcagcgtgtggctcacagagcctcggctgctcactcccgggccctcggcaggacgggatctggccggtgctctaggagcttttgaacttttatctttctttatcagtgattttcagcattgtattttccaggtgccttggtgggcttttctttgtgttctacttagcatttgttgtttcttggatctgtctgtagttttcatcatatttggaagatttttagccattactcaaatgtcattttccaccactgcctcttcctcctcctgctggactgtggcactctgaggacagctcgtgttatctcacatggcaccgacactgtgctgccgcaccaggctgctgcagattagtttctgatgctgttggctaagttcactcacctgttctctggccacacctgaacctgttatcccagatcagttttcactgatgatgtcgtcccgcgctgctcatcacttgggctccatttgctgcttttgtgtatcttctctcatgttgtgtgtatgtttttccttacatccttgagccacgttcgtatttattgctgctgcttttgaagtcctcagtcactgagtctgtcgcctctgccgtttccggttctgtttctgtttgacactttgctgcacttggagctgtgggccattgtgcacgtgcctggtggacagtcctgaccctcgctgtctgataaaaaagcactggccacatggccgctgggaaatttgaatgtggccagtctgaatttagatgtgatgtgtgagctacaaactagatcttaaaaaactaatgcaaaaaacgtaaaaatatgagtaacgatttcttatggcccacatgttggaataaaaacatcttcaataaatttgtctaagtaaaatgcattagttaattgaatgttaagagtaattttaatgtggcagctagaattttaagagctgggtatggtggcatgcacctgtcatcagctccacaggaggctaaggtgggaggatcacttgaggccgggaggtcgaggctgcagtgcgattgcaccaccgcactctaggcaatagagcaagaccctgtctcaaaaaaaagataaaaaaacatttagaacgaggcgtgtgctcgcgttatgtctgctgggcaaggctgatctgggttctttctctctttcagagaatactgatgatcattttggcagttgttacttgtggataatggccggatcctaccaggcttgtctggggtgggtccagggcagccttattctagggttcgtgtagccttaatgctaaggagtggcccttcggggagccctgtcttttcagcgtggtctctgctgtgggtggagttcggatgagtctctgtccttcccaggctctgagaacgtttggctcatggctcccaaggaggggtcagtcccttgacctgacggtttcatctgtgcttgttacagatgaactggggtccacatgcctggtgcagtaaacccagacacccatgccgaggttttgtcatagaaaggacgtgtgtatttgcagggcgccaagcaaggtgggccaggaggctcatgtataaatcctggcctcccccactggctacaggcaaggcttgtaaagcgggggtagatctcaggaaagcagaactgaaaggcagagtcgtgcataaggacacagaggttacatgtcggcttggcctagaagggcggtatctgcaagcagggccttataggttataggtggattcaaaggttttctgatttgcagctggttaaggaggagaagctttgtttaaaaatttggggtgaagagaaaagaatgttagcttaggcttgtgggtgtggcttcctccaggcccgtcaggaagaaattcagaacaaagaacggggtcagagctcagtcttcagtttctccttatctgagcccttcatgccagtagattagtttgttggggaggtcctaggtggagggtccaggtttctgaaagacaactcagggatatacattaagatgttatctttactttctttctttttttttctttttgagacatagagtctcactctgtcacccaggctggagtgcagtggcgtgattgtggctcactgcaacctctgcctccctgattctagcgattctcctgcctcagcctcccgagtagctgggattacaggcatgcgccaccacacctggctaatttttgtatttttagtagaggcggagtttcgccatgttggccaggctggtctttaactcctgacctcaaatgatgcatccatctcagcctcccagagtggtaggatgttgtcttttctttctacagggaacagtgctgggaggttgtctttactttctacagggaacaaacatctgtctccaccttccttgactgttgttttaggatactgttaccttcttgcttatcaagtcgctgatttacttctcagagttatctaagtaactggaatttcccttgaaggaactcaagattttccttgatttccatgcttggagggctcgcaggcccctgaagagagggttgcagccaggcgggagtccccaagcagatttctgcagctctgaggagcagccccctctgcagagcctgccccaccagctcgtggttctgactctgagctctggtcaccctcccgtgtcgtggcctgcaggctccttccaggcaggaagctggcccccccaacacagcgttagaatcaggcattgctgtggggtagggaaagtgaccccctcacagcccggaaatgggaaggctctgtggtttcctctctgggttccagttagattcctttcgggaaagtgaacttggatatggagttgagtgaccccgagtgcacccccgcagtaaatgatgctcaggactaaagtgactgaaggcttttggggaaacagatgcgaacaaaacagcagtattcattttctaattaaaagcttgtgaaaatcgatgtcattgaatctgagaaacattatttcgaacaaagatcacacatgatagagtgcatatactacagcatcgctccaccggagcacaggacgggtgtgccacggaggccgacagttgtggaaggagacaatgcacggcccggcccacctgctgcaggcaccgccaggaggtgtctgcctccttcgctcctgcgcccacggcaggcccacctgccacaggcactgccaggaggtgtctgcctcctttgctcctgcacacacctgcccctgcaggactcgagctggtctcaggcaactggtcatattccaggtggaacccacgagacccttcttatcctaagcttcccataggatctaggcacatcttttttcttttgttttaagccacccaaggctgccgaaacagcatcggcgtcctctctctgtccgctccatctcgccctgtggagcgctgtccccggcacacaatcctggcgctgaggagggggctgggcgtggttgggtcagtgactggtgatgaagaaggtttggaggacccccagccttaatccattaagatggtgtgactggggagcagaattcgcagaagcgcacaagccatttttacgtgtgtgtaatgtcagcgaattgtccgtttctatgaaatcactctggaaaaactagtttctgtcctcatttacttttcagagaagaaatgttcccatgaagcctccagatgaagccaaggtaagtttttgaacatggaagggcaagccaaatattattctcacagggaaagttgtatccagcctttgaggtggggaggtctgtgtgtatgacggcgtttagaaatggagtccgtttctgatcagtaagatcaatagtgtttctcctcctcttttcatgacttgaggtgagtggtgtgaagccgcagtacattcttccaaatccagaaatgggtagtttcagagcagttggccccgctgggtgctgtccttgtgggacacccttgcaagggttgggcaggatgggccttctcaggacctgcttggtgagtagcaggtgttgtcccaagcacagtgggctctggggccagtgctggcagggcagtgctgtgagcccagactgctgcacctgccgattggcaggtgtgtgtctctgacagtcagcaggcatgggcttgggctttggtccagggtccctgggaacctggagagaccccttaacatctgtttgagggcagaggccgagctgcagggagctgatgagagagtatgtgttagggtggctgtagtctagccctgaggacacgccttgctgggaaaggaaagggaacgttgtgtgctctgtgaagtgcctgagaaatagtcctggaccctaaaattctgtgtgtcttcctgttgcataatgtccctccccaatttctttagccccaaaaagttaacaaaggattgttagtttgcgttgttggtctcagtaggtttttctttgacatggatttgcatatccattcatgagctccaacctgacagtcccttgaacagcagcctcagtgaacagggcttggtcttgtcacttactgaggggtgggttcacgtttagcaaataattagagtgatttcaatagcgagtgtgaagtaacatttcgtttttcgtttgatgtttgaattgctcttgatgtgtgtctgtctccacaggttggggacaccctaggagacagcagcagctctgttctggagttcatgtcgatgaagtcctatcccgacgtttctgtggatatctccatgctcagctctctgggtgagttgtaacaggcactttcccacagcacctggtgaaggtgtgatagaggaagaaaacacacggcctccacctcctctcccttcctgactagacagggatgccaggaaaatcttttgttacggtatttggtctttgtcccaggtttttggaccatagctcctaaaatccttggaatctcctgagtgttgtgtcttttttaagctaatgagaagtggttgcagcccctgggtaacctcaggatggggtctggccgatccccagtggctgtggatttcatcagtgttgcctaccgcctccatgaaatcccaaaaggtggggttccctagggagcctcattgctggacgcctggaggctctgggaagaaggcagccccttcccacgggtcccctctgcatcgctcccacctggggcccatccgtaccctgggtgacaccccgcagaataaatgggtaaatgtcagcctagtgtgtggacagaagagtcaaactctgcagggtatttagagaggtttcttctgagtgaaatacgaagaccgtggctgtgacacagtcccaggaggtcccaagaacatttgccgaggaggactggtctgcagcttgttttgatatgttttagggagacagaggacatcagtcagtacatgtcagttgtaacagtggttcgtgttggaaaggcgggacaacttgaagcgaggaatgtcgggtcgttggtggattcagagatttcctgattggcatttggttgaaagggttaagctctgaagagctgaagtcagaaagaaatgtgcatggttaacataagcagttgtagaagccaaggttcttgtcacatagatgaattcagccttcaggtagcaggcttcaaaaagagtagagtagatggcaaacatcactcatgaggccctcaaaggtaccagattgttagttaaatctctgttgggtcaggaagagacttggaaggggcaggagattctctacagaatgtagatttttcccacaagatacagctttgcagggctatttcaaaatatgtcaaagggatatattttgagataaaatactcagtttctttcagggcctgccatctatcacgtgatgctgtactaaagtcggatcggaatttggtgtcttattaccacggagtctgctttgtcaaccttcagatttctgttttaaagttaatgctggtcagctgtgcctgaattccaaaagaggggataatgaggcaagtccagtcccgcttcacatcatggcctgacctcattttccaggttgactttggagtgcccttggccaagagtgggaatccgttcagtccatggggcttagaattttatttttcatttacagatgtttccctgacttctgtgagtcactctaggaaattcatagagctcaagtctggtcttctgggaaccccatttgatagctggttagtcggaagcacagaccacagcctggggctttcagttggcatcagccggtggggccatcctggagactgtgccctcacctgggaggctgccggtgcagcgcccccgagctgttctgacctccagcagcatttgtggtgcctggatccatgggtcccactgctttgcgtggtgacgttccacctgtctctgctggctctgttcaggcacttatggccgtgatttattataggggaagggtgccaacagcagcagagggacaagagtgacatccaaggaaacccagcgtgaggcccagatccactcccagcagaggcacatgggacacgcttaattcccaggagtgagctgtgacaacacacgtgaaatgcccaccagggaagcccgtcagaggcttggtgctcggggtcacagggcacccccttgccaggcaggtaccaaagtccagaccccggagggaaggtgaactttagcataaaccactctgctcctgttgttggagctgtgaacaatccctagcactgggggggaccccagatgccagccgtggctggccttgccttccaggggaccctggccccaggccgctgtgacagcacttttctgcacagcagctgtttttctcagcacttctaagattttgtccttattactacttctcagcagcttggtgctgatgggctttggtgctgatgtgctgtggtgtgttagtctgtcctcacactgttataaagaaccacctgagactggtcattggtgaaggaaagaggtttaattgactcacagttcctcaggctgtttgggaggcatggctgggaggcatcaggaaacttccaatcatggcggaagatgaaggagaaacatgcatgtcttcacatggcggagcaggagagaacgcaaagggggaagtgctttgaaacaaccagatctcatgagaagtcactcactatcatgagaacagagaacagcaagggggaaatccatccccatgatccaatcaccttccaccaggaccctcccctaacattgggaattacaattcaacatgagatttgggcaggaatacagagccaaactgtatcattctgcccctgactcctctcgaatcttttgtccttttcacatttcaaaacacaatcatgccttcctaacagtcccctaaagtcttaactcattccagcattaactcagaagtccacagtccaaagtcttatctgagacaaggcaagttacttctgcctgtgagcctgtaaaatccaaaacaagttagttaattccaagatacaaatcgggtacagacattgggtaaatagacctatcccaagagggagaaatcagccaaaacaaaggggcagcaggctacaaatctgaaacccagcagggcagtcattacatcttgaggccccgaaagaatcttctttgattccttgtctcacatccaggctacactgatgcaagggatgggctcccacggccttgggcagccccgcccttgtggctctgcagggtacagcctctgtggctgctttccctggctggtgttgagtgcctgcagcttttccagatggcatggtgcaagctgtcggatctaccattctgaggtctggaggacggtggcccttttctcacagctccactaggcagtgccccagtgggtactctgtgtggggtgagggctccaacctcacatttcccctctgcactgccctagcagaggttctccatgaagggcctgcccctgcagcagacttctgcctggacaccctggcttttccatacatcctctgaaatctaggtggaggctgccaaacctcagctcttgccttctgcctacccacatacccaacaccatgtggaagcttccagggcttggggcttgcaccctctgaagcatcgacccttttagccctgtaccttggccccttttagccatggctgggacacagagcaccatggcacatgtcccagtgcttcacagagtagtggggcccttttccctcctagacccccaggcctgtgatggcagtgtctgggcaaaggtctttgaaatgtccctgaggtattaacatttggctcctctttacttacgcaaatgtctgcagccttcttgaattcctccccagaaaatgggtttttcttttctaccacatggcaggggtacaaattttccaaacttttactctctgcttcccttttaaatataagttccagtttcaggtcatttttctgtttgtgcaagtgagcataggcttttagaagcagccaagtcacctcttgaatgctttagtgcttagaaatttcttccaccaggtgccctaaatcatctctctcaagttcaaagttccacagatttctagagcagggtcacagtgctgtcagtctctcctaaagaatagcaagagtgacctttgcccccattcccaatggggtcctcgtctccatctgagaccacctcagcctggatttcactgtccatatcactatcagcatttgaatcatagccatgcaggaagtctctaggtagttccaaactttccctcatcttcctgtctttaagttctcccagctgttctagcctctgctcattacccagttctacagggcatgtctgtagtcactgttactacactttgtctactgattccctgatatcagctttgagtctctcctagtttggggctgtgttttcctgctccttcgtgtgtgttggaatcatttactggataccaggtggagtttgtagttgatgccgttgggtgataggtctgcttacacacctttgaggcctggcggcctttgttctgagtttgagaagtggcttagactctgtgggaccttccccaggcattgtcagggtaagcccagagtcaccccggggagggtgaagctggtcccctggctggtggggctcaggtgaccacagacctgtgtgcaggttcttggcatgtctggtgcacagttcaggagtgggctgggagctcatcctttccacctctcagctggacgtgctgggtccccgatggctgtggcctggaacctgctccacagtgaactgggcgggtaccagggtctgccggcctcttgcaccctccatccagctgtctggcctttgtgtgttgaggacaggagcccacaccaggcccatcctgggttgtggccacatccctccacggtgtctgtgcgtgccatgacgtggtctgtgcggtgctaggtcttgtctgatgctttgcttgagcaaaggacgctgggtgtctgccttcccttcactcactgctaagggtaatgtctgtcctccaggcctgtccacctgtctgctgtgagctcgtccactcagtttccagagcaattattgtcctgagcagagaggcctgtctggatgggcagtgtgctcctgcccttagggtagacgggccggctgagctcagccgacgtggggtcatgtcctgtttacacagggaaggtgaagaaggagctggaccctgacgacagccatttgaacttggatgagacgacgaagctcctgcaggacctgcacgaagcacaggcggagcgcggcggctctcggccgtcgtccaacctcagctccctgtccaacgcctccgagagggaccagcaccacctgggtgagatgcccccacccacgccgcatccccagagaccccagcacagtcagtgtgacgtctagacgaggtagtgggcagcattgtagttgtgggaaggctggaggctgcatgggcagcggtgctgttgtggaggtcggtttccacagatgtccttgggtcgcggcctcggtgcagagccggagcggagctgggatgctggcctggccgcacgctgggttacaggctttctgccagataccgtccccagttctgtccacccctgtgccctctgtggaccctggttccagtgtttctgctggggagagagcatggcttccttggccatgtgtcctggagtggttttggtgggtggggttttgttcccacttgtaaacactggatcactctgtcggcagagtgaatcttggcagttcttcagctgcagaggtttagctgcaaccatctgcaaaaaggccggtattttcgattccattgaccttgtgatcagggtgttaacagtgcatggagcaggctttggagggccgtaggtcaaagtctgaggcccccgatatcccagtatgactttgggaactgccctgaggtctgggctgtgtctgagggactcctggccaaggagcgttctctccttcagaagcagcatccgtgctgtgtgctgggtcagggcgacccctggctccagggtctctacacacagctctccttggcagggagtgagaggtgcccctgtgtcctgggagtccctgagccctggcggtaggtcaggaagcagaccttgggctccaggagccccacgtgtgctgcgggtctgtcctgtgtgttgaagtcctgtgttctgaaaattgcaggaagcccttctcgcctgagtgtcggggagcagccagacgtcacccacgacccctatgagtttcttcagtctccagagcctgcggcctctgccaagacctaactctagaccaccttcagctcttttattttatttttttagttttattttgcacgtgtagagtttttgtcatcagacaaggactttgatcctgtcccctttggcatgcgggaagcagccgcggggaggtaatgaattgtctgtggtatcatgtcagcagagtctccaagccccacgaaccctgaggagtggagtcatacgcgaaggccatatggccatcgtgtcagcagagagagtctctgtacacagccccgtgaaccctgaggagtggagtcatacacgaagggcgtgtggccatcgtgtcagcagagagagtctctgtacacagccccgtgaaccctgaggagtggagtcatacgcgaagggtgtgtggccaggctgcagagctgcgtgccgtttgtgtccgagcatcacgtgtggctccagcccttgtttctgccagtgtagacacctctgtctgccccactgtcctggggtcgctcttgggaggcacaggcatgggtgtgtctggcctcattctgtatcagtccagtgtgttcctgtcatagtttgtgtctcccaggcaggccatggtaggggcctcgcaggggccattggggagcacagggccaggctggggtgaggagagctcccctgttttctgtttaattgatgagcctgggaaaggagtgtgttctgcctgcccgttacagtggagcgttccgtgtccataaaacgttttctaactggg

SEQ ID NO: 10986 - DNA, 2665 bp, Homo sapiens
gtttccggcgcggcccagcgagctcggcaacctcggcgcagcgagcgcgggcggccagccagggccagggggcggtggcggccaaggtccgaccgggtgccagctgttcccagcccccgcctcgggcccgccgccggcgccgccatgggcaagaagcacaagaagcacaaggccgagtggcgctcgtcctacgaggattatgccgacaagcccctggagaagcctctaaagctagtcctgaaggtcggaggaagtgaagtgactgaactctcaggatccggccacgactccagttactatgatgacaggtcagaccatgagcgagagaggcacaaagaaaagaaaaagaagaagaagaagaagtccgagaaggagaagcatctggacgatgaggaaagaaggaagcgaaaggaagagaagaagcggaagcgagagagggagcactgtgacacggagggagaggctgacgactttgatcctgggaagaaggtggaggtggagccgcccccagatcggccagtccgagcgtgccggacacagccagccgaaaatgagagcacacctattcagcaactcctggaacacttcctccgccagcttcagagaaaagatccccatggattttttgcttttcctgtcacggatgcaattgctcctggatattcaatgataataaaacatcccatggattttggcaccatgaaagacaaaattgtagctaatgaatacaagtcagttacggaatttaaggcagatttcaagctgatgtgtgataatgcaatgacatacaataggccagataccgtgtactacaagttggcgaagaagatccttcacgcaggctttaagatgatgagcaaacaggcagctcttttgggcaatgaagatacagctgttgaggaacctgtccctgaagttgtaccagtacaagtagaaactgccaagaaatccaaaaagccgagtagagaagttatcagctgcatgtttgagcctgaagggaatgcctgcagcttgacggacagtaccgcagaggagcacgtgctggcgctggtggagcacgcagctgacgaagctcgggacaggatcaaccggttcctcccaggcggcaagatgggctatctgaagaggaacggggacgggagcctgctctacagcgtggtcaacacggccgagccggacgctgatgaggaggagacccacccggtggacttgagctcgctctccagtaagctactcccaggcttcaccacgctgggcttcaaagacgagagaagaaacaaagtcacctttctctccagtgccactactgcgctttcgatgcagaataattcagtatttggcgacttgaagtcggacgagatggagctgctctactcagcctacggagatgagacaggcgtgcagtgtgcgctgagcctgcaggagtttgtgaaggatgctgggagctacagcaagaaagtggtggacgacctcctggaccagatcacaggcggagaccactctaggacgctcttccagctgaagcagagaagaaatgttcccatgaagcctccagatgaagccaaggttggggacaccctaggagacagcagcagctctgttctggagttcatgtcgatgaagtcctatcccgacgtttctgtggatatctccatgctcagctctctggggaaggtgaagaaggagctggaccctgacgacagccatttgaacttggatgagacgacgaagctcctgcaggacctgcacgaagcacaggcggagcgcggcggctctcggccgtcgtccaacctcagctccctgtccaacgcctccgagagggaccagcaccacctgggaagcccttctcgcctgagtgtcggggagcagccagacgtcacccacgacccctatgagtttcttcagtctccagagcctgcggcctctgccaagacctaactctagaccaccttcagctcttttattttatttttttagttttattttgcacgtgtagagtttttgtcatcagacaaggactttgatcctgtcccctttggcatgcgggaagcagccgcggggaggtaatgaattgtctgtggtatcatgtcagcagagtctccaagccccacgaaccctgaggagtggagtcatacgcgaaggccatatggccatcgtgtcagcagagagagtctctgtacacagccccgtgaaccctgaggagtggagtcatacacgaagggcgtgtggccatcgtgtcagcagagagagtctctgtacacagccccgtgaaccctgaggagtggagtcatacgcgaagggtgtgtggccaggctgcagagctgcgtgccgtttgtgtccgagcatcacgtgtggctccagcccttgtttctgccagtgtagacacctctgtctgccccactgtcctggggtcgctcttgggaggcacaggcatgggtgtgtctggcctcattctgtatcagtccagtgtgttcctgtcatagtttgtgtctcccaggcaggccatggtaggggcctcgcaggggccattggggagcacagggccaggctggggtgaggagagctcccctgttttctgtttaattgatgagcctgggaaaggagtgtgttctgcctgcccgttacagtggagcgttccgtgtccataaaacgttttctaactggg

SEQ ID NO: 10987 - DNA, 13120 bp, Homo sapiens
gctgtctgcagtctcaggcttcctagcagccctgataagagaagtagagcaatgcaggtgacattaatccttgcaggtttcatttcacctctatatccaacattttatctcaacatgtagtctgtagaaaacgttaatttgagctttatgggtttttttcatattaagtcttcaaaatgcacatgggatgggatgtaaagaacgctgaagtgggggcatttcagaggtgtctgctgctttttgcctgtgcctgctgggaagttgcagtgctctgtgtggcttgcgtgttgcgaggttgcggtctgcgtggctcacgtgttgggaggtcgtggtctgcgtggctcacgtgttgggaagttgcagtggtctgtatggcttgcgtgttgggaggttgcagtctgtgtggcccgtgtgttgggaggttgtggtctgcgtggcttgtgtgttgggaggttgtggttcacgtggcttgcatgttgggaagttgctgtggtctgcgtggcttatgtgttgggaggttgtggtttgtgtggcttgtgtgttgggaggttgcagtctgcgtggctcgtgtgttgggaagttgctgtggtctctggcttatgtgttgggaagttgctgtggtttgcgtggctcgtgtgttgggaggttgcagtttgcgtggcttgcgtgttgggaagttgctgtggtctgtgtggcttatgtgttgggaggttgtgggtttgtgtggctcaagtgttgggaggttgtggtctgcgtggctcacgtgtggggcggttgcttggctcgcctgttgggagtttgtggtttgcatggcttgtgtgttggaaagttgctgtggtctgtgtggcttatctgttgggaggttgtggtttttgtggcttgcgtgttggggggttgtggtctgtgtggctcacgtgttgggaggttgtggtctgcgtggctcacgtgttgggcagttgtctgcttggctcacgtgttgggaagttgtggtctgcgtggctcatgtgttgggaagttgtttatgtggcttgtgtgctggaggttgtggcctgcgtggctcacgtgttgggcggttgtctgcttggctcatgtgttgggaagttgtggtctgcgtggcttgtgtgttgggaagttgtttatgtggcttgtgtgctggaggttgtggtctacgtggcttgcactgtagttcttttggacagccttgttctgcagtctgtgtttcagccctggaattgccacattctccaagaagccctggtttcttgactagagagccttgtgtagaagccaggacctgggttctgggtgaagccctctgcagatagagctgggagatgcctgttgtgtgtgtctgcaccacatacatggacactgtgcagagggattctgttggcacctgtgtttacatgggttgaaaactgtttttacacggaaacttccagttccctcgtgccccgtgggttccgcccacttcttccctttcagttttgtatctgcgccgtgaggacttgtctcctaatcttcgtatcaactccgtgtcccattgagctgaccttccgcctctcccccagggccctggccatcctgtgggctctgagactttgcatggatccgcggtggggagctgcccccacacaaacgtccggctcttctcaggccaggtggctgccctgacatggcatgatgtccagcgcatggacgtcacccttgcactggagcccagccaaccgctgcatgacagccctcttcccccttgaaccccaagtctgcacacaccagtgcctcctcttcctggatcctcctgatggcctgtacacagaactggggtgtgggtggtgggtttttaaatgaaaaccagtccacacatgcttgagggctggagccgcctgccgtcagggcagtgccatgctgacctgctgaccgttccattttgtcaaggctcatgagcaattttaaatgtttactcgtgggtgaaggtttttgtttcagctgtaccccctatagcagggccatggggagcctaagaggttctccttggcacctgtgcgcgctctgctgttgccggtgagtctgaaattccagggaatgccgtgaggggccctctggcgtttgttcttggacaaatgtgctttcacccccattaagccctgcttgttggtcttcatttcatttgtgctgcgctgcccctcctgagggacagacgctcaggcagtgcttccttccagatgggctatctgaagaggaacggggacgggagcctgctctacagcgtggtcaacacggccgagccggacgctgatggtgggtgcccgctcagggctggctttatgctctccgtacactgctttttgggcctccgttgatattctgtaatgaaaagctgagccatggccatggggcagcatgagaggctgcccggcttcccgaccttgctcgcaccccaacgtgacacgtgcgctgagtggaggtgtggacggccatctcgcggggcgggggtgctggtcagacctcggtcagggctccttgggagcagcgggactcgagccatgttcctgaaaagctgccgagaggcctttaaggccaaacctcactagcatcaggaagggttcacatcccgagctcagtcttcagcaaagaccagagtgctggcccaccctgctccttgaatctggaaagcagtcttagaagagctgttagatgatgacgtcaggacagtgttgaaggatggtgcacactaggcctgtccagcccgtcaggggcactttgttggcctggaagtaattaagaggcttgtcctttgaacgaaagtgtgatcacttgggtttgaaacgcactcgcgggctcgcgtgaggaacgtgcagcctggcacgggttgcctctagattcctgcttccctcgctctcaccctcatgcctgctggtggtctttcacccagctccaccatgccagcgtggttttctccagtgtgtgaaggatagaaacgggctgatctatataatcttcagcttattttcctaaagaggatggaccgttgatccatatttagcttatgagagtgttgagaccgaggcagcggttgggaactgaggaactcctgctctgatcccatgagtggtgtgtgggtggtgacttgagcatggcagacatgctgtcagatgcacgcgctccaggtacacgccaccgtttcgctgttagaacacgcaggacaagatttcttcttggagttgttgagtgatccatttgaaaatgttctcaaagtattgctggtgtggtggccaaagatgtggtattttttattgtgttgactttggggtgataaagaaatgaaattgaaatgcagttagttttgagaatggtagttggcttttgcaaatttgttttcaggtgatcattataaaatccccccacctgcaccaatcacatccactgtgatgtggagaaagggctcatggcactgcactggggcaccgcgttggggtcacacctgccactcacggcccgccatgtccgtgttgcagaggaggagacccacccggtggacttgagctcgctctccagtaagctactcccaggcttcaccacgctgggcttcaaagacgagagaagaaacaaaggtaaatccatagtcccgtcccaggagccagccggagcagggaaggtggcaggggtttagtggagtgatggcaaatgctgctgattcgtacttcagagtttcctcactgtacctggattcatgttttcacatgggtaagattgagatcagttacagtgacaggaatgaaactcgtgttggatggggacacacacagcgggcaccttggttgcatcactggacttcaccttggtcagtgttttggggtccttgtgtttctgtccctgtcgcattacagaacatcccttcaggggtcagaatgtgtggcccctgggccttgggtctggcctgtgtgttctctccatctgcactgctgcctcctggctgcgctgctgctgggacctcctgcatggccccaccctccacttctccacctctgctgggtccctcccatgcagacagctgcatggacactgctcctgccggccctttctgcctcagccactcacaccatctgctaatgggacagctcactcttccctccaaaccatggccttggctcaagagcttccttgtttctggaatgttctttcctccagctccaggtgttgaaattctgcctggtctgggtctcctgttgaaggacgccctccactgggaaggatcctcttgccttcaccacttgtcttcaccagcccctgctcccctcttcctcttggggctgttgtggttgttgatactttttttttgttgtgtttgacacacatcttcttctcaccctctaacacagttctcaaccacagcacttttgtccctggagatgttggcagtgtccagaggcgtgttgatggtcccactggggttgggggtgctgctggcaccagatggtagggagatgccaggggtgctgctccacaccctatgggacactgcacagtacacctggcctgtgtcccccacagcgagagctggccctgggcaggcgtggtccctgcggtgtgtgttggttgggatcctccacagtgacagacggtgcgctctgcccacgtttccacacagctcttttgcttgtggagctcacccctttgcagagagctcatttccctgcggtctttggcctgcagaagtaaaatgaggggtggtgaattacacccctgctggttacacatggaaaactcaggagtgagaattttgtggagagcaagagaggtgagactggggtgctggctgccagccaggcggtccctcagcccctggagaagcggggtggggcctgcacaccgagtccttccagtgagtccagtgatgctctctcctcttcctcccagtcacctttctctccagtgccactactgcgctttcgatgcagaataattcagtatttggcgacttgaagtcggacgagatggagctgctctactcagcctacggagatgagacaggcgtgcagtgtgcgctgaggcaagtgtcggccccggggagcccttggctgctgtgcagcttgagctgtgccctggtgtgggacgtggagtcccacatgtgtgcgggtggggagagagccatcttgcagccgtccatatggcagcctgggtcttcccgttgctttcagtcatccacacaggtctgccacaggccagtcctgaaatctgggtaactcagtcagaaggtggtgatcagggcgtagcttgtgaaggggttgggggtgtgttgagcacactggatcgtattgaattgtgtttcctaagtgaccgtgctagctcaggctgcagtgacaaagcaccacagactggggtcttattcctgggggctggcatttgccatgaaggtgtgggcagggctggttcctcccgagccctctctcctgggcctgcaggtgccgtctttccgtcttttccctgtgccttcccggggccatcctgcgtgtgtctgtgtcctcggctctcctggagaccctaccgttctcaaggaccctggtcatattggatcagggccaccctaatggcctcatgtcactgcagttacctctaaaggccgttaaagtccccagctccaagtataatcacattccaaggcactggggtcgggatttcaacttacgaactctgagcgggagatacaattcaggccatggcaggctaaagtataatactaaaatcacaaatgtagcagcctgcttttccgtagaatgttgctgtgtgtattttttgttttctgtggcaaaataaaagtgggtcactcttgtaaaatttggcagtttttaatggagaaagcaacttaattttgctagcctttaagaaatggcatcttgacatatcaggtcttcattttattccaacaagaatgcagaatatgttttaaaaataaacaagaatccccttagtgcttcataaaataagtgaaaacctgaccctgatttttgtagcaaaaaatgaagtaaacgtggaaaatgaagaggaaattctagtaggagacgatggggtcataagtcagaaattaaagagttgtttgctccccaccctcccgccagccctcacctcacccctgctgtggggcctctgcccagcctgggccaaggccgtggctcccctggtgccatcctgtccgcagtcggctccctgtccacggcgtgtggctccttcaggacatcagtcacctgttgtccatgtggcacatcagtggactgtgcacaccccccgccttccccagctgtctgtccctagaacgcatcaggttccatgttgccgtgaagaaagatcattctgaccccgcctgccttgtggctgcaggggcaacactcagaagcacatctcctagggcctggcatgaggctacgtggtcccatgccagcctcagcgcacagacacccagatcctctgcccctgagtgctgcttccgtgcacgctgcgagtgccgagcttggcctgtcccgggctgtgggtgttttaacaaagacacggagtctccctgttgcctcctgtgaccgtggttcagcttctgaccagcagccatccttgttcctctctgtgaaggtctttggagtctggggagcccttctgaggcgcttgcttggtgctttgattctaagactatgcatttttgttcctggcctactttttagattgtattatattttattttttaagctgtttcatgtatatggccaagaatcaggatggtactaaaaggagtgccttggaagtgtcggcccacccctgccccacgcgcccattcctcaccggcaggcactgcccactggtgtgcttctgtccacacccacttgtgtttttaaacgcataacgagtggaaagataggagtattcttttacagatgataacatagcacacgtgtgtttctaggctgtgtgcatgtgtattcatgcttttctccctctccccactgagatctttttaacctttttgggtcatggaccactttgaaaatctaatgaaaactatcagccactccccacaaaatacccgctctgggagggtcacggggaccgaggagctgcgctggcacggcaggcttctgtgatcagggctgccgcgagggccaggcgacaagggctcctttcagcgtaccttctcccgcggcccctctagcctgcaggagtttgtgaaggatgctgggagctacagcaagaaagtggtggacgacctcctggaccagatcacaggcggagaccactctaggacgctcttccagctgaagcaggtgggctgcactcgcaccggggttggggggcaggtgcccttggggtgctgctggcgggaagagcctgcagcctgaccaggctttcggggacgaggagctgtcgcagggactctgctgccggctcctcgtcaggatctgcgtgcttctctgcacgggcaggtgtcccccggagaccgtgactgtgtgctcaccactcccagcgcactcgtaactctctatttccatcttcatctttcatctctgtcactttccttcatcctgaagagtttaaaaaaatatttcctgtagttcagatttactgacagtgatctctcagcattggcttctctgaaagtctttatttcatcttcatttttgaaattcattttccctgtgtatggaattttagatgaccttttttcccatctactgtaaaataggtttgacttgcattgttgctataaaaaagcatctgggccaagcatggtggctcacacttgtaatcccagcactttgggaggccgaggcgggcagatccaaggtcaggaggtcgagaccatcctggctaacacggtgaaaccccgtctctactaaaaaatagaaaaaattagctgggcgtggtggcaggtgcttgtagtcccagctactcgggaggctgaggcaggagaatggcatgaacccgggaggcagagcttgcagtgagccgagatcatgccactgcactccagcttgggccacagagccagaccccatctccaaaaaaaaaaaaaaagcgtctgaagtcattgtcatctttgtttcccacatgtgacgtgtcttttcggccagatctgacctgaagtctgcttttgtacagaccacaagccaggaatgtcttttacatctttaaaagggtgtttacagaaaagaaaaggaagaagaagatgcttcgggcagcgtgtggctcacagagcctcggctgctcactcccgggccctcggcaggacgggatctggccggtgctctaggagcttttgaacttttatctttctttatcagtgattttcagcattgtattttccaggtgccttggtgggcttttctttgtgttctacttagcatttgttgtttcttggatctgtctgtagttttcatcatatttggaagatttttagccattactcaaatgtcattttccaccactgcctcttcctcctcctgctggactgtggcactctgaggacagctcgtgttatctcacatggcaccgacactgtgctgccgcaccaggctgctgcagattagtttctgatgctgttggctaagttcactcacctgttctctggccacacctgaacctgttatcccagatcagttttcactgatgatgtcgtcccgcgctgctcatcacttgggctccatttgctgcttttgtgtatcttctctcatgttgtgtgtatgtttttccttacatccttgagccacgttcgtatttattgctgctgcttttgaagtcctcagtcactgagtctgtcgcctctgccgtttccggttctgtttctgtttgacactttgctgcacttggagctgtgggccattgtgcacgtgcctggtggacagtcctgaccctcgctgtctgataaaaaagcactggccacatggccgctgggaaatttgaatgtggccagtctgaatttagatgtgatgtgtgagctacaaactagatcttaaaaaactaatgcaaaaaacgtaaaaatatgagtaacgatttcttatggcccacatgttggaataaaaacatcttcaataaatttgtctaagtaaaatgcattagttaattgaatgttaagagtaattttaatgtggcagctagaattttaagagctgggtatggtggcatgcacctgtcatcagctccacaggaggctaaggtgggaggatcacttgaggccgggaggtcgaggctgcagtgcgattgcaccaccgcactctaggcaatagagcaagaccctgtctcaaaaaaaagataaaaaaacatttagaacgaggcgtgtgctcgcgttatgtctgctgggcaaggctgatctgggttctttctctctttcagagaatactgatgatcattttggcagttgttacttgtggataatggccggatcctaccaggcttgtctggggtgggtccagggcagccttattctagggttcgtgtagccttaatgctaaggagtggcccttcggggagccctgtcttttcagcgtggtctctgctgtgggtggagttcggatgagtctctgtccttcccaggctctgagaacgtttggctcatggctcccaaggaggggtcagtcccttgacctgacggtttcatctgtgcttgttacagatgaactggggtccacatgcctggtgcagtaaacccagacacccatgccgaggttttgtcatagaaaggacgtgtgtatttgcagggcgccaagcaaggtgggccaggaggctcatgtataaatcctggcctcccccactggctacaggcaaggcttgtaaagcgggggtagatctcaggaaagcagaactgaaaggcagagtcgtgcataaggacacagaggttacatgtcggcttggcctagaagggcggtatctgcaagcagggccttataggttataggtggattcaaaggttttctgatttgcagctggttaaggaggagaagctttgtttaaaaatttggggtgaagagaaaagaatgttagcttaggcttgtgggtgtggcttcctccaggcccgtcaggaagaaattcagaacaaagaacggggtcagagctcagtcttcagtttctccttatctgagcccttcatgccagtagattagtttgttggggaggtcctaggtggagggtccaggtttctgaaagacaactcagggatatacattaagatgttatctttactttctttctttttttttctttttgagacatagagtctcactctgtcacccaggctggagtgcagtggcgtgattgtggctcactgcaacctctgcctccctgattctagcgattctcctgcctcagcctcccgagtagctgggattacaggcatgcgccaccacacctggctaatttttgtatttttagtagaggcggagtttcgccatgttggccaggctggtctttaactcctgacctcaaatgatgcatccatctcagcctcccagagtggtaggatgttgtcttttctttctacagggaacagtgctgggaggttgtctttactttctacagggaacaaacatctgtctccaccttccttgactgttgttttaggatactgttaccttcttgcttatcaagtcgctgatttacttctcagagttatctaagtaactggaatttcccttgaaggaactcaagattttccttgatttccatgcttggagggctcgcaggcccctgaagagagggttgcagccaggcgggagtccccaagcagatttctgcagctctgaggagcagccccctctgcagagcctgccccaccagctcgtggttctgactctgagctctggtcaccctcccgtgtcgtggcctgcaggctccttccaggcaggaagctggcccccccaacacagcgttagaatcaggcattgctgtggggtagggaaagtgaccccctcacagcccggaaatgggaaggctctgtggtttcctctctgggttccagttagattcctttcgggaaagtgaacttggatatggagttgagtgaccccgagtgcacccccgcagtaaatgatgctcaggactaaagtgactgaaggcttttggggaaacagatgcgaacaaaacagcagtattcattttctaattaaaagcttgtgaaaatcgatgtcattgaatctgagaaacattatttcgaacaaagatcacacatgatagagtgcatatactacagcatcgctccaccggagcacaggacgggtgtgccacggaggccgacagttgtggaaggagacaatgcacggcccggcccacctgctgcaggcaccgccaggaggtgtctgcctccttcgctcctgcgcccacggcaggcccacctgccacaggcactgccaggaggtgtctgcctcctttgctcctgcacacacctgcccctgcaggactcgagctggtctcaggcaactggtcatattccaggtggaacccacgagacccttcttatcctaagcttcccataggatctaggcacatcttttttcttttgttttaagccacccaaggctgccgaaacagcatcggcgtcctctctctgtccgctccatctcgccctgtggagcgctgtccccggcacacaatcctggcgctgaggagggggctgggcgtggttgggtcagtgactggtgatgaagaaggtttggaggacccccagccttaatccattaagatggtgtgactggggagcagaattcgcagaagcgcacaagccatttttacgtgtgtgtaatgtcagcgaattgtccgtttctatgaaatcactctggaaaaactagtttctgtcctcatttacttttcagagaagaaatgttcccatgaagcctccagatgaagccaaggtaagtttttgaacatggaagggcaagccaaatattattctcacagggaaagttgtatccagcctttgaggtggggaggtctgtgtgtatgacggcgtttagaaatggagtccgtttctgatcagtaagatcaatagtgtttctcctcctcttttcatgacttgaggtgagtggtgtgaagccgcagtacattcttccaaatccagaaatgggtagtttcagagcagttggccccgctgggtgctgtccttgtgggacacccttgcaagggttgggcaggatgggccttctcaggacctgcttggtgagtagcaggtgttgtcccaagcacagtgggctctggggccagtgctggcagggcagtgctgtgagcccagactgctgcacctgccgattggcaggtgtgtgtctctgacagtcagcaggcatgggcttgggctttggtccagggtccctgggaacctggagagaccccttaacatctgtttgagggcagaggccgagctgcagggagctgatgagagagtatgtgttagggtggctgtagtctagccctgaggacacgccttgctgggaaaggaaagggaacgttgtgtgctctgtgaagtgcctgagaaatagtcctggaccctaaaattctgtgtgtcttcctgttgcataatgtccctccccaatttctttagccccaaaaagttaacaaaggattgttagtttgcgttgttggtctcagtaggtttttctttgacatggatttgcatatccattcatgagctccaacctgacagtcccttgaacagcagcctcagtgaacagggcttggtcttgtcacttactgaggggtgggttcacgtttagcaaataattagagtgatttcaatagcgagtgtgaagtaacatttcgtttttcgtttgatgtttgaattgctcttgatgtgtgtctgtctccacaggttggggacaccctaggagacagcagcagctctgttctggagttcatgtcgatgaagtcctatcccgacgtttctgtggatatctccatgctcagctctctgggtgagttgtaacaggcactttcccacagcacctggtgaaggtgtgatagaggaagaaaacacacggcctccacctcctctcccttcctgactagacagggatgccaggaaaatcttttgttacggtatttggtctttgtcccaggtttttggaccatagctcctaaaatccttggaatctcctga

SEQ ID NO: 10988 - DNA, 744 bp, Homo sapiens
gctgtctgcagtctcaggcttcctagcagccctgataagagaagtagagcaatgcaggtgacattaatccttgcagaggaggagacccacccggtggacttgagctcgctctccagtaagctactcccaggcttcaccacgctgggcttcaaagacgagagaagaaacaaagtcacctttctctccagtgccactactgcgctttcgatgcagaataattcagtatttggcgacttgaagtcggacgagatggagctgctctactcagcctacggagatgagacaggcgtgcagtgtgcgctgagcctgcaggagtttgtgaaggatgctgggagctacagcaagaaagtggtggacgacctcctggaccagatcacaggcggagaccactctaggacgctcttccagctgaagcagagaagaaatgttcccatgaagcctccagatgaagccaaggttggggacaccctaggagacagcagcagctctgttctggagttcatgtcgatgaagtcctatcccgacgtttctgtggatatctccatgctcagctctctgggtgagttgtaacaggcactttcccacagcacctggtgaaggtgtgatagaggaagaaaacacacggcctccacctcctctcccttcctgactagacagggatgccaggaaaatcttttgttacggtatttggtctttgtcccaggtttttggaccatagctcctaaaatccttggaatctcctga

SEQ ID NO: 10989 - DNA, 28424 bp, Homo sapiens
tccgggcacgcggacgggggtcctgggcaccgggcgaggtcctggccacgagggaggggttctgggcacgcgggagggggtcctgggatttcgggcagggaaccgggcacacgtgaggggtcctgggtaggcgcttacgttcctggtagagggttctgggttcgaggctgcaagcccactcaccccggtcctggagactagggaagcatctgtgctggcttttgtgtggagctcagggagaagctgggctgccctttctcccgcctttccctccctctcccttgctcccgcagcagctccatgggtgtcagcgggcagcacgggcgcctgcaggaagtcaggcgagggtgaaccgaagtgctgggggtttctaggagggagatcgggctccggggttccaggtccctcttaatccatcttcttgaacgagtaatgtgaacaacatcccacagggcctctggtgaggacaccgtggctcgaaagggacctgaagctccctgcggaggggaagggagaacaaggaggcagtgacatgccgccactgtggtcttcccttccgtctttccctgctggttggcagccccgctgtactccttagggaggcctttccctcttagcaccttcacgtctcacctggctgcgtggcgtttgcacctgagcacgcgggtagaactcggtctgtgtctgtgcagattatgccgacaagcccctggagaagcctctaaagctagtcctgaaggtcggaggaagtgaagtgactgaactctcaggatccggccacgactccagttactatgatgacaggtcagaccatgagcgagagaggcacaaagaaaagaaaaagaagaagaagaagaagtccgagaaggagaagcatctggacgatgaggaaagaaggaagcgaaaggtaaaggagcagcggcggtggcccggacgctgcccacgaggagcccgtggggagcctggtcccaggacccaggcagagtgcgcctgcgtggctggaggaggggagggggtgttccgttggtagcaaaacgcgaaccgctgaggcccgcagactcagttccaggatcctgggtgtgctgttcctcagcagaccctgccagggtctctgtgaggagggagcctggcatgaggaggatctcggagggggtttcccttagttctgtccctcccctgagaactgcgaggggattgggcagacctgtccggatcccgcctactcctgcctttctcactcccttgactctgccgcccaggaagagaagaagcggaagcgagagagggagcactgtgacacggagggagaggctgacgactttgatcctgggaagaaggtggaggtggagccgcccccagatcggccagtccgagcgtgccggacacagccaggcaagggtgcacttttagagactctcctggtgttcacagctcatcgttgtaaatgaggggtcggcaccgtgtcctgttgctttggggagaagcatgggagggaggagagctggtatttccagggcctcatcccaggtgtcctctggcctgaggtttcctccggtgtctctgaatgtctagagcaaggcgtggccagttaccactggtgcccttcagttttgttttttaacttgttagctaaggatggcttatatgttttttaagcgttcataaaaagaaacaaaaaggcatctccacagagaccaatcgtatgtgacccgcaaagcctagactgttttttgtctggcctttatgtaaaaagtttgccagccctgggtcttgaagtttggttttgtttgcacttaagacagtattggaacagtagccccatctgggtcagactggtaagagagatgcatgtcagtgaaaacgcaggtaattccccttgggaagaagggacctcgaggcccaaatggtgggtctgaagttgctgaaagtgaccataggctgagacaaaggaagctggaggcctttagtagaatctctgtcgtgggcaccatctgcgaaggatggcatttggctggaatttccagttgacaaggacttgccctctgagttctctttgtccccagccttcctgtgcacaactcacagtgatgaggcatttgtacctaagacaaggggtgtctcttcccagcaactctcagcatccagtggttcctggattatagggaaacagacggctgggctttgggacatgggacatcagggagtggggaggctagtgctgcgatcattcaggccgtcagaaactgtctgaggcctgctggctccactgaaggaaagttctggaaagctggtggccttctgagctcctgtggtcatttggctcttcaggcactttctttttttaatttatttttgaaacatggtcttgctgtgtcgcctaggctggagtgcagtgtcgtgattcactcctgggctcagataaccctgggctcaagcgatcctcccacctcagcctcccaagttgctgggactacaggcacgcaccaccacgccggccatttatttactttttgttgaattttaagggacctcaagtgaaataataatcggtgaattcaggatcaacctttatgtccagagcgtttgttccgtcgtccatttcttgtctagagtagtggtatgagctgaaaacattgctaagtgatcaccacatattgttgatgtaagggctaccggttattacaagagatttttatgactcctgctgtgggggtgccctttctacccggctgagcttggtgggagccaaggctgagtcggatgtatctttatatccccagttctcggtggaacttaaaatgctgtgagacaccagacagacagatactgtgaacttggagctctctaatgaagggataccaaagtcttgtattcaatttttttttccttaaattgtcagccgaaaatgagagcacacctattcagcaactcctggaacacttcctccgccagcttcagaggtaaaccggggcgtttctgaagagctagtgtctgggggggtgtggtgtcatcttttctgaggccttattccccacgccagcctcgtcagctgtgaaacagaccctgcaccttctcttggtgactcccagtccacttcggggtgcgtaggaagagttcatgaactcattagtggctcactctgaagtcagagtagagtgagggaagtcaaggctagagctgggacattgatggccgccaggatgcgttgggggaatttttattatatctgaaatacctatcacaataaattaaaagacgctcgtaacttttttatttttaagaaacaaaattcggtcagttgtatccaatttttggattgtaagagattttgtatcatttagaaatctagatttttccgctttaagatgtctttgctttcagaaaagatccccatggattttttgcttttcctgtcacggatgcaattgctcctggatattcaatgataataaaacatcccatggattttggcaccatgaaagacaaaattgtagctaatgaatacaagtcagttacggaatttaaggtaagttactttcattgcccgaagtaatcgtggcatagttctgtgtattcatgtcttgtgaagacttcattcaccttagatcatttctagtttttgagctttcacaggtgtttctgtgttcggatgatgttttacagacacagcattaaggaaatgattggtcgtgaacgttttctctgtgctttggtctagaaactaggtcaggttgcacgctgttagaagtctgtttcttttctttctaagttactgcgctggcgtaaataggacatgttgtttcaagcagtgaggtgtccggtgtggcacggcttgagactagacatttttaaaaacatacttctttttaattcttagttttgtcttacactaattgagcatttagtttttttagcatagtaagtttttctgtctcctgagtactttgctcttagctctgtttcttgctactggctgtgagaattagcaactgctcattggttttgcaacccaggggaagaaagcaaaacaaatgcttgataaagttggcattagtgtagtttagaaaggcattagatttctctcttaggttccattcccctggggaaagcttgacttttctattttatgcttactgaagggtttgctgactcacagaaacacaacagaacagacttaaaggagagtgggagaaaaggaaactcgatgagaggatcaggcagcgcctgagggtagatgttaagagcactccatgcccgaaagccctctgtattccctgcttcgggccccagtctggccattcctagcaacaaagtgagaaggggagcagcattcactccgtggagtgtccgcagtggagtcttcaggggaggggctccacagcctcgggccgggccctagggctgctggctctggaaccgggacttggggagggtccagatggcacgttctcagttagggtggccggcctccggggtcatgctccagcctgacgttggtactcacctttgagaggcctgtgctgaggaaactggcctctcataataaaatactgatgcttccgtattttcaccataaattacaaaataaggttgtccttttgtggggcaaagtctttttctagtagtttgagggaaccatttggtgacagaattttaaattcgattctgtggagaaattctagagatagaggctatcactgtgccgcacgcctgccttcatcccttgacttgcacttgaaagaatcgggtcgttgcttctcgttcctgtttatgttctggagaaatgcaagaagcgcaggaaacgctttttcctcacacagcatttgtatgtgatgcttagaaagaagttacaggcttggccaactgtttgctgtaatatttttcatgcaagaccaatgtgcaactaagaaaacttctcttaagttcttaaacgttatgtttagatcagagagcccagttgaattgttttctactcgattgtagctttttccttttggtctcttggtagtcatctagagctttgctgttgtctgtggcatttcaaacctgataagtctttcctgttttcttttcaggcagatttcaagctgatgtgtgataatgcaatgacatacaataggccagataccgtgtactacaagttggcgaagaagatccttcacgcaggctttaagatgatgagcaaagtaagaaactcactggcagcagcgagctacggaaagcaggggctctgccccccgtcgcttgtgcccgaagggagcctcacagtgaacacgtgctccatccacccgccaccctcatggtgttgccccctttgctctagggtagacgtccccggccgccctctctgctcatgacctagctgtaacatctcattgagggttggtggaaagttccgcatctcttgatcttaagcctgggtgtcaggtgtcagtcttgctggatggcagccagcattgcgggcttgttttgcgtgactgcctcactgaatccagacgggacatccttgtcttccttggccatcctgagtggcttcccagatctgtgccgtgagccaggctgcatgcatcccacgtaggagaaggtaaaggggaggtgcggcacctgccgcgctctggcggtgggtcaagcccccacaaccacctcccgctgctccgccgtggaaagttagctcttaggccaggtgaggctgtgaccatccccatcccatcccatcgtcacggcaccctggctgtgagggagaggtaaatccctgctgctctgtcctttctgattctaggagcggctgttagctttgaagcgcagcatgtcgtttatgcaggacatggatttttctcagcaggcagctcttttgggcaatgaagatacagctgttgaggaacctgtccctgaagttgtaccagtacaagtagaaactgccaagaaatccaaaaagccgagtagagaagttatcaggtaaaggttctgtggaaaccacatttgcttttggagttgagcaccatagccaggaaagcaggtgccttgtaggggagagtgagtgagtgagagaacggatgtcatgtcacatagacattcttggtgtagcttattctggcaggaggagtgtggccagacagcccctcctgcccaccggccacgtgcactctctgacccaggtgtggtacccaagcccgtccgatcacccctgcccccaactgctagtgactggtggtctctgtctctacacgccgttaagatcattggcccctccctcccctgcacagcgcctgccggcagccaaggctgtgcccttgtcccagactgtgccgcacaagcgggctgactttgggcagccagcattggcagggggcttctttgttgctgtggggcagatgcacactcctgaactgctcgcttctgtgtctgtgtagacgctggagtggagcaggtgcaggcctgtggtcaggaaggtgtggatgctgcgggggaagcaggtgaggactgcaggccacagctccctgtagctctgctccctcccacagggagcagccgacttggctggtccttcagggaaccttcttcctttttttctaaaccccagagtggttttcatgggggctctttgtctcatggtggctgagcattgagattgtatcaaagtccgtatcacacgtcattcctgtagacgctcctccacctatgtgaggtggctgcctgataggaccaaacaaagcgagagtatcgccaggggccttagaggcaccaagagcacttaacatagcctgcagcgggcagaagcgcctggcacagagcctgcttcatcacgtgtcacttgctgagtgcaggccccagagagcgcagtctcaggacatccaccctcatggccgtgtgtctgacagcactgtggctcgcggtcttcccagtatcctgagaggactggcctgttgccatcctggggacagatcagatttgaaggatggtttctgctgaagtgtattgcttttgtgccatcttgtgggaagtcagggaccgtctggagttggtactgaacgtccttgaggcaattgtgatggtcacggccctccattgtttgtttccttctcacatgtgtatgggactcacgtggatttaacaggtggggcggcagcggtgctgggctcggtgcttctgctctgagcagctccctccaaccgtcaaaagggagagtggtcttgagaccagcccctcaggtcctgcagccttggcttaggagacagggtgcgctgcgtggccagagtgtgttgcttggcaacggacgacagtcccctaaggcggtctccccacgtgcgttgcatttcccaccccgctgccgtgtgaacactcactgcgtggttggctggtggctgtgtccggcctcagcccccgactcgagtgtgctgctggccttcaggggtcggggtttcatggccgccctttgccgcctcatggtgactgagcatcgagggggaattgaagttggtgctggtcagcatgctcagctgcggtggggttgtgtcctggcagacccaccccaggttggttttgggtgtctctggtgctgcagcttcacccttgcctgtgggatccaggccctttagatggatccccagctgtcagtctgcaggcaggagagcgtgccgagctcaggcagtcaccttcacctagtgtcacagcagtgcgcatcggtaatgggctcacgcaggtgcctgagtggagcccctccctgcggagctcatggggctgtgactcctgtgtagggttgccaggttgtcactgtaggtcaggcaagggcagggccgctctcatgggcagggcttgtcctgggcctgcacctggccctaggccactcagacccatgcccaggcaagtgcccagggtgggaaggagcccactcgcttgcttctagaaccttccacactccttgggtgctacagcctgtgcccctcagctgttggagaactgcttcaggtggaacctgggaccacttgctgacgtccttgtgtgttctttgtgccacccagtggccacagcagagggggctgctgtccacccagcccagcagcaccagaccacacccgagcagccccgcctatcctgccttgctgtgaaccctgcgtagtcaggggtggcttttccagtcacttttctgatggggcctttaataactaaccagtgtgggcatctgttactttgttgcttttgttgctaaagcactttaactgagtttgcactgcgttgaaaaataggaagtctgtctacttggcttacacttaccctttattttaataaaagtgtcttaatttgtcatttggttagggtgaaaagggatgctttgagacctaaaaggagttaagtatgctctgccagctctgtgtctgagggcagggtcggtagaagctgggttaggtgccgacgcatggggagcaggtgtgcggtggggacgctgcctccaggtgacttggttgtccccacctcacagctgcatgtttgagcctgaagggaatgcctgcagcttgacggacagtaccgcagaggagcacgtgctggcgctggtggagcacgcagctgacgaagctcgggacaggatcaaccggttcctcccaggcggcaaggtagtgctctgtggccaccgagagagggtgccacgtggccccagactctctgtgtgcctctccttctgggttggtgctgtgtgatctagcacagccaccgggatccagaggtcagcgtggggccctgacgggaggtccggatcagacacacataaggctggtctcttcagtcggggtccaggtgcctctggcagggctgccgctggtgtttcatgcatcgtggaggccacgtggtcactgacctcatttccttgatggaggccctgctgcaggctaatcctttctcttggagtgaatgctgacttctgtgtctctgtcactgggtgttgacgtgaggcaccgcccttgttattccagtgggggtgctggtgttggatccgacagatggtccataataggccaccgactgtgttcacgtggctcctgccacagatggtctttgtggtggtggggcccactcagctgaccacgctctcctttctggcaggagacgttctagacccagtgtcttcagtggaaacagagcacaggctgtctgcagtctcaggcttcctagcagccctgataagagaagtagagcaatgcaggtgacattaatccttgcaggtttcatttcacctctatatccaacattttatctcaacatgtagtctgtagaaaacgttaatttgagctttatgggtttttttcatattaagtcttcaaaatgcacatgggatgggatgtaaagaacgctgaagtgggggcatttcagaggtgtctgctgctttttgcctgtgcctgctgggaagttgcagtgctctgtgtggcttgcgtgttgcgaggttgcggtctgcgtggctcacgtgttgggaggtcgtggtctgcgtggctcacgtgttgggaagttgcagtggtctgtatggcttgcgtgttgggaggttgcagtctgtgtggcccgtgtgttgggaggttgtggtctgcgtggcttgtgtgttgggaggttgtggttcacgtggcttgcatgttgggaagttgctgtggtctgcgtggcttatgtgttgggaggttgtggtttgtgtggcttgtgtgttgggaggttgcagtctgcgtggctcgtgtgttgggaagttgctgtggtctctggcttatgtgttgggaagttgctgtggtttgcgtggctcgtgtgttgggaggttgcagtttgcgtggcttgcgtgttgggaagttgctgtggtctgtgtggcttatgtgttgggaggttgtgggtttgtgtggctcaagtgttgggaggttgtggtctgcgtggctcacgtgtggggcggttgcttggctcgcctgttgggagtttgtggtttgcatggcttgtgtgttggaaagttgctgtggtctgtgtggcttatctgttgggaggttgtggtttttgtggcttgcgtgttggggggttgtggtctgtgtggctcacgtgttgggaggttgtggtctgcgtggctcacgtgttgggcagttgtctgcttggctcacgtgttgggaagttgtggtctgcgtggctcatgtgttgggaagttgtttatgtggcttgtgtgctggaggttgtggcctgcgtggctcacgtgttgggcggttgtctgcttggctcatgtgttgggaagttgtggtctgcgtggcttgtgtgttgggaagttgtttatgtggcttgtgtgctggaggttgtggtctacgtggcttgcactgtagttcttttggacagccttgttctgcagtctgtgtttcagccctggaattgccacattctccaagaagccctggtttcttgactagagagccttgtgtagaagccaggacctgggttctgggtgaagccctctgcagatagagctgggagatgcctgttgtgtgtgtctgcaccacatacatggacactgtgcagagggattctgttggcacctgtgtttacatgggttgaaaactgtttttacacggaaacttccagttccctcgtgccccgtgggttccgcccacttcttccctttcagttttgtatctgcgccgtgaggacttgtctcctaatcttcgtatcaactccgtgtcccattgagctgaccttccgcctctcccccagggccctggccatcctgtgggctctgagactttgcatggatccgcggtggggagctgcccccacacaaacgtccggctcttctcaggccaggtggctgccctgacatggcatgatgtccagcgcatggacgtcacccttgcactggagcccagccaaccgctgcatgacagccctcttcccccttgaaccccaagtctgcacacaccagtgcctcctcttcctggatcctcctgatggcctgtacacagaactggggtgtgggtggtgggtttttaaatgaaaaccagtccacacatgcttgagggctggagccgcctgccgtcagggcagtgccatgctgacctgctgaccgttccattttgtcaaggctcatgagcaattttaaatgtttactcgtgggtgaaggtttttgtttcagctgtaccccctatagcagggccatggggagcctaagaggttctccttggcacctgtgcgcgctctgctgttgccggtgagtctgaaattccagggaatgccgtgaggggccctctggcgtttgttcttggacaaatgtgctttcacccccattaagccctgcttgttggtcttcatttcatttgtgctgcgctgcccctcctgagggacagacgctcaggcagtgcttccttccagatgggctatctgaagaggaacggggacgggagcctgctctacagcgtggtcaacacggccgagccggacgctgatggtgggtgcccgctcagggctggctttatgctctccgtacactgctttttgggcctccgttgatattctgtaatgaaaagctgagccatggccatggggcagcatgagaggctgcccggcttcccgaccttgctcgcaccccaacgtgacacgtgcgctgagtggaggtgtggacggccatctcgcggggcgggggtgctggtcagacctcggtcagggctccttgggagcagcgggactcgagccatgttcctgaaaagctgccgagaggcctttaaggccaaacctcactagcatcaggaagggttcacatcccgagctcagtcttcagcaaagaccagagtgctggcccaccctgctccttgaatctggaaagcagtcttagaagagctgttagatgatgacgtcaggacagtgttgaaggatggtgcacactaggcctgtccagcccgtcaggggcactttgttggcctggaagtaattaagaggcttgtcctttgaacgaaagtgtgatcacttgggtttgaaacgcactcgcgggctcgcgtgaggaacgtgcagcctggcacgggttgcctctagattcctgcttccctcgctctcaccctcatgcctgctggtggtctttcacccagctccaccatgccagcgtggttttctccagtgtgtgaaggatagaaacgggctgatctatataatcttcagcttattttcctaaagaggatggaccgttgatccatatttagcttatgagagtgttgagaccgaggcagcggttgggaactgaggaactcctgctctgatcccatgagtggtgtgtgggtggtgacttgagcatggcagacatgctgtcagatgcacgcgctccaggtacacgccaccgtttcgctgttagaacacgcaggacaagatttcttcttggagttgttgagtgatccatttgaaaatgttctcaaagtattgctggtgtggtggccaaagatgtggtattttttattgtgttgactttggggtgataaagaaatgaaattgaaatgcagttagttttgagaatggtagttggcttttgcaaatttgttttcaggtgatcattataaaatccccccacctgcaccaatcacatccactgtgatgtggagaaagggctcatggcactgcactggggcaccgcgttggggtcacacctgccactcacggcccgccatgtccgtgttgcagaggaggagacccacccggtggacttgagctcgctctccagtaagctactcccaggcttcaccacgctgggcttcaaagacgagagaagaaacaaaggtaaatccatagtcccgtcccaggagccagccggagcagggaaggtggcaggggtttagtggagtgatggcaaatgctgctgattcgtacttcagagtttcctcactgtacctggattcatgttttcacatgggtaagattgagatcagttacagtgacaggaatgaaactcgtgttggatggggacacacacagcgggcaccttggttgcatcactggacttcaccttggtcagtgttttggggtccttgtgtttctgtccctgtcgcattacagaacatcccttcaggggtcagaatgtgtggcccctgggccttgggtctggcctgtgtgttctctccatctgcactgctgcctcctggctgcgctgctgctgggacctcctgcatggccccaccctccacttctccacctctgctgggtccctcccatgcagacagctgcatggacactgctcctgccggccctttctgcctcagccactcacaccatctgctaatgggacagctcactcttccctccaaaccatggccttggctcaagagcttccttgtttctggaatgttctttcctccagctccaggtgttgaaattctgcctggtctgggtctcctgttgaaggacgccctccactgggaaggatcctcttgccttcaccacttgtcttcaccagcccctgctcccctcttcctcttggggctgttgtggttgttgatactttttttttgttgtgtttgacacacatcttcttctcaccctctaacacagttctcaaccacagcacttttgtccctggagatgttggcagtgtccagaggcgtgttgatggtcccactggggttgggggtgctgctggcaccagatggtagggagatgccaggggtgctgctccacaccctatgggacactgcacagtacacctggcctgtgtcccccacagcgagagctggccctgggcaggcgtggtccctgcggtgtgtgttggttgggatcctccacagtgacagacggtgcgctctgcccacgtttccacacagctcttttgcttgtggagctcacccctttgcagagagctcatttccctgcggtctttggcctgcagaagtaaaatgaggggtggtgaattacacccctgctggttacacatggaaaactcaggagtgagaattttgtggagagcaagagaggtgagactggggtgctggctgccagccaggcggtccctcagcccctggagaagcggggtggggcctgcacaccgagtccttccagtgagtccagtgatgctctctcctcttcctcccagtcacctttctctccagtgccactactgcgctttcgatgcagaataattcagtatttggcgacttgaagtcggacgagatggagctgctctactcagcctacggagatgagacaggcgtgcagtgtgcgctgaggcaagtgtcggccccggggagcccttggctgctgtgcagcttgagctgtgccctggtgtgggacgtggagtcccacatgtgtgcgggtggggagagagccatcttgcagccgtccatatggcagcctgggtcttcccgttgctttcagtcatccacacaggtctgccacaggccagtcctgaaatctgggtaactcagtcagaaggtggtgatcagggcgtagcttgtgaaggggttgggggtgtgttgagcacactggatcgtattgaattgtgtttcctaagtgaccgtgctagctcaggctgcagtgacaaagcaccacagactggggtcttattcctgggggctggcatttgccatgaaggtgtgggcagggctggttcctcccgagccctctctcctgggcctgcaggtgccgtctttccgtcttttccctgtgccttcccggggccatcctgcgtgtgtctgtgtcctcggctctcctggagaccctaccgttctcaaggaccctggtcatattggatcagggccaccctaatggcctcatgtcactgcagttacctctaaaggccgttaaagtccccagctccaagtataatcacattccaaggcactggggtcgggatttcaacttacgaactctgagcgggagatacaattcaggccatggcaggctaaagtataatactaaaatcacaaatgtagcagcctgcttttccgtagaatgttgctgtgtgtattttttgttttctgtggcaaaataaaagtgggtcactcttgtaaaatttggcagtttttaatggagaaagcaacttaattttgctagcctttaagaaatggcatcttgacatatcaggtcttcattttattccaacaagaatgcagaatatgttttaaaaataaacaagaatccccttagtgcttcataaaataagtgaaaacctgaccctgatttttgtagcaaaaaatgaagtaaacgtggaaaatgaagaggaaattctagtaggagacgatggggtcataagtcagaaattaaagagttgtttgctccccaccctcccgccagccctcacctcacccctgctgtggggcctctgcccagcctgggccaaggccgtggctcccctggtgccatcctgtccgcagtcggctccctgtccacggcgtgtggctccttcaggacatcagtcacctgttgtccatgtggcacatcagtggactgtgcacaccccccgccttccccagctgtctgtccctagaacgcatcaggttccatgttgccgtgaagaaagatcattctgaccccgcctgccttgtggctgcaggggcaacactcagaagcacatctcctagggcctggcatgaggctacgtggtcccatgccagcctcagcgcacagacacccagatcctctgcccctgagtgctgcttccgtgcacgctgcgagtgccgagcttggcctgtcccgggctgtgggtgttttaacaaagacacggagtctccctgttgcctcctgtgaccgtggttcagcttctgaccagcagccatccttgttcctctctgtgaaggtctttggagtctggggagcccttctgaggcgcttgcttggtgctttgattctaagactatgcatttttgttcctggcctactttttagattgtattatattttattttttaagctgtttcatgtatatggccaagaatcaggatggtactaaaaggagtgccttggaagtgtcggcccacccctgccccacgcgcccattcctcaccggcaggcactgcccactggtgtgcttctgtccacacccacttgtgtttttaaacgcataacgagtggaaagataggagtattcttttacagatgataacatagcacacgtgtgtttctaggctgtgtgcatgtgtattcatgcttttctccctctccccactgagatctttttaacctttttgggtcatggaccactttgaaaatctaatgaaaactatcagccactccccacaaaatacccgctctgggagggtcacggggaccgaggagctgcgctggcacggcaggcttctgtgatcagggctgccgcgagggccaggcgacaagggctcctttcagcgtaccttctcccgcggcccctctagcctgcaggagtttgtgaaggatgctgggagctacagcaagaaagtggtggacgacctcctggaccagatcacaggcggagaccactctaggacgctcttccagctgaagcaggtgggctgcactcgcaccggggttggggggcaggtgcccttggggtgctgctggcgggaagagcctgcagcctgaccaggctttcggggacgaggagctgtcgcagggactctgctgccggctcctcgtcaggatctgcgtgcttctctgcacgggcaggtgtcccccggagaccgtgactgtgtgctcaccactcccagcgcactcgtaactctctatttccatcttcatctttcatctctgtcactttccttcatcctgaagagtttaaaaaaatatttcctgtagttcagatttactgacagtgatctctcagcattggcttctctgaaagtctttatttcatcttcatttttgaaattcattttccctgtgtatggaattttagatgaccttttttcccatctactgtaaaataggtttgacttgcattgttgctataaaaaagcatctgggccaagcatggtggctcacacttgtaatcccagcactttgggaggccgaggcgggcagatccaaggtcaggaggtcgagaccatcctggctaacacggtgaaaccccgtctctactaaaaaatagaaaaaattagctgggcgtggtggcaggtgcttgtagtcccagctactcgggaggctgaggcaggagaatggcatgaacccgggaggcagagcttgcagtgagccgagatcatgccactgcactccagcttgggccacagagccagaccccatctccaaaaaaaaaaaaaaagcgtctgaagtcattgtcatctttgtttcccacatgtgacgtgtcttttcggccagatctgacctgaagtctgcttttgtacagaccacaagccaggaatgtcttttacatctttaaaagggtgtttacagaaaagaaaaggaagaagaagatgcttcgggcagcgtgtggctcacagagcctcggctgctcactcccgggccctcggcaggacgggatctggccggtgctctaggagcttttgaacttttatctttctttatcagtgattttcagcattgtattttccaggtgccttggtgggcttttctttgtgttctacttagcatttgttgtttcttggatctgtctgtagttttcatcatatttggaagatttttagccattactcaaatgtcattttccaccactgcctcttcctcctcctgctggactgtggcactctgaggacagctcgtgttatctcacatggcaccgacactgtgctgccgcaccaggctgctgcagattagtttctgatgctgttggctaagttcactcacctgttctctggccacacctgaacctgttatcccagatcagttttcactgatgatgtcgtcccgcgctgctcatcacttgggctccatttgctgcttttgtgtatcttctctcatgttgtgtgtatgtttttccttacatccttgagccacgttcgtatttattgctgctgcttttgaagtcctcagtcactgagtctgtcgcctctgccgtttccggttctgtttctgtttgacactttgctgcacttggagctgtgggccattgtgcacgtgcctggtggacagtcctgaccctcgctgtctgataaaaaagcactggccacatggccgctgggaaatttgaatgtggccagtctgaatttagatgtgatgtgtgagctacaaactagatcttaaaaaactaatgcaaaaaacgtaaaaatatgagtaacgatttcttatggcccacatgttggaataaaaacatcttcaataaatttgtctaagtaaaatgcattagttaattgaatgttaagagtaattttaatgtggcagctagaattttaagagctgggtatggtggcatgcacctgtcatcagctccacaggaggctaaggtgggaggatcacttgaggccgggaggtcgaggctgcagtgcgattgcaccaccgcactctaggcaatagagcaagaccctgtctcaaaaaaaagataaaaaaacatttagaacgaggcgtgtgctcgcgttatgtctgctgggcaaggctgatctgggttctttctctctttcagagaatactgatgatcattttggcagttgttacttgtggataatggccggatcctaccaggcttgtctggggtgggtccagggcagccttattctagggttcgtgtagccttaatgctaaggagtggcccttcggggagccctgtcttttcagcgtggtctctgctgtgggtggagttcggatgagtctctgtccttcccaggctctgagaacgtttggctcatggctcccaaggaggggtcagtcccttgacctgacggtttcatctgtgcttgttacagatgaactggggtccacatgcctggtgcagtaaacccagacacccatgccgaggttttgtcatagaaaggacgtgtgtatttgcagggcgccaagcaaggtgggccaggaggctcatgtataaatcctggcctcccccactggctacaggcaaggcttgtaaagcgggggtagatctcaggaaagcagaactgaaaggcagagtcgtgcataaggacacagaggttacatgtcggcttggcctagaagggcggtatctgcaagcagggccttataggttataggtggattcaaaggttttctgatttgcagctggttaaggaggagaagctttgtttaaaaatttggggtgaagagaaaagaatgttagcttaggcttgtgggtgtggcttcctccaggcccgtcaggaagaaattcagaacaaagaacggggtcagagctcagtcttcagtttctccttatctgagcccttcatgccagtagattagtttgttggggaggtcctaggtggagggtccaggtttctgaaagacaactcagggatatacattaagatgttatctttactttctttctttttttttctttttgagacatagagtctcactctgtcacccaggctggagtgcagtggcgtgattgtggctcactgcaacctctgcctccctgattctagcgattctcctgcctcagcctcccgagtagctgggattacaggcatgcgccaccacacctggctaatttttgtatttttagtagaggcggagtttcgccatgttggccaggctggtctttaactcctgacctcaaatgatgcatccatctcagcctcccagagtggtaggatgttgtcttttctttctacagggaacagtgctgggaggttgtctttactttctacagggaacaaacatctgtctccaccttccttgactgttgttttaggatactgttaccttcttgcttatcaagtcgctgatttacttctcagagttatctaagtaactggaatttcccttgaaggaactcaagattttccttgatttccatgcttggagggctcgcaggcccctgaagagagggttgcagccaggcgggagtccccaagcagatttctgcagctctgaggagcagccccctctgcagagcctgccccaccagctcgtggttctgactctgagctctggtcaccctcccgtgtcgtggcctgcaggctccttccaggcaggaagctggcccccccaacacagcgttagaatcaggcattgctgtggggtagggaaagtgaccccctcacagcccggaaatgggaaggctctgtggtttcctctctgggttccagttagattcctttcgggaaagtgaacttggatatggagttgagtgaccccgagtgcacccccgcagtaaatgatgctcaggactaaagtgactgaaggcttttggggaaacagatgcgaacaaaacagcagtattcattttctaattaaaagcttgtgaaaatcgatgtcattgaatctgagaaacattatttcgaacaaagatcacacatgatagagtgcatatactacagcatcgctccaccggagcacaggacgggtgtgccacggaggccgacagttgtggaaggagacaatgcacggcccggcccacctgctgcaggcaccgccaggaggtgtctgcctccttcgctcctgcgcccacggcaggcccacctgccacaggcactgccaggaggtgtctgcctcctttgctcctgcacacacctgcccctgcaggactcgagctggtctcaggcaactggtcatattccaggtggaacccacgagacccttcttatcctaagcttcccataggatctaggcacatcttttttcttttgttttaagccacccaaggctgccgaaacagcatcggcgtcctctctctgtccgctccatctcgccctgtggagcgctgtccccggcacacaatcctggcgctgaggagggggctgggcgtggttgggtcagtgactggtgatgaagaaggtttggaggacccccagccttaatccattaagatggtgtgactggggagcagaattcgcagaagcgcacaagccatttttacgtgtgtgtaatgtcagcgaattgtccgtttctatgaaatcactctggaaaaactagtttctgtcctcatttacttttcagagaagaaatgttcccatgaagcctccagatgaagccaaggtaagtttttgaacatggaagggcaagccaaatattattctcacagggaaagttgtatccagcctttgaggtggggaggtctgtgtgtatgacggcgtttagaaatggagtccgtttctgatcagtaagatcaatagtgtttctcctcctcttttcatgacttgaggtgagtggtgtgaagccgcagtacattcttccaaatccagaaatgggtagtttcagagcagttggccccgctgggtgctgtccttgtgggacacccttgcaagggttgggcaggatgggccttctcaggacctgcttggtgagtagcaggtgttgtcccaagcacagtgggctctggggccagtgctggcagggcagtgctgtgagcccagactgctgcacctgccgattggcaggtgtgtgtctctgacagtcagcaggcatgggcttgggctttggtccagggtccctgggaacctggagagaccccttaacatctgtttgagggcagaggccgagctgcagggagctgatgagagagtatgtgttagggtggctgtagtctagccctgaggacacgccttgctgggaaaggaaagggaacgttgtgtgctctgtgaagtgcctgagaaatagtcctggaccctaaaattctgtgtgtcttcctgttgcataatgtccctccccaatttctttagccccaaaaagttaacaaaggattgttagtttgcgttgttggtctcagtaggtttttctttgacatggatttgcatatccattcatgagctccaacctgacagtcccttgaacagcagcctcagtgaacagggcttggtcttgtcacttactgaggggtgggttcacgtttagcaaataattagagtgatttcaatagcgagtgtgaagtaacatttcgtttttcgtttgatgtttgaattgctcttgatgtgtgtctgtctccacaggttggggacaccctaggagacagcagcagctctgttctggagttcatgtcgatgaagtcctatcccgacgtttctgtggatatctccatgctcagctctctgggtgagttgtaacaggcactttcccacagcacctggtgaaggtgtgatagaggaagaaaacacacggcctccacctcctctcccttcctgactagacagggatgccaggaaaatcttttgttacggtatttggtctttgtcccaggtttttggaccatagctcctaaaatccttggaatctcctgagtgttgtgtcttttttaagctaatgagaagtggttgcagcccctgggtaacctcaggatggggtctggccgatccccagtggctgtggatttcatcagtgttgcctaccgcctccatgaaatcccaaaaggtggggttccctagggagcctcattgctggacgcctggaggctctgggaagaaggcagccccttcccacgggtcccctctgcatcgctcccacctggggcccatccgtaccctgggtgacaccccgcagaataaatgggtaaatgtcagcctagtgtgtggacagaagagtcaaactctgcagggtatttagagaggtttcttctgagtgaaatacgaagaccgtggctgtgacacagtcccaggaggtcccaagaacatttgccgaggaggactggtctgcagcttgttttgatatgttttagggagacagaggacatcagtcagtacatgtcagttgtaacagtggttcgtgttggaaaggcgggacaacttgaagcgaggaatgtcgggtcgttggtggattcagagatttcctgattggcatttggttgaaagggttaagctctgaagagctgaagtcagaaagaaatgtgcatggttaacataagcagttgtagaagccaaggttcttgtcacatagatgaattcagccttcaggtagcaggcttcaaaaagagtagagtagatggcaaacatcactcatgaggccctcaaaggtaccagattgttagttaaatctctgttgggtcaggaagagacttggaaggggcaggagattctctacagaatgtagatttttcccacaagatacagctttgcagggctatttcaaaatatgtcaaagggatatattttgagataaaatactcagtttctttcagggcctgccatctatcacgtgatgctgtactaaagtcggatcggaatttggtgtcttattaccacggagtctgctttgtcaaccttcagatttctgttttaaagttaatgctggtcagctgtgcctgaattccaaaagaggggataatgaggcaagtccagtcccgcttcacatcatggcctgacctcattttccaggttgactttggagtgcccttggccaagagtgggaatccgttcagtccatggggcttagaattttatttttcatttacagatgtttccctgacttctgtgagtcactctaggaaattcatagagctcaagtctggtcttctgggaaccccatttgatagctggttagtcggaagcacagaccacagcctggggctttcagttggcatcagccggtggggccatcctggagactgtgccctcacctgggaggctgccggtgcagcgcccccgagctgttctgacctccagcagcatttgtggtgcctggatccatgggtcccactgctttgcgtggtgacgttccacctgtctctgctggctctgttcaggcacttatggccgtgatttattataggggaagggtgccaacagcagcagagggacaagagtgacatccaaggaaacccagcgtgaggcccagatccactcccagcagaggcacatgggacacgcttaattcccaggagtgagctgtgacaacacacgtgaaatgcccaccagggaagcccgtcagaggcttggtgctcggggtcacagggcacccccttgccaggcaggtaccaaagtccagaccccggagggaaggtgaactttagcataaaccactctgctcctgttgttggagctgtgaacaatccctagcactgggggggaccccagatgccagccgtggctggccttgccttccaggggaccctggccccaggccgctgtgacagcacttttctgcacagcagctgtttttctcagcacttctaagattttgtccttattactacttctcagcagcttggtgctgatgggctttggtgctgatgtgctgtggtgtgttagtctgtcctcacactgttataaagaaccacctgagactggtcattggtgaaggaaagaggtttaattgactcacagttcctcaggctgtttgggaggcatggctgggaggcatcaggaaacttccaatcatggcggaagatgaaggagaaacatgcatgtcttcacatggcggagcaggagagaacgcaaagggggaagtgctttgaaacaaccagatctcatgagaagtcactcactatcatgagaacagagaacagcaagggggaaatccatccccatgatccaatcaccttccaccaggaccctcccctaacattgggaattacaattcaacatgagatttgggcaggaatacagagccaaactgtatcattctgcccctgactcctctcgaatcttttgtccttttcacatttcaaaacacaatcatgccttcctaacagtcccctaaagtcttaactcattccagcattaactcagaagtccacagtccaaagtcttatctgagacaaggcaagttacttctgcctgtgagcctgtaaaatccaaaacaagttagttaattccaagatacaaatcgggtacagacattgggtaaatagacctatcccaagagggagaaatcagccaaaacaaaggggcagcaggctacaaatctgaaacccagcagggcagtcattacatcttgaggccccgaaagaatcttctttgattccttgtctcacatccaggctacactgatgcaagggatgggctcccacggccttgggcagccccgcccttgtggctctgcagggtacagcctctgtggctgctttccctggctggtgttgagtgcctgcagcttttccagatggcatggtgcaagctgtcggatctaccattctgaggtctggaggacggtggcccttttctcacagctccactaggcagtgccccagtgggtactctgtgtggggtgagggctccaacctcacatttcccctctgcactgccctagcagaggttctccatgaagggcctgcccctgcagcagacttctgcctggacaccctggcttttccatacatcctctgaaatctaggtggaggctgccaaacctcagctcttgccttctgcctacccacatacccaacaccatgtggaagcttccagggcttggggcttgcaccctctgaagcatcgacccttttagccctgtaccttggccccttttagccatggctgggacacagagcaccatggcacatgtcccagtgcttcacagagtagtggggcccttttccctcctagacccccaggcctgtgatggcagtgtctgggcaaaggtctttgaaatgtccctgaggtattaacatttggctcctctttacttacgcaaatgtctgcagccttcttgaattcctccccagaaaatgggtttttcttttctaccacatggcaggggtacaaattttccaaacttttactctctgcttcccttttaaatataagttccagtttcaggtcatttttctgtttgtgcaagtgagcataggcttttagaagcagccaagtcacctcttgaatgctttagtgcttagaaatttcttccaccaggtgccctaaatcatctctctcaagttcaaagttccacagatttctagagcagggtcacagtgctgtcagtctctcctaaagaatagcaagagtgacctttgcccccattcccaatggggtcctcgtctccatctgagaccacctcagcctggatttcactgtccatatcactatcagcatttgaatcatagccatgcaggaagtctctaggtagttccaaactttccctcatcttcctgtctttaagttctcccagctgttctagcctctgctcattacccagttctacagggcatgtctgtagtcactgttactacactttgtctactgattccctgatatcagctttgagtctctcctagtttggggctgtgttttcctgctccttcgtgtgtgttggaatcatttactggataccaggtggagtttgtagttgatgccgttgggtgataggtctgcttacacacctttgaggcctggcggcctttgttctgagtttgagaagtggcttagactctgtgggaccttccccaggcattgtcagggtaagcccagagtcaccccggggagggtgaagctggtcccctggctggtggggctcaggtgaccacagacctgtgtgcaggttcttggcatgtctggtgcacagttcaggagtgggctgggagctcatcctttccacctctcagctggacgtgctgggtccccgatggctgtggcctggaacctgctccacagtgaactgggcgggtaccagggtctgccggcctcttgcaccctccatccagctgtctggcctttgtgtgttgaggacaggagcccacaccaggcccatcctgggttgtggccacatccctccacggtgtctgtgcgtgccatgacgtggtctgtgcggtgctaggtcttgtctgatgctttgcttgagcaaaggacgctgggtgtctgccttcccttcactcactgctaagggtaatgtctgtcctccaggcctgtccacctgtctgctgtgagctcgtccactcagtttccagagcaattattgtcctgagcagagaggcctgtctggatgggcagtgtgctcctgcccttagggtagacgggccggctgagctcagccgacgtggggtcatgtcctgtttacacagggaaggtgaagaaggagctggaccctgacgacagccatttgaacttggatgagacgacgaagctcctgcaggacctgcacgaagcacaggcggagcgcggcggctctcggccgtcgtccaacctcagctccctgtccaacgcctccgagagggaccagcaccacctgggtgagatgcccccacccacgccgcatccccagagaccccagcacagtcagtgtgacgtctagacgaggtagtgggcagcattgtagttgtgggaaggctggaggctgcatgggcagcggtgctgttgtggaggtcggtttccacagatgtccttgggtcgcggcctcggtgcagagccggagcggagctgggatgctggcctggccgcacgctgggttacaggctttctgccagataccgtccccagttctgtccacccctgtgccctctgtggaccctggttccagtgtttctgctggggagagagcatggcttccttggccatgtgtcctggagtggttttggtgggtggggttttgttcccacttgtaaacactggatcactctgtcggcagagtgaatcttggcagttcttcagctgcagaggtttagctgcaaccatctgcaaaaaggccggtattttcgattccattgaccttgtgatcagggtgttaacagtgcatggagcaggctttggagggccgtaggtcaaagtctgaggcccccgatatcccagtatgactttgggaactgccctgaggtctgggctgtgtctgagggactcctggccaaggagcgttctctccttcagaagcagcatccgtgctgtgtgctgggtcagggcgacccctggctccagggtctctacacacagctctccttggcagggagtgagaggtgcccctgtgtcctgggagtccctgagccctggcggtaggtcaggaagcagaccttgggctccaggagccccacgtgtgctgcgggtctgtcctgtgtgttgaagtcctgtgttctgaaaattgcaggaagcccttctcgcctgagtgtcggggagcagccagacgtcacccacgacccctatgagtttcttcagtctccagagcctgcggcctctgccaagacctaactctagaccaccttcagctcttttattttatttttttagttttattttgcacgtgtagagtttttgtcatcagacaaggactttgatcctgtcccctttggcatgcgggaagcagccgcggggaggtaatgaattgtctgtggtatcatgtcagcagagtctccaagccccacgaaccctgaggagtggagtcatacgcgaaggccatatggccatcgtgtcagcagagagagtctctgtacacagccccgtgaaccctgaggagtggagtcatacacgaagggcgtgtggccatcgtgtcagcagagagagtctctgtacacagccccgtgaaccctgaggagt

SEQ ID NO: 10990 - DNA, 2120 bp, Homo sapiens
tccgggcacgcggacgggggtcctgggcaccgggcgagattatgccgacaagcccctggagaagcctctaaagctagtcctgaaggtcggaggaagtgaagtgactgaactctcaggatccggccacgactccagttactatgatgacaggtcagaccatgagcgagagaggcacaaagaaaagaaaaagaagaagaagaagaagtccgagaaggagaagcatctggacgatgaggaaagaaggaagcgaaaggaagagaagaagcggaagcgagagagggagcactgtgacacggagggagaggctgacgactttgatcctgggaagaaggtggaggtggagccgcccccagatcggccagtccgagcgtgccggacacagccagccgaaaatgagagcacacctattcagcaactcctggaacacttcctccgccagcttcagagatccccatggattttttgcttttcctgtcacggatgcaattgctcctggatattcaatgataataaaacatcccatggattttggcaccatgaaagacaaaattgtagctaatgaatacaagtcagttacggaatttaaggcagatttcaagctgatgtgtgataatgcaatgacatacaataggccagataccgtgtactacaagttggcgaagaagatccttcacgcaggctttaagatgatgagcaaacaggcagctcttttgggcaatgaagatacagctgttgaggaacctgtccctgaagttgtaccagtacaagtagaaactgccaagaaatccaaaaagccgagtagagaagttatcagctgcatgtttgagcctgaagggaatgcctgcagcttgacggacagtaccgcagaggagcacgtgctggcgctggtggagcacgcagctgacgaagctcgggacaggatcaaccggttcctcccaggcggcaagatgggctatctgaagaggaacggggacgggagcctgctctacagcgtggtcaacacggccgagccggacgctgatgaggaggagacccacccggtggacttgagctcgctctccagtaagctactcccaggcttcaccacgctgggcttcaaagacgagagaagaaacaaagtcacctttctctccagtgccactactgcgctttcgatgcagaataattcagtatttggcgacttgaagtcggacgagatggagctgctctactcagcctacggagatgagacaggcgtgcagtgtgcgctgagcctgcaggagtttgtgaaggatgctgggagctacagcaagaaagtggtggacgacctcctggaccagatcacaggcggagaccactctaggacgctcttccagctgaagcagagaagaaatgttcccatgaagcctccagatgaagccaaggttggggacaccctaggagacagcagcagctctgttctggagttcatgtcgatgaagtcctatcccgacgtttctgtggatatctccatgctcagctctctggggaaggtgaagaaggagctggaccctgacgacagccatttgaacttggatgagacgacgaagctcctgcaggacctgcacgaagcacaggcggagcgcggcggctctcggccgtcgtccaacctcagctccctgtccaacgcctccgagagggaccagcaccacctgggaagcccttctcgcctgagtgtcggggagcagccagacgtcacccacgacccctatgagtttcttcagtctccagagcctgcggcctctgccaagacctaactctagaccaccttcagctcttttattttatttttttagttttattttgcacgtgtagagtttttgtcatcagacaaggactttgatcctgtcccctttggcatgcgggaagcagccgcggggaggtaatgaattgtctgtggtatcatgtcagcagagtctccaagccccacgaaccctgaggagtggagtcatacgcgaaggccatatggccatcgtgtcagcagagagagtctctgtacacagccccgtgaaccctgaggagtggagtcatacacgaagggcgtgtggccatcgtgtcagcagagagagtctctgtacacagccccgtgaaccctgaggagt

SEQ ID NO: 10991 - DNA, 15575 bp, Homo sapiens
gccactcacaccatctgctaatgggacagctcactcttccctccaaaccatggccttggctcaagagcttccttgtttctggaatgttctttcctccagctccaggtgttgaaattctgcctggtctgggtctcctgttgaaggacgccctccactgggaaggatcctcttgccttcaccacttgtcttcaccagcccctgctcccctcttcctcttggggctgttgtggttgttgatactttttttttgttgtgtttgacacacatcttcttctcaccctctaacacagttctcaaccacagcacttttgtccctggagatgttggcagtgtccagaggcgtgttgatggtcccactggggttgggggtgctgctggcaccagatggtagggagatgccaggggtgctgctccacaccctatgggacactgcacagtacacctggcctgtgtcccccacagcgagagctggccctgggcaggcgtggtccctgcggtgtgtgttggttgggatcctccacagtgacagacggtgcgctctgcccacgtttccacacagctcttttgcttgtggagctcacccctttgcagagagctcatttccctgcggtctttggcctgcagaagtaaaatgaggggtggtgaattacacccctgctggttacacatggaaaactcaggagtgagaattttgtggagagcaagagaggtgagactggggtgctggctgccagccaggcggtccctcagcccctggagaagcggggtggggcctgcacaccgagtccttccagtgagtccagtgatgctctctcctcttcctcccagtcacctttctctccagtgccactactgcgctttcgatgcagaataattcagtatttggcgacttgaagtcggacgagatggagctgctctactcagcctacggagatgagacaggcgtgcagtgtgcgctgaggcaagtgtcggccccggggagcccttggctgctgtgcagcttgagctgtgccctggtgtgggacgtggagtcccacatgtgtgcgggtggggagagagccatcttgcagccgtccatatggcagcctgggtcttcccgttgctttcagtcatccacacaggtctgccacaggccagtcctgaaatctgggtaactcagtcagaaggtggtgatcagggcgtagcttgtgaaggggttgggggtgtgttgagcacactggatcgtattgaattgtgtttcctaagtgaccgtgctagctcaggctgcagtgacaaagcaccacagactggggtcttattcctgggggctggcatttgccatgaaggtgtgggcagggctggttcctcccgagccctctctcctgggcctgcaggtgccgtctttccgtcttttccctgtgccttcccggggccatcctgcgtgtgtctgtgtcctcggctctcctggagaccctaccgttctcaaggaccctggtcatattggatcagggccaccctaatggcctcatgtcactgcagttacctctaaaggccgttaaagtccccagctccaagtataatcacattccaaggcactggggtcgggatttcaacttacgaactctgagcgggagatacaattcaggccatggcaggctaaagtataatactaaaatcacaaatgtagcagcctgcttttccgtagaatgttgctgtgtgtattttttgttttctgtggcaaaataaaagtgggtcactcttgtaaaatttggcagtttttaatggagaaagcaacttaattttgctagcctttaagaaatggcatcttgacatatcaggtcttcattttattccaacaagaatgcagaatatgttttaaaaataaacaagaatccccttagtgcttcataaaataagtgaaaacctgaccctgatttttgtagcaaaaaatgaagtaaacgtggaaaatgaagaggaaattctagtaggagacgatggggtcataagtcagaaattaaagagttgtttgctccccaccctcccgccagccctcacctcacccctgctgtggggcctctgcccagcctgggccaaggccgtggctcccctggtgccatcctgtccgcagtcggctccctgtccacggcgtgtggctccttcaggacatcagtcacctgttgtccatgtggcacatcagtggactgtgcacaccccccgccttccccagctgtctgtccctagaacgcatcaggttccatgttgccgtgaagaaagatcattctgaccccgcctgccttgtggctgcaggggcaacactcagaagcacatctcctagggcctggcatgaggctacgtggtcccatgccagcctcagcgcacagacacccagatcctctgcccctgagtgctgcttccgtgcacgctgcgagtgccgagcttggcctgtcccgggctgtgggtgttttaacaaagacacggagtctccctgttgcctcctgtgaccgtggttcagcttctgaccagcagccatccttgttcctctctgtgaaggtctttggagtctggggagcccttctgaggcgcttgcttggtgctttgattctaagactatgcatttttgttcctggcctactttttagattgtattatattttattttttaagctgtttcatgtatatggccaagaatcaggatggtactaaaaggagtgccttggaagtgtcggcccacccctgccccacgcgcccattcctcaccggcaggcactgcccactggtgtgcttctgtccacacccacttgtgtttttaaacgcataacgagtggaaagataggagtattcttttacagatgataacatagcacacgtgtgtttctaggctgtgtgcatgtgtattcatgcttttctccctctccccactgagatctttttaacctttttgggtcatggaccactttgaaaatctaatgaaaactatcagccactccccacaaaatacccgctctgggagggtcacggggaccgaggagctgcgctggcacggcaggcttctgtgatcagggctgccgcgagggccaggcgacaagggctcctttcagcgtaccttctcccgcggcccctctagcctgcaggagtttgtgaaggatgctgggagctacagcaagaaagtggtggacgacctcctggaccagatcacaggcggagaccactctaggacgctcttccagctgaagcaggtgggctgcactcgcaccggggttggggggcaggtgcccttggggtgctgctggcgggaagagcctgcagcctgaccaggctttcggggacgaggagctgtcgcagggactctgctgccggctcctcgtcaggatctgcgtgcttctctgcacgggcaggtgtcccccggagaccgtgactgtgtgctcaccactcccagcgcactcgtaactctctatttccatcttcatctttcatctctgtcactttccttcatcctgaagagtttaaaaaaatatttcctgtagttcagatttactgacagtgatctctcagcattggcttctctgaaagtctttatttcatcttcatttttgaaattcattttccctgtgtatggaattttagatgaccttttttcccatctactgtaaaataggtttgacttgcattgttgctataaaaaagcatctgggccaagcatggtggctcacacttgtaatcccagcactttgggaggccgaggcgggcagatccaaggtcaggaggtcgagaccatcctggctaacacggtgaaaccccgtctctactaaaaaatagaaaaaattagctgggcgtggtggcaggtgcttgtagtcccagctactcgggaggctgaggcaggagaatggcatgaacccgggaggcagagcttgcagtgagccgagatcatgccactgcactccagcttgggccacagagccagaccccatctccaaaaaaaaaaaaaaagcgtctgaagtcattgtcatctttgtttcccacatgtgacgtgtcttttcggccagatctgacctgaagtctgcttttgtacagaccacaagccaggaatgtcttttacatctttaaaagggtgtttacagaaaagaaaaggaagaagaagatgcttcgggcagcgtgtggctcacagagcctcggctgctcactcccgggccctcggcaggacgggatctggccggtgctctaggagcttttgaacttttatctttctttatcagtgattttcagcattgtattttccaggtgccttggtgggcttttctttgtgttctacttagcatttgttgtttcttggatctgtctgtagttttcatcatatttggaagatttttagccattactcaaatgtcattttccaccactgcctcttcctcctcctgctggactgtggcactctgaggacagctcgtgttatctcacatggcaccgacactgtgctgccgcaccaggctgctgcagattagtttctgatgctgttggctaagttcactcacctgttctctggccacacctgaacctgttatcccagatcagttttcactgatgatgtcgtcccgcgctgctcatcacttgggctccatttgctgcttttgtgtatcttctctcatgttgtgtgtatgtttttccttacatccttgagccacgttcgtatttattgctgctgcttttgaagtcctcagtcactgagtctgtcgcctctgccgtttccggttctgtttctgtttgacactttgctgcacttggagctgtgggccattgtgcacgtgcctggtggacagtcctgaccctcgctgtctgataaaaaagcactggccacatggccgctgggaaatttgaatgtggccagtctgaatttagatgtgatgtgtgagctacaaactagatcttaaaaaactaatgcaaaaaacgtaaaaatatgagtaacgatttcttatggcccacatgttggaataaaaacatcttcaataaatttgtctaagtaaaatgcattagttaattgaatgttaagagtaattttaatgtggcagctagaattttaagagctgggtatggtggcatgcacctgtcatcagctccacaggaggctaaggtgggaggatcacttgaggccgggaggtcgaggctgcagtgcgattgcaccaccgcactctaggcaatagagcaagaccctgtctcaaaaaaaagataaaaaaacatttagaacgaggcgtgtgctcgcgttatgtctgctgggcaaggctgatctgggttctttctctctttcagagaatactgatgatcattttggcagttgttacttgtggataatggccggatcctaccaggcttgtctggggtgggtccagggcagccttattctagggttcgtgtagccttaatgctaaggagtggcccttcggggagccctgtcttttcagcgtggtctctgctgtgggtggagttcggatgagtctctgtccttcccaggctctgagaacgtttggctcatggctcccaaggaggggtcagtcccttgacctgacggtttcatctgtgcttgttacagatgaactggggtccacatgcctggtgcagtaaacccagacacccatgccgaggttttgtcatagaaaggacgtgtgtatttgcagggcgccaagcaaggtgggccaggaggctcatgtataaatcctggcctcccccactggctacaggcaaggcttgtaaagcgggggtagatctcaggaaagcagaactgaaaggcagagtcgtgcataaggacacagaggttacatgtcggcttggcctagaagggcggtatctgcaagcagggccttataggttataggtggattcaaaggttttctgatttgcagctggttaaggaggagaagctttgtttaaaaatttggggtgaagagaaaagaatgttagcttaggcttgtgggtgtggcttcctccaggcccgtcaggaagaaattcagaacaaagaacggggtcagagctcagtcttcagtttctccttatctgagcccttcatgccagtagattagtttgttggggaggtcctaggtggagggtccaggtttctgaaagacaactcagggatatacattaagatgttatctttactttctttctttttttttctttttgagacatagagtctcactctgtcacccaggctggagtgcagtggcgtgattgtggctcactgcaacctctgcctccctgattctagcgattctcctgcctcagcctcccgagtagctgggattacaggcatgcgccaccacacctggctaatttttgtatttttagtagaggcggagtttcgccatgttggccaggctggtctttaactcctgacctcaaatgatgcatccatctcagcctcccagagtggtaggatgttgtcttttctttctacagggaacagtgctgggaggttgtctttactttctacagggaacaaacatctgtctccaccttccttgactgttgttttaggatactgttaccttcttgcttatcaagtcgctgatttacttctcagagttatctaagtaactggaatttcccttgaaggaactcaagattttccttgatttccatgcttggagggctcgcaggcccctgaagagagggttgcagccaggcgggagtccccaagcagatttctgcagctctgaggagcagccccctctgcagagcctgccccaccagctcgtggttctgactctgagctctggtcaccctcccgtgtcgtggcctgcaggctccttccaggcaggaagctggcccccccaacacagcgttagaatcaggcattgctgtggggtagggaaagtgaccccctcacagcccggaaatgggaaggctctgtggtttcctctctgggttccagttagattcctttcgggaaagtgaacttggatatggagttgagtgaccccgagtgcacccccgcagtaaatgatgctcaggactaaagtgactgaaggcttttggggaaacagatgcgaacaaaacagcagtattcattttctaattaaaagcttgtgaaaatcgatgtcattgaatctgagaaacattatttcgaacaaagatcacacatgatagagtgcatatactacagcatcgctccaccggagcacaggacgggtgtgccacggaggccgacagttgtggaaggagacaatgcacggcccggcccacctgctgcaggcaccgccaggaggtgtctgcctccttcgctcctgcgcccacggcaggcccacctgccacaggcactgccaggaggtgtctgcctcctttgctcctgcacacacctgcccctgcaggactcgagctggtctcaggcaactggtcatattccaggtggaacccacgagacccttcttatcctaagcttcccataggatctaggcacatcttttttcttttgttttaagccacccaaggctgccgaaacagcatcggcgtcctctctctgtccgctccatctcgccctgtggagcgctgtccccggcacacaatcctggcgctgaggagggggctgggcgtggttgggtcagtgactggtgatgaagaaggtttggaggacccccagccttaatccattaagatggtgtgactggggagcagaattcgcagaagcgcacaagccatttttacgtgtgtgtaatgtcagcgaattgtccgtttctatgaaatcactctggaaaaactagtttctgtcctcatttacttttcagagaagaaatgttcccatgaagcctccagatgaagccaaggtaagtttttgaacatggaagggcaagccaaatattattctcacagggaaagttgtatccagcctttgaggtggggaggtctgtgtgtatgacggcgtttagaaatggagtccgtttctgatcagtaagatcaatagtgtttctcctcctcttttcatgacttgaggtgagtggtgtgaagccgcagtacattcttccaaatccagaaatgggtagtttcagagcagttggccccgctgggtgctgtccttgtgggacacccttgcaagggttgggcaggatgggccttctcaggacctgcttggtgagtagcaggtgttgtcccaagcacagtgggctctggggccagtgctggcagggcagtgctgtgagcccagactgctgcacctgccgattggcaggtgtgtgtctctgacagtcagcaggcatgggcttgggctttggtccagggtccctgggaacctggagagaccccttaacatctgtttgagggcagaggccgagctgcagggagctgatgagagagtatgtgttagggtggctgtagtctagccctgaggacacgccttgctgggaaaggaaagggaacgttgtgtgctctgtgaagtgcctgagaaatagtcctggaccctaaaattctgtgtgtcttcctgttgcataatgtccctccccaatttctttagccccaaaaagttaacaaaggattgttagtttgcgttgttggtctcagtaggtttttctttgacatggatttgcatatccattcatgagctccaacctgacagtcccttgaacagcagcctcagtgaacagggcttggtcttgtcacttactgaggggtgggttcacgtttagcaaataattagagtgatttcaatagcgagtgtgaagtaacatttcgtttttcgtttgatgtttgaattgctcttgatgtgtgtctgtctccacaggttggggacaccctaggagacagcagcagctctgttctggagttcatgtcgatgaagtcctatcccgacgtttctgtggatatctccatgctcagctctctgggtgagttgtaacaggcactttcccacagcacctggtgaaggtgtgatagaggaagaaaacacacggcctccacctcctctcccttcctgactagacagggatgccaggaaaatcttttgttacggtatttggtctttgtcccaggtttttggaccatagctcctaaaatccttggaatctcctgagtgttgtgtcttttttaagctaatgagaagtggttgcagcccctgggtaacctcaggatggggtctggccgatccccagtggctgtggatttcatcagtgttgcctaccgcctccatgaaatcccaaaaggtggggttccctagggagcctcattgctggacgcctggaggctctgggaagaaggcagccccttcccacgggtcccctctgcatcgctcccacctggggcccatccgtaccctgggtgacaccccgcagaataaatgggtaaatgtcagcctagtgtgtggacagaagagtcaaactctgcagggtatttagagaggtttcttctgagtgaaatacgaagaccgtggctgtgacacagtcccaggaggtcccaagaacatttgccgaggaggactggtctgcagcttgttttgatatgttttagggagacagaggacatcagtcagtacatgtcagttgtaacagtggttcgtgttggaaaggcgggacaacttgaagcgaggaatgtcgggtcgttggtggattcagagatttcctgattggcatttggttgaaagggttaagctctgaagagctgaagtcagaaagaaatgtgcatggttaacataagcagttgtagaagccaaggttcttgtcacatagatgaattcagccttcaggtagcaggcttcaaaaagagtagagtagatggcaaacatcactcatgaggccctcaaaggtaccagattgttagttaaatctctgttgggtcaggaagagacttggaaggggcaggagattctctacagaatgtagatttttcccacaagatacagctttgcagggctatttcaaaatatgtcaaagggatatattttgagataaaatactcagtttctttcagggcctgccatctatcacgtgatgctgtactaaagtcggatcggaatttggtgtcttattaccacggagtctgctttgtcaaccttcagatttctgttttaaagttaatgctggtcagctgtgcctgaattccaaaagaggggataatgaggcaagtccagtcccgcttcacatcatggcctgacctcattttccaggttgactttggagtgcccttggccaagagtgggaatccgttcagtccatggggcttagaattttatttttcatttacagatgtttccctgacttctgtgagtcactctaggaaattcatagagctcaagtctggtcttctgggaaccccatttgatagctggttagtcggaagcacagaccacagcctggggctttcagttggcatcagccggtggggccatcctggagactgtgccctcacctgggaggctgccggtgcagcgcccccgagctgttctgacctccagcagcatttgtggtgcctggatccatgggtcccactgctttgcgtggtgacgttccacctgtctctgctggctctgttcaggcacttatggccgtgatttattataggggaagggtgccaacagcagcagagggacaagagtgacatccaaggaaacccagcgtgaggcccagatccactcccagcagaggcacatgggacacgcttaattcccaggagtgagctgtgacaacacacgtgaaatgcccaccagggaagcccgtcagaggcttggtgctcggggtcacagggcacccccttgccaggcaggtaccaaagtccagaccccggagggaaggtgaactttagcataaaccactctgctcctgttgttggagctgtgaacaatccctagcactgggggggaccccagatgccagccgtggctggccttgccttccaggggaccctggccccaggccgctgtgacagcacttttctgcacagcagctgtttttctcagcacttctaagattttgtccttattactacttctcagcagcttggtgctgatgggctttggtgctgatgtgctgtggtgtgttagtctgtcctcacactgttataaagaaccacctgagactggtcattggtgaaggaaagaggtttaattgactcacagttcctcaggctgtttgggaggcatggctgggaggcatcaggaaacttccaatcatggcggaagatgaaggagaaacatgcatgtcttcacatggcggagcaggagagaacgcaaagggggaagtgctttgaaacaaccagatctcatgagaagtcactcactatcatgagaacagagaacagcaagggggaaatccatccccatgatccaatcaccttccaccaggaccctcccctaacattgggaattacaattcaacatgagatttgggcaggaatacagagccaaactgtatcattctgcccctgactcctctcgaatcttttgtccttttcacatttcaaaacacaatcatgccttcctaacagtcccctaaagtcttaactcattccagcattaactcagaagtccacagtccaaagtcttatctgagacaaggcaagttacttctgcctgtgagcctgtaaaatccaaaacaagttagttaattccaagatacaaatcgggtacagacattgggtaaatagacctatcccaagagggagaaatcagccaaaacaaaggggcagcaggctacaaatctgaaacccagcagggcagtcattacatcttgaggccccgaaagaatcttctttgattccttgtctcacatccaggctacactgatgcaagggatgggctcccacggccttgggcagccccgcccttgtggctctgcagggtacagcctctgtggctgctttccctggctggtgttgagtgcctgcagcttttccagatggcatggtgcaagctgtcggatctaccattctgaggtctggaggacggtggcccttttctcacagctccactaggcagtgccccagtgggtactctgtgtggggtgagggctccaacctcacatttcccctctgcactgccctagcagaggttctccatgaagggcctgcccctgcagcagacttctgcctggacaccctggcttttccatacatcctctgaaatctaggtggaggctgccaaacctcagctcttgccttctgcctacccacatacccaacaccatgtggaagcttccagggcttggggcttgcaccctctgaagcatcgacccttttagccctgtaccttggccccttttagccatggctgggacacagagcaccatggcacatgtcccagtgcttcacagagtagtggggcccttttccctcctagacccccaggcctgtgatggcagtgtctgggcaaaggtctttgaaatgtccctgaggtattaacatttggctcctctttacttacgcaaatgtctgcagccttcttgaattcctccccagaaaatgggtttttcttttctaccacatggcaggggtacaaattttccaaacttttactctctgcttcccttttaaatataagttccagtttcaggtcatttttctgtttgtgcaagtgagcataggcttttagaagcagccaagtcacctcttgaatgctttagtgcttagaaatttcttccaccaggtgccctaaatcatctctctcaagttcaaagttccacagatttctagagcagggtcacagtgctgtcagtctctcctaaagaatagcaagagtgacctttgcccccattcccaatggggtcctcgtctccatctgagaccacctcagcctggatttcactgtccatatcactatcagcatttgaatcatagccatgcaggaagtctctaggtagttccaaactttccctcatcttcctgtctttaagttctcccagctgttctagcctctgctcattacccagttctacagggcatgtctgtagtcactgttactacactttgtctactgattccctgatatcagctttgagtctctcctagtttggggctgtgttttcctgctccttcgtgtgtgttggaatcatttactggataccaggtggagtttgtagttgatgccgttgggtgataggtctgcttacacacctttgaggcctggcggcctttgttctgagtttgagaagtggcttagactctgtgggaccttccccaggcattgtcagggtaagcccagagtcaccccggggagggtgaagctggtcccctggctggtggggctcaggtgaccacagacctgtgtgcaggttcttggcatgtctggtgcacagttcaggagtgggctgggagctcatcctttccacctctcagctggacgtgctgggtccccgatggctgtggcctggaacctgctccacagtgaactgggcgggtaccagggtctgccggcctcttgcaccctccatccagctgtctggcctttgtgtgttgaggacaggagcccacaccaggcccatcctgggttgtggccacatccctccacggtgtctgtgcgtgccatgacgtggtctgtgcggtgctaggtcttgtctgatgctttgcttgagcaaaggacgctgggtgtctgccttcccttcactcactgctaagggtaatgtctgtcctccaggcctgtccacctgtctgctgtgagctcgtccactcagtttccagagcaattattgtcctgagcagagaggcctgtctggatgggcagtgtgctcctgcccttagggtagacgggccggctgagctcagccgacgtggggtcatgtcctgtttacacagggaaggtgaagaaggagctggaccctgacgacagccatttgaacttggatgagacgacgaagctcctgcaggacctgcacgaagcacaggcggagcgcggcggctctcggccgtcgtccaacctcagctccctgtccaacgcctccgagagggaccagcaccacctgggtgagatgcccccacccacgccgcatccccagagaccccagcacagtcagtgtgacgtctagacgaggtagtgggcagcattgtagttgtgggaaggctggaggctgcatgggcagcggtgctgttgtggaggtcggtttccacagatgtccttgggtcgcggcctcggtgcagagccggagcggagctgggatgctggcctggccgcacgctgggttacaggctttctgccagataccgtccccagttctgtccacccctgtgccctctgtggaccctggttccagtgtttctgctggggagagagcatggcttccttggccatgtgtcctggagtggttttggtgggtggggttttgttcccacttgtaaacactggatcactctgtcggcagagtgaatcttggcagttcttcagctgcagaggtttagctgcaaccatctgcaaaaaggccggtattttcgattccattgaccttgtgatcagggtgttaacagtgcatggagcaggctttggagggccgtaggtcaaagtctgaggcccccgatatcccagtatgactttgggaactgccctgaggtctgggctgtgtctgagggactcctggccaaggagcgttctctccttcagaagcagcatccgtgctgtgtgctgggtcagggcgacccctggctccagggtctctacacacagctctccttggcagggagtgagaggtgcccctgtgtcctgggagtccctgagccctggcggtaggtcaggaagcagaccttgggctccaggagccccacgtgtgctgcgggtctgtcctgtgtgttgaagtcctgtgttctgaaaattgcaggaagcccttctcgcctgagtgtcggggagcagccagacgtcacccacgacccctatgagtttcttcagtctccagagcctgcggcctctgccaagacctaactctagaccaccttcagctcttttattttatttttttagttttattttgcacgtgtagagtttttgtcatcagacaaggactttgatcctgtcccctttggcatgcgggaagcagccgcggggaggtaatgaattgtctgtggtatcatgtcagcagagtctccaagccccacgaaccctgaggagtggagtcatacgcgaaggccatatggccatcgtgtcagcagagagagtctctgtacacagccccgtgaaccctgaggagtggagtcatacacgaagggcgtgtggccatcgtgtcagcagagagagtctctgtacacagccccgtgaaccctgaggagtggagtcatacgcgaagggtgtgtggccaggctgcagagctgcgtgccgtttgtgtccgagcatcacgtgtggctccagcccttgtttctgccagtgtagacacctctgtctgccccactgtcctggggtcgctcttgggaggcacaggcatgggtgtgtctggcctcattctgtatcagtccagtgtgttcctgtcatagtttgtgtctcccaggcaggccatggtaggggcctcgcaggggccattggggagcacagggccaggctggggtgaggagagctcccctgttttctgtttaattgatgagcctgggaaaggagtgtgttctgcctgcccgttacagtggagcgttccgtgtccataaaacgttttctaactggg

SEQ ID NO: 10992 - DNA, 2211 bp, Homo sapiens
gccactcacaccatctgctaatgggacagctcactcttccctccaaaccatggccttggctcaagagcttccttgtttctggaatgttctttcctccagctccaggtgttgaaattctgcctggtctgggtctcctgttgaaggacgccctccactgggaaggatcctcttgccttcaccacttgtcttcaccagcccctgctcccctcttcctcttggggctgttgtggttgttgatactttttttttgttgtgtttgacacacatcttcttctcaccctctaacacagttctcaaccacagcacttttgtccctggagatgttggcagtgtccagaggcgtgttgatggtcccactggggttgggggtgctgctggcaccagatggtagggagatgccaggggtgctgctccacaccctatgggacactgcacagtacacctggcctgtgtcccccacagcgagagctggccctgggcaggcgtggtccctgcggtgtgtgttggttgggatcctccacagtgacagacggtgcgctctgcccacgtttccacacagctcttttgcttgtggagctcacccctttgcagagagctcatttccctgcggtctttggcctgcagaagtaaaatgaggggtggtgaattacacccctgctggttacacatggaaaactcaggagtgagaattttgtggagagcaagagaggtgagactggggtgctggctgccagccaggcggtccctcagcccctggagaagcggggtggggcctgcacaccgagtccttccagtgagtccagtgatgctctctcctcttcctcccagtcacctttctctccagtgccactactgcgctttcgatgcagaataattcagtatttggcgacttgaagtcggacgagatggagctgctctactcagcctacggagatgagacaggcgtgcagtgtgcgctgagcctgcaggagtttgtgaaggatgctgggagctacagcaagaaagtggtggacgacctcctggaccagatcacaggcggagaccactctaggacgctcttccagctgaagcagagaagaaatgttcccatgaagcctccagatgaagccaaggttggggacaccctaggagacagcagcagctctgttctggagttcatgtcgatgaagtcctatcccgacgtttctgtggatatctccatgctcagctctctggggaaggtgaagaaggagctggaccctgacgacagccatttgaacttggatgagacgacgaagctcctgcaggacctgcacgaagcacaggcggagcgcggcggctctcggccgtcgtccaacctcagctccctgtccaacgcctccgagagggaccagcaccacctgggaagcccttctcgcctgagtgtcggggagcagccagacgtcacccacgacccctatgagtttcttcagtctccagagcctgcggcctctgccaagacctaactctagaccaccttcagctcttttattttatttttttagttttattttgcacgtgtagagtttttgtcatcagacaaggactttgatcctgtcccctttggcatgcgggaagcagccgcggggaggtaatgaattgtctgtggtatcatgtcagcagagtctccaagccccacgaaccctgaggagtggagtcatacgcgaaggccatatggccatcgtgtcagcagagagagtctctgtacacagccccgtgaaccctgaggagtggagtcatacacgaagggcgtgtggccatcgtgtcagcagagagagtctctgtacacagccccgtgaaccctgaggagtggagtcatacgcgaagggtgtgtggccaggctgcagagctgcgtgccgtttgtgtccgagcatcacgtgtggctccagcccttgtttctgccagtgtagacacctctgtctgccccactgtcctggggtcgctcttgggaggcacaggcatgggtgtgtctggcctcattctgtatcagtccagtgtgttcctgtcatagtttgtgtctcccaggcaggccatggtaggggcctcgcaggggccattggggagcacagggccaggctggggtgaggagagctcccctgttttctgtttaattgatgagcctgggaaaggagtgtgttctgcctgcccgttacagtggagcgttccgtgtccataaaacgttttctaactggg

SEQ ID NO: 10993 - DNA, 3480 bp, Homo sapiens
gggcaccgggcgaggtcctggccacgagggaggggttctgggcacgcgggagggggtcctgggatttcgggcagggaaccgggcacacgtgaggggtcctgggtaggcgcttacgttcctggtagagggttctgggttcgaggctgcaagcccactcaccccggtcctggagactagggaagcatctgtgctggcttttgtgtggagctcagggagaagctgggctgccctttctcccgcctttccctccctctcccttgctcccgcagcagctccatgggtgtcagcgggcagcacgggcgcctgcaggaagtcaggcgagggtgaaccgaagtgctgggggtttctaggagggagatcgggctccggggttccaggtccctcttaatccatcttcttgaacgagtaatgtgaacaacatcccacagggcctctggtgaggacaccgtggctcgaaagggacctgaagctccctgcggaggggaagggagaacaaggaggcagtgacatgccgccactgtggtcttcccttccgtctttccctgctggttggcagccccgctgtactccttagggaggcctttccctcttagcaccttcacgtctcacctggctgcgtggcgtttgcacctgagcacgcgggtagaactcggtctgtgtctgtgcagattatgccgacaagcccctggagaagcctctaaagctagtcctgaaggtcggaggaagtgaagtgactgaactctcaggatccggccacgactccagttactatgatgacaggtcagaccatgagcgagagaggcacaaagaaaagaaaaagaagaagaagaagaagtccgagaaggagaagcatctggacgatgaggaaagaaggaagcgaaaggtaaaggagcagcggcggtggcccggacgctgcccacgaggagcccgtggggagcctggtcccaggacccaggcagagtgcgcctgcgtggctggaggaggggagggggtgttccgttggtagcaaaacgcgaaccgctgaggcccgcagactcagttccaggatcctgggtgtgctgttcctcagcagaccctgccagggtctctgtgaggagggagcctggcatgaggaggatctcggagggggtttcccttagttctgtccctcccctgagaactgcgaggggattgggcagacctgtccggatcccgcctactcctgcctttctcactcccttgactctgccgcccaggaagagaagaagcggaagcgagagagggagcactgtgacacggagggagaggctgacgactttgatcctgggaagaaggtggaggtggagccgcccccagatcggccagtccgagcgtgccggacacagccaggcaagggtgcacttttagagactctcctggtgttcacagctcatcgttgtaaatgaggggtcggcaccgtgtcctgttgctttggggagaagcatgggagggaggagagctggtatttccagggcctcatcccaggtgtcctctggcctgaggtttcctccggtgtctctgaatgtctagagcaaggcgtggccagttaccactggtgcccttcagttttgttttttaacttgttagctaaggatggcttatatgttttttaagcgttcataaaaagaaacaaaaaggcatctccacagagaccaatcgtatgtgacccgcaaagcctagactgttttttgtctggcctttatgtaaaaagtttgccagccctgggtcttgaagtttggttttgtttgcacttaagacagtattggaacagtagccccatctgggtcagactggtaagagagatgcatgtcagtgaaaacgcaggtaattccccttgggaagaagggacctcgaggcccaaatggtgggtctgaagttgctgaaagtgaccataggctgagacaaaggaagctggaggcctttagtagaatctctgtcgtgggcaccatctgcgaaggatggcatttggctggaatttccagttgacaaggacttgccctctgagttctctttgtccccagccttcctgtgcacaactcacagtgatgaggcatttgtacctaagacaaggggtgtctcttcccagcaactctcagcatccagtggttcctggattatagggaaacagacggctgggctttgggacatgggacatcagggagtggggaggctagtgctgcgatcattcaggccgtcagaaactgtctgaggcctgctggctccactgaaggaaagttctggaaagctggtggccttctgagctcctgtggtcatttggctcttcaggcactttctttttttaatttatttttgaaacatggtcttgctgtgtcgcctaggctggagtgcagtgtcgtgattcactcctgggctcagataaccctgggctcaagcgatcctcccacctcagcctcccaagttgctgggactacaggcacgcaccaccacgccggccatttatttactttttgttgaattttaagggacctcaagtgaaataataatcggtgaattcaggatcaacctttatgtccagagcgtttgttccgtcgtccatttcttgtctagagtagtggtatgagctgaaaacattgctaagtgatcaccacatattgttgatgtaagggctaccggttattacaagagatttttatgactcctgctgtgggggtgccctttctacccggctgagcttggtgggagccaaggctgagtcggatgtatctttatatccccagttctcggtggaacttaaaatgctgtgagacaccagacagacagatactgtgaacttggagctctctaatgaagggataccaaagtcttgtattcaatttttttttccttaaattgtcagccgaaaatgagagcacacctattcagcaactcctggaacacttcctccgccagcttcagaggtaaaccggggcgtttctgaagagctagtgtctgggggggtgtggtgtcatcttttctgaggccttattccccacgccagcctcgtcagctgtgaaacagaccctgcaccttctcttggtgactcccagtccacttcggggtgcgtaggaagagttcatgaactcattagtggctcactctgaagtcagagtagagtgagggaagtcaaggctagagctgggacattgatggccgccaggatgcgttgggggaatttttattatatctgaaatacctatcacaataaattaaaagacgctcgtaacttttttatttttaagaaacaaaattcggtcagttgtatccaatttttggattgtaagagattttgtatcatttagaaatctagatttttccgctttaagatgtctttgctttcagaaaagatccccatggattttttgcttttcctgtcacggatgcaattgctcctggatattcaatgataataaaacatcccatggattttggcaccatgaaagacaaaattgtagctaatgaata

SEQ ID NO: 10994 - DNA, 753 bp, Homo sapiens
gggcaccgggcgaggtcctggccacgagggaggggttctgggcacgcgggagggggtcctgggatttcgggcagggaaccgggcacacgtgaggggtcctggattatgccgacaagcccctggagaagcctctaaagctagtcctgaaggtcggaggaagtgaagtgactgaactctcaggatccggccacgactccagttactatgatgacaggtcagaccatgagcgagagaggcacaaagaaaagaaaaagaagaagaagaagaagtccgagaaggagaagcatctggacgatgaggaaagaaggaagcgaaaggaagagaagaagcggaagcgagagagggagcactgtgacacggagggagaggctgacgactttgatcctgggaagaaggtggaggtggagccgcccccagatcggccagtccgagcgtgccggacacagccagttctcggtggaacttaaaatgctgtgagacaccagacagacagatactgtgaacttggagctctctaatgaagggataccaaagtcttgtattcaatttttttttccttaaattgtcagccgaaaatgagagcacacctattcagcaactcctggaacacttcctccgccagcttcagagaaaagatccccatggattttttgcttttcctgtcacggatgcaattgctcctggatattcaatgataataaaacatcccatggattttggcaccatgaaagacaaaattgtagctaatgaata

SEQ ID NO: 10995 - DNA, 7611 bp, Homo sapiens
ggctggaggaggggagggggtgttccgttggtagcaaaacgcgaaccgctgaggcccgcagactcagttccaggatcctgggtgtgctgttcctcagcagaccctgccagggtctctgtgaggagggagcctggcatgaggaggatctcggagggggtttcccttagttctgtccctcccctgagaactgcgaggggattgggcagacctgtccggatcccgcctactcctgcctttctcactcccttgactctgccgcccaggaagagaagaagcggaagcgagagagggagcactgtgacacggagggagaggctgacgactttgatcctgggaagaaggtggaggtggagccgcccccagatcggccagtccgagcgtgccggacacagccaggcaagggtgcacttttagagactctcctggtgttcacagctcatcgttgtaaatgaggggtcggcaccgtgtcctgttgctttggggagaagcatgggagggaggagagctggtatttccagggcctcatcccaggtgtcctctggcctgaggtttcctccggtgtctctgaatgtctagagcaaggcgtggccagttaccactggtgcccttcagttttgttttttaacttgttagctaaggatggcttatatgttttttaagcgttcataaaaagaaacaaaaaggcatctccacagagaccaatcgtatgtgacccgcaaagcctagactgttttttgtctggcctttatgtaaaaagtttgccagccctgggtcttgaagtttggttttgtttgcacttaagacagtattggaacagtagccccatctgggtcagactggtaagagagatgcatgtcagtgaaaacgcaggtaattccccttgggaagaagggacctcgaggcccaaatggtgggtctgaagttgctgaaagtgaccataggctgagacaaaggaagctggaggcctttagtagaatctctgtcgtgggcaccatctgcgaaggatggcatttggctggaatttccagttgacaaggacttgccctctgagttctctttgtccccagccttcctgtgcacaactcacagtgatgaggcatttgtacctaagacaaggggtgtctcttcccagcaactctcagcatccagtggttcctggattatagggaaacagacggctgggctttgggacatgggacatcagggagtggggaggctagtgctgcgatcattcaggccgtcagaaactgtctgaggcctgctggctccactgaaggaaagttctggaaagctggtggccttctgagctcctgtggtcatttggctcttcaggcactttctttttttaatttatttttgaaacatggtcttgctgtgtcgcctaggctggagtgcagtgtcgtgattcactcctgggctcagataaccctgggctcaagcgatcctcccacctcagcctcccaagttgctgggactacaggcacgcaccaccacgccggccatttatttactttttgttgaattttaagggacctcaagtgaaataataatcggtgaattcaggatcaacctttatgtccagagcgtttgttccgtcgtccatttcttgtctagagtagtggtatgagctgaaaacattgctaagtgatcaccacatattgttgatgtaagggctaccggttattacaagagatttttatgactcctgctgtgggggtgccctttctacccggctgagcttggtgggagccaaggctgagtcggatgtatctttatatccccagttctcggtggaacttaaaatgctgtgagacaccagacagacagatactgtgaacttggagctctctaatgaagggataccaaagtcttgtattcaatttttttttccttaaattgtcagccgaaaatgagagcacacctattcagcaactcctggaacacttcctccgccagcttcagaggtaaaccggggcgtttctgaagagctagtgtctgggggggtgtggtgtcatcttttctgaggccttattccccacgccagcctcgtcagctgtgaaacagaccctgcaccttctcttggtgactcccagtccacttcggggtgcgtaggaagagttcatgaactcattagtggctcactctgaagtcagagtagagtgagggaagtcaaggctagagctgggacattgatggccgccaggatgcgttgggggaatttttattatatctgaaatacctatcacaataaattaaaagacgctcgtaacttttttatttttaagaaacaaaattcggtcagttgtatccaatttttggattgtaagagattttgtatcatttagaaatctagatttttccgctttaagatgtctttgctttcagaaaagatccccatggattttttgcttttcctgtcacggatgcaattgctcctggatattcaatgataataaaacatcccatggattttggcaccatgaaagacaaaattgtagctaatgaatacaagtcagttacggaatttaaggtaagttactttcattgcccgaagtaatcgtggcatagttctgtgtattcatgtcttgtgaagacttcattcaccttagatcatttctagtttttgagctttcacaggtgtttctgtgttcggatgatgttttacagacacagcattaaggaaatgattggtcgtgaacgttttctctgtgctttggtctagaaactaggtcaggttgcacgctgttagaagtctgtttcttttctttctaagttactgcgctggcgtaaataggacatgttgtttcaagcagtgaggtgtccggtgtggcacggcttgagactagacatttttaaaaacatacttctttttaattcttagttttgtcttacactaattgagcatttagtttttttagcatagtaagtttttctgtctcctgagtactttgctcttagctctgtttcttgctactggctgtgagaattagcaactgctcattggttttgcaacccaggggaagaaagcaaaacaaatgcttgataaagttggcattagtgtagtttagaaaggcattagatttctctcttaggttccattcccctggggaaagcttgacttttctattttatgcttactgaagggtttgctgactcacagaaacacaacagaacagacttaaaggagagtgggagaaaaggaaactcgatgagaggatcaggcagcgcctgagggtagatgttaagagcactccatgcccgaaagccctctgtattccctgcttcgggccccagtctggccattcctagcaacaaagtgagaaggggagcagcattcactccgtggagtgtccgcagtggagtcttcaggggaggggctccacagcctcgggccgggccctagggctgctggctctggaaccgggacttggggagggtccagatggcacgttctcagttagggtggccggcctccggggtcatgctccagcctgacgttggtactcacctttgagaggcctgtgctgaggaaactggcctctcataataaaatactgatgcttccgtattttcaccataaattacaaaataaggttgtccttttgtggggcaaagtctttttctagtagtttgagggaaccatttggtgacagaattttaaattcgattctgtggagaaattctagagatagaggctatcactgtgccgcacgcctgccttcatcccttgacttgcacttgaaagaatcgggtcgttgcttctcgttcctgtttatgttctggagaaatgcaagaagcgcaggaaacgctttttcctcacacagcatttgtatgtgatgcttagaaagaagttacaggcttggccaactgtttgctgtaatatttttcatgcaagaccaatgtgcaactaagaaaacttctcttaagttcttaaacgttatgtttagatcagagagcccagttgaattgttttctactcgattgtagctttttccttttggtctcttggtagtcatctagagctttgctgttgtctgtggcatttcaaacctgataagtctttcctgttttcttttcaggcagatttcaagctgatgtgtgataatgcaatgacatacaataggccagataccgtgtactacaagttggcgaagaagatccttcacgcaggctttaagatgatgagcaaagtaagaaactcactggcagcagcgagctacggaaagcaggggctctgccccccgtcgcttgtgcccgaagggagcctcacagtgaacacgtgctccatccacccgccaccctcatggtgttgccccctttgctctagggtagacgtccccggccgccctctctgctcatgacctagctgtaacatctcattgagggttggtggaaagttccgcatctcttgatcttaagcctgggtgtcaggtgtcagtcttgctggatggcagccagcattgcgggcttgttttgcgtgactgcctcactgaatccagacgggacatccttgtcttccttggccatcctgagtggcttcccagatctgtgccgtgagccaggctgcatgcatcccacgtaggagaaggtaaaggggaggtgcggcacctgccgcgctctggcggtgggtcaagcccccacaaccacctcccgctgctccgccgtggaaagttagctcttaggccaggtgaggctgtgaccatccccatcccatcccatcgtcacggcaccctggctgtgagggagaggtaaatccctgctgctctgtcctttctgattctaggagcggctgttagctttgaagcgcagcatgtcgtttatgcaggacatggatttttctcagcaggcagctcttttgggcaatgaagatacagctgttgaggaacctgtccctgaagttgtaccagtacaagtagaaactgccaagaaatccaaaaagccgagtagagaagttatcaggtaaaggttctgtggaaaccacatttgcttttggagttgagcaccatagccaggaaagcaggtgccttgtaggggagagtgagtgagtgagagaacggatgtcatgtcacatagacattcttggtgtagcttattctggcaggaggagtgtggccagacagcccctcctgcccaccggccacgtgcactctctgacccaggtgtggtacccaagcccgtccgatcacccctgcccccaactgctagtgactggtggtctctgtctctacacgccgttaagatcattggcccctccctcccctgcacagcgcctgccggcagccaaggctgtgcccttgtcccagactgtgccgcacaagcgggctgactttgggcagccagcattggcagggggcttctttgttgctgtggggcagatgcacactcctgaactgctcgcttctgtgtctgtgtagacgctggagtggagcaggtgcaggcctgtggtcaggaaggtgtggatgctgcgggggaagcaggtgaggactgcaggccacagctccctgtagctctgctccctcccacagggagcagccgacttggctggtccttcagggaaccttcttcctttttttctaaaccccagagtggttttcatgggggctctttgtctcatggtggctgagcattgagattgtatcaaagtccgtatcacacgtcattcctgtagacgctcctccacctatgtgaggtggctgcctgataggaccaaacaaagcgagagtatcgccaggggccttagaggcaccaagagcacttaacatagcctgcagcgggcagaagcgcctggcacagagcctgcttcatcacgtgtcacttgctgagtgcaggccccagagagcgcagtctcaggacatccaccctcatggccgtgtgtctgacagcactgtggctcgcggtcttcccagtatcctgagaggactggcctgttgccatcctggggacagatcagatttgaaggatggtttctgctgaagtgtattgcttttgtgccatcttgtgggaagtcagggaccgtctggagttggtactgaacgtccttgaggcaattgtgatggtcacggccctccattgtttgtttccttctcacatgtgtatgggactcacgtggatttaacaggtggggcggcagcggtgctgggctcggtgcttctgctctgagcagctccctccaaccgtcaaaagggagagtggtcttgagaccagcccctcaggtcctgcagccttggcttaggagacagggtgcgctgcgtggccagagtgtgttgcttggcaacggacgacagtcccctaaggcggtctccccacgtgcgttgcatttcccaccccgctgccgtgtgaacactcactgcgtggttggctggtggctgtgtccggcctcagcccccgactcgagtgtgctgctggccttcaggggtcggggtttcatggccgccctttgccgcctcatggtgactgagcatcgagggggaattgaagttggtgctggtcagcatgctcagctgcggtggggttgtgtcctggcagacccaccccaggttggttttgggtgtctctggtgctgcagcttcacccttgcctgtgggatccaggccctttagatggatccccagctgtcagtctgcaggcaggagagcgtgccgagctcaggcagtcaccttcacctagtgtcacagcagtgcgcatcggtaatgggctcacgcaggtgcctgagtggagcccctccctgcggagctcatggggctgtgactcctgtgtagggttgccaggttgtcactgtaggtcaggcaagggcagggccgctctcatgggcagggcttgtcctgggcctgcacctggccctaggccactcagacccatgcccaggcaagtgcccagggtgggaaggagcccactcgcttgcttctagaaccttccacactccttgggtgctacagcctgtgcccctcagctgttggagaactgcttcaggtggaacctgggaccacttgctgacgtccttgtgtgttctttgtgccacccagtggccacagcagagggggctgctgtccacccagcccagcagcaccagaccacacccgagcagccccgcctatcctgccttgctgtgaaccctgcgtagtcaggggtggcttttccagtcacttttctgatggggcctttaataactaaccagtgtgggcatctgttactttgttgcttttgttgctaaagcactttaactgagtttgcactgcgttgaaaaataggaagtctgtctacttggcttacacttaccctttattttaataaaagtgtcttaatttgtcatttggttagggtgaaaagggatgctttgagacctaaaaggagttaagtatgctctgccagctctgtgtctgagggcagggtcggtagaagctgggttaggtgccgacgcatggggagcaggtgtgcggtggggacgctgcctccaggtgacttggttgtccccacctcacagctgcatgtttgagcctgaagggaatgcctgcagcttgacggacagtaccgcagaggagcacgtgctggcgctggtggagcacgcagctgacgaagctcgggacaggatcaaccggttcctcccaggcggca

SEQ ID NO: 10996 - DNA, 1139 bp, Homo sapiens
ggctggaggaggggagggggtgttccgttggtagcaaaacgcgaaccgctgaggcccgcagactcagttccaggatcctgggtgtgctgttcctcagcagaccctgccagggtctctgtgaggagggagcctggcatgaggaggatctcggagggggtttcccttagttctgtccctcccctgagaactgcgaggggattgggcagacctgtccggatcccgcctactcctgcctttctcactcccttgactctgccgcccaggaagagaagaagcggaagcgagagagggagcactgtgacacggagggagaggctgacgactttgatcctgggaagaaggtggaggtggagccgcccccagatcggccagtccgagcgtgccggacacagccagttctcggtggaacttaaaatgctgtgagacaccagacagacagatactgtgaacttggagctctctaatgaagggataccaaagtcttgtattcaatttttttttccttaaattgtcagccgaaaatgagagcacacctattcagcaactcctggaacacttcctccgccagcttcagagaaaagatccccatggattttttgcttttcctgtcacggatgcaattgctcctggatattcaatgataataaaacatcccatggattttggcaccatgaaagacaaaattgtagctaatgaatacaagtcagttacggaatttaaggcagatttcaagctgatgtgtgataatgcaatgacatacaataggccagataccgtgtactacaagttggcgaagaagatccttcacgcaggctttaagatgatgagcaaagagcggctgttagctttgaagcgcagcatgtcgtttatgcaggacatggatttttctcagcaggcagctcttttgggcaatgaagatacagctgttgaggaacctgtccctgaagttgtaccagtacaagtagaaactgccaagaaatccaaaaagccgagtagagaagttatcagctgcatgtttgagcctgaagggaatgcctgcagcttgacggacagtaccgcagaggagcacgtgctggcgctggtggagcacgcagctgacgaagctcgggacaggatcaaccggttcctcccaggcggca

SEQ ID NO: 10997 - DNA, 28778 bp, Homo sapiens
gggcaccgggcgaggtcctggccacgagggaggggttctgggcacgcgggagggggtcctgggatttcgggcagggaaccgggcacacgtgaggggtcctgggtaggcgcttacgttcctggtagagggttctgggttcgaggctgcaagcccactcaccccggtcctggagactagggaagcatctgtgctggcttttgtgtggagctcagggagaagctgggctgccctttctcccgcctttccctccctctcccttgctcccgcagcagctccatgggtgtcagcgggcagcacgggcgcctgcaggaagtcaggcgagggtgaaccgaagtgctgggggtttctaggagggagatcgggctccggggttccaggtccctcttaatccatcttcttgaacgagtaatgtgaacaacatcccacagggcctctggtgaggacaccgtggctcgaaagggacctgaagctccctgcggaggggaagggagaacaaggaggcagtgacatgccgccactgtggtcttcccttccgtctttccctgctggttggcagccccgctgtactccttagggaggcctttccctcttagcaccttcacgtctcacctggctgcgtggcgtttgcacctgagcacgcgggtagaactcggtctgtgtctgtgcagattatgccgacaagcccctggagaagcctctaaagctagtcctgaaggtcggaggaagtgaagtgactgaactctcaggatccggccacgactccagttactatgatgacaggtcagaccatgagcgagagaggcacaaagaaaagaaaaagaagaagaagaagaagtccgagaaggagaagcatctggacgatgaggaaagaaggaagcgaaaggtaaaggagcagcggcggtggcccggacgctgcccacgaggagcccgtggggagcctggtcccaggacccaggcagagtgcgcctgcgtggctggaggaggggagggggtgttccgttggtagcaaaacgcgaaccgctgaggcccgcagactcagttccaggatcctgggtgtgctgttcctcagcagaccctgccagggtctctgtgaggagggagcctggcatgaggaggatctcggagggggtttcccttagttctgtccctcccctgagaactgcgaggggattgggcagacctgtccggatcccgcctactcctgcctttctcactcccttgactctgccgcccaggaagagaagaagcggaagcgagagagggagcactgtgacacggagggagaggctgacgactttgatcctgggaagaaggtggaggtggagccgcccccagatcggccagtccgagcgtgccggacacagccaggcaagggtgcacttttagagactctcctggtgttcacagctcatcgttgtaaatgaggggtcggcaccgtgtcctgttgctttggggagaagcatgggagggaggagagctggtatttccagggcctcatcccaggtgtcctctggcctgaggtttcctccggtgtctctgaatgtctagagcaaggcgtggccagttaccactggtgcccttcagttttgttttttaacttgttagctaaggatggcttatatgttttttaagcgttcataaaaagaaacaaaaaggcatctccacagagaccaatcgtatgtgacccgcaaagcctagactgttttttgtctggcctttatgtaaaaagtttgccagccctgggtcttgaagtttggttttgtttgcacttaagacagtattggaacagtagccccatctgggtcagactggtaagagagatgcatgtcagtgaaaacgcaggtaattccccttgggaagaagggacctcgaggcccaaatggtgggtctgaagttgctgaaagtgaccataggctgagacaaaggaagctggaggcctttagtagaatctctgtcgtgggcaccatctgcgaaggatggcatttggctggaatttccagttgacaaggacttgccctctgagttctctttgtccccagccttcctgtgcacaactcacagtgatgaggcatttgtacctaagacaaggggtgtctcttcccagcaactctcagcatccagtggttcctggattatagggaaacagacggctgggctttgggacatgggacatcagggagtggggaggctagtgctgcgatcattcaggccgtcagaaactgtctgaggcctgctggctccactgaaggaaagttctggaaagctggtggccttctgagctcctgtggtcatttggctcttcaggcactttctttttttaatttatttttgaaacatggtcttgctgtgtcgcctaggctggagtgcagtgtcgtgattcactcctgggctcagataaccctgggctcaagcgatcctcccacctcagcctcccaagttgctgggactacaggcacgcaccaccacgccggccatttatttactttttgttgaattttaagggacctcaagtgaaataataatcggtgaattcaggatcaacctttatgtccagagcgtttgttccgtcgtccatttcttgtctagagtagtggtatgagctgaaaacattgctaagtgatcaccacatattgttgatgtaagggctaccggttattacaagagatttttatgactcctgctgtgggggtgccctttctacccggctgagcttggtgggagccaaggctgagtcggatgtatctttatatccccagttctcggtggaacttaaaatgctgtgagacaccagacagacagatactgtgaacttggagctctctaatgaagggataccaaagtcttgtattcaatttttttttccttaaattgtcagccgaaaatgagagcacacctattcagcaactcctggaacacttcctccgccagcttcagaggtaaaccggggcgtttctgaagagctagtgtctgggggggtgtggtgtcatcttttctgaggccttattccccacgccagcctcgtcagctgtgaaacagaccctgcaccttctcttggtgactcccagtccacttcggggtgcgtaggaagagttcatgaactcattagtggctcactctgaagtcagagtagagtgagggaagtcaaggctagagctgggacattgatggccgccaggatgcgttgggggaatttttattatatctgaaatacctatcacaataaattaaaagacgctcgtaacttttttatttttaagaaacaaaattcggtcagttgtatccaatttttggattgtaagagattttgtatcatttagaaatctagatttttccgctttaagatgtctttgctttcagaaaagatccccatggattttttgcttttcctgtcacggatgcaattgctcctggatattcaatgataataaaacatcccatggattttggcaccatgaaagacaaaattgtagctaatgaatacaagtcagttacggaatttaaggtaagttactttcattgcccgaagtaatcgtggcatagttctgtgtattcatgtcttgtgaagacttcattcaccttagatcatttctagtttttgagctttcacaggtgtttctgtgttcggatgatgttttacagacacagcattaaggaaatgattggtcgtgaacgttttctctgtgctttggtctagaaactaggtcaggttgcacgctgttagaagtctgtttcttttctttctaagttactgcgctggcgtaaataggacatgttgtttcaagcagtgaggtgtccggtgtggcacggcttgagactagacatttttaaaaacatacttctttttaattcttagttttgtcttacactaattgagcatttagtttttttagcatagtaagtttttctgtctcctgagtactttgctcttagctctgtttcttgctactggctgtgagaattagcaactgctcattggttttgcaacccaggggaagaaagcaaaacaaatgcttgataaagttggcattagtgtagtttagaaaggcattagatttctctcttaggttccattcccctggggaaagcttgacttttctattttatgcttactgaagggtttgctgactcacagaaacacaacagaacagacttaaaggagagtgggagaaaaggaaactcgatgagaggatcaggcagcgcctgagggtagatgttaagagcactccatgcccgaaagccctctgtattccctgcttcgggccccagtctggccattcctagcaacaaagtgagaaggggagcagcattcactccgtggagtgtccgcagtggagtcttcaggggaggggctccacagcctcgggccgggccctagggctgctggctctggaaccgggacttggggagggtccagatggcacgttctcagttagggtggccggcctccggggtcatgctccagcctgacgttggtactcacctttgagaggcctgtgctgaggaaactggcctctcataataaaatactgatgcttccgtattttcaccataaattacaaaataaggttgtccttttgtggggcaaagtctttttctagtagtttgagggaaccatttggtgacagaattttaaattcgattctgtggagaaattctagagatagaggctatcactgtgccgcacgcctgccttcatcccttgacttgcacttgaaagaatcgggtcgttgcttctcgttcctgtttatgttctggagaaatgcaagaagcgcaggaaacgctttttcctcacacagcatttgtatgtgatgcttagaaagaagttacaggcttggccaactgtttgctgtaatatttttcatgcaagaccaatgtgcaactaagaaaacttctcttaagttcttaaacgttatgtttagatcagagagcccagttgaattgttttctactcgattgtagctttttccttttggtctcttggtagtcatctagagctttgctgttgtctgtggcatttcaaacctgataagtctttcctgttttcttttcaggcagatttcaagctgatgtgtgataatgcaatgacatacaataggccagataccgtgtactacaagttggcgaagaagatccttcacgcaggctttaagatgatgagcaaagtaagaaactcactggcagcagcgagctacggaaagcaggggctctgccccccgtcgcttgtgcccgaagggagcctcacagtgaacacgtgctccatccacccgccaccctcatggtgttgccccctttgctctagggtagacgtccccggccgccctctctgctcatgacctagctgtaacatctcattgagggttggtggaaagttccgcatctcttgatcttaagcctgggtgtcaggtgtcagtcttgctggatggcagccagcattgcgggcttgttttgcgtgactgcctcactgaatccagacgggacatccttgtcttccttggccatcctgagtggcttcccagatctgtgccgtgagccaggctgcatgcatcccacgtaggagaaggtaaaggggaggtgcggcacctgccgcgctctggcggtgggtcaagcccccacaaccacctcccgctgctccgccgtggaaagttagctcttaggccaggtgaggctgtgaccatccccatcccatcccatcgtcacggcaccctggctgtgagggagaggtaaatccctgctgctctgtcctttctgattctaggagcggctgttagctttgaagcgcagcatgtcgtttatgcaggacatggatttttctcagcaggcagctcttttgggcaatgaagatacagctgttgaggaacctgtccctgaagttgtaccagtacaagtagaaactgccaagaaatccaaaaagccgagtagagaagttatcaggtaaaggttctgtggaaaccacatttgcttttggagttgagcaccatagccaggaaagcaggtgccttgtaggggagagtgagtgagtgagagaacggatgtcatgtcacatagacattcttggtgtagcttattctggcaggaggagtgtggccagacagcccctcctgcccaccggccacgtgcactctctgacccaggtgtggtacccaagcccgtccgatcacccctgcccccaactgctagtgactggtggtctctgtctctacacgccgttaagatcattggcccctccctcccctgcacagcgcctgccggcagccaaggctgtgcccttgtcccagactgtgccgcacaagcgggctgactttgggcagccagcattggcagggggcttctttgttgctgtggggcagatgcacactcctgaactgctcgcttctgtgtctgtgtagacgctggagtggagcaggtgcaggcctgtggtcaggaaggtgtggatgctgcgggggaagcaggtgaggactgcaggccacagctccctgtagctctgctccctcccacagggagcagccgacttggctggtccttcagggaaccttcttcctttttttctaaaccccagagtggttttcatgggggctctttgtctcatggtggctgagcattgagattgtatcaaagtccgtatcacacgtcattcctgtagacgctcctccacctatgtgaggtggctgcctgataggaccaaacaaagcgagagtatcgccaggggccttagaggcaccaagagcacttaacatagcctgcagcgggcagaagcgcctggcacagagcctgcttcatcacgtgtcacttgctgagtgcaggccccagagagcgcagtctcaggacatccaccctcatggccgtgtgtctgacagcactgtggctcgcggtcttcccagtatcctgagaggactggcctgttgccatcctggggacagatcagatttgaaggatggtttctgctgaagtgtattgcttttgtgccatcttgtgggaagtcagggaccgtctggagttggtactgaacgtccttgaggcaattgtgatggtcacggccctccattgtttgtttccttctcacatgtgtatgggactcacgtggatttaacaggtggggcggcagcggtgctgggctcggtgcttctgctctgagcagctccctccaaccgtcaaaagggagagtggtcttgagaccagcccctcaggtcctgcagccttggcttaggagacagggtgcgctgcgtggccagagtgtgttgcttggcaacggacgacagtcccctaaggcggtctccccacgtgcgttgcatttcccaccccgctgccgtgtgaacactcactgcgtggttggctggtggctgtgtccggcctcagcccccgactcgagtgtgctgctggccttcaggggtcggggtttcatggccgccctttgccgcctcatggtgactgagcatcgagggggaattgaagttggtgctggtcagcatgctcagctgcggtggggttgtgtcctggcagacccaccccaggttggttttgggtgtctctggtgctgcagcttcacccttgcctgtgggatccaggccctttagatggatccccagctgtcagtctgcaggcaggagagcgtgccgagctcaggcagtcaccttcacctagtgtcacagcagtgcgcatcggtaatgggctcacgcaggtgcctgagtggagcccctccctgcggagctcatggggctgtgactcctgtgtagggttgccaggttgtcactgtaggtcaggcaagggcagggccgctctcatgggcagggcttgtcctgggcctgcacctggccctaggccactcagacccatgcccaggcaagtgcccagggtgggaaggagcccactcgcttgcttctagaaccttccacactccttgggtgctacagcctgtgcccctcagctgttggagaactgcttcaggtggaacctgggaccacttgctgacgtccttgtgtgttctttgtgccacccagtggccacagcagagggggctgctgtccacccagcccagcagcaccagaccacacccgagcagccccgcctatcctgccttgctgtgaaccctgcgtagtcaggggtggcttttccagtcacttttctgatggggcctttaataactaaccagtgtgggcatctgttactttgttgcttttgttgctaaagcactttaactgagtttgcactgcgttgaaaaataggaagtctgtctacttggcttacacttaccctttattttaataaaagtgtcttaatttgtcatttggttagggtgaaaagggatgctttgagacctaaaaggagttaagtatgctctgccagctctgtgtctgagggcagggtcggtagaagctgggttaggtgccgacgcatggggagcaggtgtgcggtggggacgctgcctccaggtgacttggttgtccccacctcacagctgcatgtttgagcctgaagggaatgcctgcagcttgacggacagtaccgcagaggagcacgtgctggcgctggtggagcacgcagctgacgaagctcgggacaggatcaaccggttcctcccaggcggcaaggtagtgctctgtggccaccgagagagggtgccacgtggccccagactctctgtgtgcctctccttctgggttggtgctgtgtgatctagcacagccaccgggatccagaggtcagcgtggggccctgacgggaggtccggatcagacacacataaggctggtctcttcagtcggggtccaggtgcctctggcagggctgccgctggtgtttcatgcatcgtggaggccacgtggtcactgacctcatttccttgatggaggccctgctgcaggctaatcctttctcttggagtgaatgctgacttctgtgtctctgtcactgggtgttgacgtgaggcaccgcccttgttattccagtgggggtgctggtgttggatccgacagatggtccataataggccaccgactgtgttcacgtggctcctgccacagatggtctttgtggtggtggggcccactcagctgaccacgctctcctttctggcaggagacgttctagacccagtgtcttcagtggaaacagagcacaggctgtctgcagtctcaggcttcctagcagccctgataagagaagtagagcaatgcaggtgacattaatccttgcaggtttcatttcacctctatatccaacattttatctcaacatgtagtctgtagaaaacgttaatttgagctttatgggtttttttcatattaagtcttcaaaatgcacatgggatgggatgtaaagaacgctgaagtgggggcatttcagaggtgtctgctgctttttgcctgtgcctgctgggaagttgcagtgctctgtgtggcttgcgtgttgcgaggttgcggtctgcgtggctcacgtgttgggaggtcgtggtctgcgtggctcacgtgttgggaagttgcagtggtctgtatggcttgcgtgttgggaggttgcagtctgtgtggcccgtgtgttgggaggttgtggtctgcgtggcttgtgtgttgggaggttgtggttcacgtggcttgcatgttgggaagttgctgtggtctgcgtggcttatgtgttgggaggttgtggtttgtgtggcttgtgtgttgggaggttgcagtctgcgtggctcgtgtgttgggaagttgctgtggtctctggcttatgtgttgggaagttgctgtggtttgcgtggctcgtgtgttgggaggttgcagtttgcgtggcttgcgtgttgggaagttgctgtggtctgtgtggcttatgtgttgggaggttgtgggtttgtgtggctcaagtgttgggaggttgtggtctgcgtggctcacgtgtggggcggttgcttggctcgcctgttgggagtttgtggtttgcatggcttgtgtgttggaaagttgctgtggtctgtgtggcttatctgttgggaggttgtggtttttgtggcttgcgtgttggggggttgtggtctgtgtggctcacgtgttgggaggttgtggtctgcgtggctcacgtgttgggcagttgtctgcttggctcacgtgttgggaagttgtggtctgcgtggctcatgtgttgggaagttgtttatgtggcttgtgtgctggaggttgtggcctgcgtggctcacgtgttgggcggttgtctgcttggctcatgtgttgggaagttgtggtctgcgtggcttgtgtgttgggaagttgtttatgtggcttgtgtgctggaggttgtggtctacgtggcttgcactgtagttcttttggacagccttgttctgcagtctgtgtttcagccctggaattgccacattctccaagaagccctggtttcttgactagagagccttgtgtagaagccaggacctgggttctgggtgaagccctctgcagatagagctgggagatgcctgttgtgtgtgtctgcaccacatacatggacactgtgcagagggattctgttggcacctgtgtttacatgggttgaaaactgtttttacacggaaacttccagttccctcgtgccccgtgggttccgcccacttcttccctttcagttttgtatctgcgccgtgaggacttgtctcctaatcttcgtatcaactccgtgtcccattgagctgaccttccgcctctcccccagggccctggccatcctgtgggctctgagactttgcatggatccgcggtggggagctgcccccacacaaacgtccggctcttctcaggccaggtggctgccctgacatggcatgatgtccagcgcatggacgtcacccttgcactggagcccagccaaccgctgcatgacagccctcttcccccttgaaccccaagtctgcacacaccagtgcctcctcttcctggatcctcctgatggcctgtacacagaactggggtgtgggtggtgggtttttaaatgaaaaccagtccacacatgcttgagggctggagccgcctgccgtcagggcagtgccatgctgacctgctgaccgttccattttgtcaaggctcatgagcaattttaaatgtttactcgtgggtgaaggtttttgtttcagctgtaccccctatagcagggccatggggagcctaagaggttctccttggcacctgtgcgcgctctgctgttgccggtgagtctgaaattccagggaatgccgtgaggggccctctggcgtttgttcttggacaaatgtgctttcacccccattaagccctgcttgttggtcttcatttcatttgtgctgcgctgcccctcctgagggacagacgctcaggcagtgcttccttccagatgggctatctgaagaggaacggggacgggagcctgctctacagcgtggtcaacacggccgagccggacgctgatggtgggtgcccgctcagggctggctttatgctctccgtacactgctttttgggcctccgttgatattctgtaatgaaaagctgagccatggccatggggcagcatgagaggctgcccggcttcccgaccttgctcgcaccccaacgtgacacgtgcgctgagtggaggtgtggacggccatctcgcggggcgggggtgctggtcagacctcggtcagggctccttgggagcagcgggactcgagccatgttcctgaaaagctgccgagaggcctttaaggccaaacctcactagcatcaggaagggttcacatcccgagctcagtcttcagcaaagaccagagtgctggcccaccctgctccttgaatctggaaagcagtcttagaagagctgttagatgatgacgtcaggacagtgttgaaggatggtgcacactaggcctgtccagcccgtcaggggcactttgttggcctggaagtaattaagaggcttgtcctttgaacgaaagtgtgatcacttgggtttgaaacgcactcgcgggctcgcgtgaggaacgtgcagcctggcacgggttgcctctagattcctgcttccctcgctctcaccctcatgcctgctggtggtctttcacccagctccaccatgccagcgtggttttctccagtgtgtgaaggatagaaacgggctgatctatataatcttcagcttattttcctaaagaggatggaccgttgatccatatttagcttatgagagtgttgagaccgaggcagcggttgggaactgaggaactcctgctctgatcccatgagtggtgtgtgggtggtgacttgagcatggcagacatgctgtcagatgcacgcgctccaggtacacgccaccgtttcgctgttagaacacgcaggacaagatttcttcttggagttgttgagtgatccatttgaaaatgttctcaaagtattgctggtgtggtggccaaagatgtggtattttttattgtgttgactttggggtgataaagaaatgaaattgaaatgcagttagttttgagaatggtagttggcttttgcaaatttgttttcaggtgatcattataaaatccccccacctgcaccaatcacatccactgtgatgtggagaaagggctcatggcactgcactggggcaccgcgttggggtcacacctgccactcacggcccgccatgtccgtgttgcagaggaggagacccacccggtggacttgagctcgctctccagtaagctactcccaggcttcaccacgctgggcttcaaagacgagagaagaaacaaaggtaaatccatagtcccgtcccaggagccagccggagcagggaaggtggcaggggtttagtggagtgatggcaaatgctgctgattcgtacttcagagtttcctcactgtacctggattcatgttttcacatgggtaagattgagatcagttacagtgacaggaatgaaactcgtgttggatggggacacacacagcgggcaccttggttgcatcactggacttcaccttggtcagtgttttggggtccttgtgtttctgtccctgtcgcattacagaacatcccttcaggggtcagaatgtgtggcccctgggccttgggtctggcctgtgtgttctctccatctgcactgctgcctcctggctgcgctgctgctgggacctcctgcatggccccaccctccacttctccacctctgctgggtccctcccatgcagacagctgcatggacactgctcctgccggccctttctgcctcagccactcacaccatctgctaatgggacagctcactcttccctccaaaccatggccttggctcaagagcttccttgtttctggaatgttctttcctccagctccaggtgttgaaattctgcctggtctgggtctcctgttgaaggacgccctccactgggaaggatcctcttgccttcaccacttgtcttcaccagcccctgctcccctcttcctcttggggctgttgtggttgttgatactttttttttgttgtgtttgacacacatcttcttctcaccctctaacacagttctcaaccacagcacttttgtccctggagatgttggcagtgtccagaggcgtgttgatggtcccactggggttgggggtgctgctggcaccagatggtagggagatgccaggggtgctgctccacaccctatgggacactgcacagtacacctggcctgtgtcccccacagcgagagctggccctgggcaggcgtggtccctgcggtgtgtgttggttgggatcctccacagtgacagacggtgcgctctgcccacgtttccacacagctcttttgcttgtggagctcacccctttgcagagagctcatttccctgcggtctttggcctgcagaagtaaaatgaggggtggtgaattacacccctgctggttacacatggaaaactcaggagtgagaattttgtggagagcaagagaggtgagactggggtgctggctgccagccaggcggtccctcagcccctggagaagcggggtggggcctgcacaccgagtccttccagtgagtccagtgatgctctctcctcttcctcccagtcacctttctctccagtgccactactgcgctttcgatgcagaataattcagtatttggcgacttgaagtcggacgagatggagctgctctactcagcctacggagatgagacaggcgtgcagtgtgcgctgaggcaagtgtcggccccggggagcccttggctgctgtgcagcttgagctgtgccctggtgtgggacgtggagtcccacatgtgtgcgggtggggagagagccatcttgcagccgtccatatggcagcctgggtcttcccgttgctttcagtcatccacacaggtctgccacaggccagtcctgaaatctgggtaactcagtcagaaggtggtgatcagggcgtagcttgtgaaggggttgggggtgtgttgagcacactggatcgtattgaattgtgtttcctaagtgaccgtgctagctcaggctgcagtgacaaagcaccacagactggggtcttattcctgggggctggcatttgccatgaaggtgtgggcagggctggttcctcccgagccctctctcctgggcctgcaggtgccgtctttccgtcttttccctgtgccttcccggggccatcctgcgtgtgtctgtgtcctcggctctcctggagaccctaccgttctcaaggaccctggtcatattggatcagggccaccctaatggcctcatgtcactgcagttacctctaaaggccgttaaagtccccagctccaagtataatcacattccaaggcactggggtcgggatttcaacttacgaactctgagcgggagatacaattcaggccatggcaggctaaagtataatactaaaatcacaaatgtagcagcctgcttttccgtagaatgttgctgtgtgtattttttgttttctgtggcaaaataaaagtgggtcactcttgtaaaatttggcagtttttaatggagaaagcaacttaattttgctagcctttaagaaatggcatcttgacatatcaggtcttcattttattccaacaagaatgcagaatatgttttaaaaataaacaagaatccccttagtgcttcataaaataagtgaaaacctgaccctgatttttgtagcaaaaaatgaagtaaacgtggaaaatgaagaggaaattctagtaggagacgatggggtcataagtcagaaattaaagagttgtttgctccccaccctcccgccagccctcacctcacccctgctgtggggcctctgcccagcctgggccaaggccgtggctcccctggtgccatcctgtccgcagtcggctccctgtccacggcgtgtggctccttcaggacatcagtcacctgttgtccatgtggcacatcagtggactgtgcacaccccccgccttccccagctgtctgtccctagaacgcatcaggttccatgttgccgtgaagaaagatcattctgaccccgcctgccttgtggctgcaggggcaacactcagaagcacatctcctagggcctggcatgaggctacgtggtcccatgccagcctcagcgcacagacacccagatcctctgcccctgagtgctgcttccgtgcacgctgcgagtgccgagcttggcctgtcccgggctgtgggtgttttaacaaagacacggagtctccctgttgcctcctgtgaccgtggttcagcttctgaccagcagccatccttgttcctctctgtgaaggtctttggagtctggggagcccttctgaggcgcttgcttggtgctttgattctaagactatgcatttttgttcctggcctactttttagattgtattatattttattttttaagctgtttcatgtatatggccaagaatcaggatggtactaaaaggagtgccttggaagtgtcggcccacccctgccccacgcgcccattcctcaccggcaggcactgcccactggtgtgcttctgtccacacccacttgtgtttttaaacgcataacgagtggaaagataggagtattcttttacagatgataacatagcacacgtgtgtttctaggctgtgtgcatgtgtattcatgcttttctccctctccccactgagatctttttaacctttttgggtcatggaccactttgaaaatctaatgaaaactatcagccactccccacaaaatacccgctctgggagggtcacggggaccgaggagctgcgctggcacggcaggcttctgtgatcagggctgccgcgagggccaggcgacaagggctcctttcagcgtaccttctcccgcggcccctctagcctgcaggagtttgtgaaggatgctgggagctacagcaagaaagtggtggacgacctcctggaccagatcacaggcggagaccactctaggacgctcttccagctgaagcaggtgggctgcactcgcaccggggttggggggcaggtgcccttggggtgctgctggcgggaagagcctgcagcctgaccaggctttcggggacgaggagctgtcgcagggactctgctgccggctcctcgtcaggatctgcgtgcttctctgcacgggcaggtgtcccccggagaccgtgactgtgtgctcaccactcccagcgcactcgtaactctctatttccatcttcatctttcatctctgtcactttccttcatcctgaagagtttaaaaaaatatttcctgtagttcagatttactgacagtgatctctcagcattggcttctctgaaagtctttatttcatcttcatttttgaaattcattttccctgtgtatggaattttagatgaccttttttcccatctactgtaaaataggtttgacttgcattgttgctataaaaaagcatctgggccaagcatggtggctcacacttgtaatcccagcactttgggaggccgaggcgggcagatccaaggtcaggaggtcgagaccatcctggctaacacggtgaaaccccgtctctactaaaaaatagaaaaaattagctgggcgtggtggcaggtgcttgtagtcccagctactcgggaggctgaggcaggagaatggcatgaacccgggaggcagagcttgcagtgagccgagatcatgccactgcactccagcttgggccacagagccagaccccatctccaaaaaaaaaaaaaaagcgtctgaagtcattgtcatctttgtttcccacatgtgacgtgtcttttcggccagatctgacctgaagtctgcttttgtacagaccacaagccaggaatgtcttttacatctttaaaagggtgtttacagaaaagaaaaggaagaagaagatgcttcgggcagcgtgtggctcacagagcctcggctgctcactcccgggccctcggcaggacgggatctggccggtgctctaggagcttttgaacttttatctttctttatcagtgattttcagcattgtattttccaggtgccttggtgggcttttctttgtgttctacttagcatttgttgtttcttggatctgtctgtagttttcatcatatttggaagatttttagccattactcaaatgtcattttccaccactgcctcttcctcctcctgctggactgtggcactctgaggacagctcgtgttatctcacatggcaccgacactgtgctgccgcaccaggctgctgcagattagtttctgatgctgttggctaagttcactcacctgttctctggccacacctgaacctgttatcccagatcagttttcactgatgatgtcgtcccgcgctgctcatcacttgggctccatttgctgcttttgtgtatcttctctcatgttgtgtgtatgtttttccttacatccttgagccacgttcgtatttattgctgctgcttttgaagtcctcagtcactgagtctgtcgcctctgccgtttccggttctgtttctgtttgacactttgctgcacttggagctgtgggccattgtgcacgtgcctggtggacagtcctgaccctcgctgtctgataaaaaagcactggccacatggccgctgggaaatttgaatgtggccagtctgaatttagatgtgatgtgtgagctacaaactagatcttaaaaaactaatgcaaaaaacgtaaaaatatgagtaacgatttcttatggcccacatgttggaataaaaacatcttcaataaatttgtctaagtaaaatgcattagttaattgaatgttaagagtaattttaatgtggcagctagaattttaagagctgggtatggtggcatgcacctgtcatcagctccacaggaggctaaggtgggaggatcacttgaggccgggaggtcgaggctgcagtgcgattgcaccaccgcactctaggcaatagagcaagaccctgtctcaaaaaaaagataaaaaaacatttagaacgaggcgtgtgctcgcgttatgtctgctgggcaaggctgatctgggttctttctctctttcagagaatactgatgatcattttggcagttgttacttgtggataatggccggatcctaccaggcttgtctggggtgggtccagggcagccttattctagggttcgtgtagccttaatgctaaggagtggcccttcggggagccctgtcttttcagcgtggtctctgctgtgggtggagttcggatgagtctctgtccttcccaggctctgagaacgtttggctcatggctcccaaggaggggtcagtcccttgacctgacggtttcatctgtgcttgttacagatgaactggggtccacatgcctggtgcagtaaacccagacacccatgccgaggttttgtcatagaaaggacgtgtgtatttgcagggcgccaagcaaggtgggccaggaggctcatgtataaatcctggcctcccccactggctacaggcaaggcttgtaaagcgggggtagatctcaggaaagcagaactgaaaggcagagtcgtgcataaggacacagaggttacatgtcggcttggcctagaagggcggtatctgcaagcagggccttataggttataggtggattcaaaggttttctgatttgcagctggttaaggaggagaagctttgtttaaaaatttggggtgaagagaaaagaatgttagcttaggcttgtgggtgtggcttcctccaggcccgtcaggaagaaattcagaacaaagaacggggtcagagctcagtcttcagtttctccttatctgagcccttcatgccagtagattagtttgttggggaggtcctaggtggagggtccaggtttctgaaagacaactcagggatatacattaagatgttatctttactttctttctttttttttctttttgagacatagagtctcactctgtcacccaggctggagtgcagtggcgtgattgtggctcactgcaacctctgcctccctgattctagcgattctcctgcctcagcctcccgagtagctgggattacaggcatgcgccaccacacctggctaatttttgtatttttagtagaggcggagtttcgccatgttggccaggctggtctttaactcctgacctcaaatgatgcatccatctcagcctcccagagtggtaggatgttgtcttttctttctacagggaacagtgctgggaggttgtctttactttctacagggaacaaacatctgtctccaccttccttgactgttgttttaggatactgttaccttcttgcttatcaagtcgctgatttacttctcagagttatctaagtaactggaatttcccttgaaggaactcaagattttccttgatttccatgcttggagggctcgcaggcccctgaagagagggttgcagccaggcgggagtccccaagcagatttctgcagctctgaggagcagccccctctgcagagcctgccccaccagctcgtggttctgactctgagctctggtcaccctcccgtgtcgtggcctgcaggctccttccaggcaggaagctggcccccccaacacagcgttagaatcaggcattgctgtggggtagggaaagtgaccccctcacagcccggaaatgggaaggctctgtggtttcctctctgggttccagttagattcctttcgggaaagtgaacttggatatggagttgagtgaccccgagtgcacccccgcagtaaatgatgctcaggactaaagtgactgaaggcttttggggaaacagatgcgaacaaaacagcagtattcattttctaattaaaagcttgtgaaaatcgatgtcattgaatctgagaaacattatttcgaacaaagatcacacatgatagagtgcatatactacagcatcgctccaccggagcacaggacgggtgtgccacggaggccgacagttgtggaaggagacaatgcacggcccggcccacctgctgcaggcaccgccaggaggtgtctgcctccttcgctcctgcgcccacggcaggcccacctgccacaggcactgccaggaggtgtctgcctcctttgctcctgcacacacctgcccctgcaggactcgagctggtctcaggcaactggtcatattccaggtggaacccacgagacccttcttatcctaagcttcccataggatctaggcacatcttttttcttttgttttaagccacccaaggctgccgaaacagcatcggcgtcctctctctgtccgctccatctcgccctgtggagcgctgtccccggcacacaatcctggcgctgaggagggggctgggcgtggttgggtcagtgactggtgatgaagaaggtttggaggacccccagccttaatccattaagatggtgtgactggggagcagaattcgcagaagcgcacaagccatttttacgtgtgtgtaatgtcagcgaattgtccgtttctatgaaatcactctggaaaaactagtttctgtcctcatttacttttcagagaagaaatgttcccatgaagcctccagatgaagccaaggtaagtttttgaacatggaagggcaagccaaatattattctcacagggaaagttgtatccagcctttgaggtggggaggtctgtgtgtatgacggcgtttagaaatggagtccgtttctgatcagtaagatcaatagtgtttctcctcctcttttcatgacttgaggtgagtggtgtgaagccgcagtacattcttccaaatccagaaatgggtagtttcagagcagttggccccgctgggtgctgtccttgtgggacacccttgcaagggttgggcaggatgggccttctcaggacctgcttggtgagtagcaggtgttgtcccaagcacagtgggctctggggccagtgctggcagggcagtgctgtgagcccagactgctgcacctgccgattggcaggtgtgtgtctctgacagtcagcaggcatgggcttgggctttggtccagggtccctgggaacctggagagaccccttaacatctgtttgagggcagaggccgagctgcagggagctgatgagagagtatgtgttagggtggctgtagtctagccctgaggacacgccttgctgggaaaggaaagggaacgttgtgtgctctgtgaagtgcctgagaaatagtcctggaccctaaaattctgtgtgtcttcctgttgcataatgtccctccccaatttctttagccccaaaaagttaacaaaggattgttagtttgcgttgttggtctcagtaggtttttctttgacatggatttgcatatccattcatgagctccaacctgacagtcccttgaacagcagcctcagtgaacagggcttggtcttgtcacttactgaggggtgggttcacgtttagcaaataattagagtgatttcaatagcgagtgtgaagtaacatttcgtttttcgtttgatgtttgaattgctcttgatgtgtgtctgtctccacaggttggggacaccctaggagacagcagcagctctgttctggagttcatgtcgatgaagtcctatcccgacgtttctgtggatatctccatgctcagctctctgggtgagttgtaacaggcactttcccacagcacctggtgaaggtgtgatagaggaagaaaacacacggcctccacctcctctcccttcctgactagacagggatgccaggaaaatcttttgttacggtatttggtctttgtcccaggtttttggaccatagctcctaaaatccttggaatctcctgagtgttgtgtcttttttaagctaatgagaagtggttgcagcccctgggtaacctcaggatggggtctggccgatccccagtggctgtggatttcatcagtgttgcctaccgcctccatgaaatcccaaaaggtggggttccctagggagcctcattgctggacgcctggaggctctgggaagaaggcagccccttcccacgggtcccctctgcatcgctcccacctggggcccatccgtaccctgggtgacaccccgcagaataaatgggtaaatgtcagcctagtgtgtggacagaagagtcaaactctgcagggtatttagagaggtttcttctgagtgaaatacgaagaccgtggctgtgacacagtcccaggaggtcccaagaacatttgccgaggaggactggtctgcagcttgttttgatatgttttagggagacagaggacatcagtcagtacatgtcagttgtaacagtggttcgtgttggaaaggcgggacaacttgaagcgaggaatgtcgggtcgttggtggattcagagatttcctgattggcatttggttgaaagggttaagctctgaagagctgaagtcagaaagaaatgtgcatggttaacataagcagttgtagaagccaaggttcttgtcacatagatgaattcagccttcaggtagcaggcttcaaaaagagtagagtagatggcaaacatcactcatgaggccctcaaaggtaccagattgttagttaaatctctgttgggtcaggaagagacttggaaggggcaggagattctctacagaatgtagatttttcccacaagatacagctttgcagggctatttcaaaatatgtcaaagggatatattttgagataaaatactcagtttctttcagggcctgccatctatcacgtgatgctgtactaaagtcggatcggaatttggtgtcttattaccacggagtctgctttgtcaaccttcagatttctgttttaaagttaatgctggtcagctgtgcctgaattccaaaagaggggataatgaggcaagtccagtcccgcttcacatcatggcctgacctcattttccaggttgactttggagtgcccttggccaagagtgggaatccgttcagtccatggggcttagaattttatttttcatttacagatgtttccctgacttctgtgagtcactctaggaaattcatagagctcaagtctggtcttctgggaaccccatttgatagctggttagtcggaagcacagaccacagcctggggctttcagttggcatcagccggtggggccatcctggagactgtgccctcacctgggaggctgccggtgcagcgcccccgagctgttctgacctccagcagcatttgtggtgcctggatccatgggtcccactgctttgcgtggtgacgttccacctgtctctgctggctctgttcaggcacttatggccgtgatttattataggggaagggtgccaacagcagcagagggacaagagtgacatccaaggaaacccagcgtgaggcccagatccactcccagcagaggcacatgggacacgcttaattcccaggagtgagctgtgacaacacacgtgaaatgcccaccagggaagcccgtcagaggcttggtgctcggggtcacagggcacccccttgccaggcaggtaccaaagtccagaccccggagggaaggtgaactttagcataaaccactctgctcctgttgttggagctgtgaacaatccctagcactgggggggaccccagatgccagccgtggctggccttgccttccaggggaccctggccccaggccgctgtgacagcacttttctgcacagcagctgtttttctcagcacttctaagattttgtccttattactacttctcagcagcttggtgctgatgggctttggtgctgatgtgctgtggtgtgttagtctgtcctcacactgttataaagaaccacctgagactggtcattggtgaaggaaagaggtttaattgactcacagttcctcaggctgtttgggaggcatggctgggaggcatcaggaaacttccaatcatggcggaagatgaaggagaaacatgcatgtcttcacatggcggagcaggagagaacgcaaagggggaagtgctttgaaacaaccagatctcatgagaagtcactcactatcatgagaacagagaacagcaagggggaaatccatccccatgatccaatcaccttccaccaggaccctcccctaacattgggaattacaattcaacatgagatttgggcaggaatacagagccaaactgtatcattctgcccctgactcctctcgaatcttttgtccttttcacatttcaaaacacaatcatgccttcctaacagtcccctaaagtcttaactcattccagcattaactcagaagtccacagtccaaagtcttatctgagacaaggcaagttacttctgcctgtgagcctgtaaaatccaaaacaagttagttaattccaagatacaaatcgggtacagacattgggtaaatagacctatcccaagagggagaaatcagccaaaacaaaggggcagcaggctacaaatctgaaacccagcagggcagtcattacatcttgaggccccgaaagaatcttctttgattccttgtctcacatccaggctacactgatgcaagggatgggctcccacggccttgggcagccccgcccttgtggctctgcagggtacagcctctgtggctgctttccctggctggtgttgagtgcctgcagcttttccagatggcatggtgcaagctgtcggatctaccattctgaggtctggaggacggtggcccttttctcacagctccactaggcagtgccccagtgggtactctgtgtggggtgagggctccaacctcacatttcccctctgcactgccctagcagaggttctccatgaagggcctgcccctgcagcagacttctgcctggacaccctggcttttccatacatcctctgaaatctaggtggaggctgccaaacctcagctcttgccttctgcctacccacatacccaacaccatgtggaagcttccagggcttggggcttgcaccctctgaagcatcgacccttttagccctgtaccttggccccttttagccatggctgggacacagagcaccatggcacatgtcccagtgcttcacagagtagtggggcccttttccctcctagacccccaggcctgtgatggcagtgtctgggcaaaggtctttgaaatgtccctgaggtattaacatttggctcctctttacttacgcaaatgtctgcagccttcttgaattcctccccagaaaatgggtttttcttttctaccacatggcaggggtacaaattttccaaacttttactctctgcttcccttttaaatataagttccagtttcaggtcatttttctgtttgtgcaagtgagcataggcttttagaagcagccaagtcacctcttgaatgctttagtgcttagaaatttcttccaccaggtgccctaaatcatctctctcaagttcaaagttccacagatttctagagcagggtcacagtgctgtcagtctctcctaaagaatagcaagagtgacctttgcccccattcccaatggggtcctcgtctccatctgagaccacctcagcctggatttcactgtccatatcactatcagcatttgaatcatagccatgcaggaagtctctaggtagttccaaactttccctcatcttcctgtctttaagttctcccagctgttctagcctctgctcattacccagttctacagggcatgtctgtagtcactgttactacactttgtctactgattccctgatatcagctttgagtctctcctagtttggggctgtgttttcctgctccttcgtgtgtgttggaatcatttactggataccaggtggagtttgtagttgatgccgttgggtgataggtctgcttacacacctttgaggcctggcggcctttgttctgagtttgagaagtggcttagactctgtgggaccttccccaggcattgtcagggtaagcccagagtcaccccggggagggtgaagctggtcccctggctggtggggctcaggtgaccacagacctgtgtgcaggttcttggcatgtctggtgcacagttcaggagtgggctgggagctcatcctttccacctctcagctggacgtgctgggtccccgatggctgtggcctggaacctgctccacagtgaactgggcgggtaccagggtctgccggcctcttgcaccctccatccagctgtctggcctttgtgtgttgaggacaggagcccacaccaggcccatcctgggttgtggccacatccctccacggtgtctgtgcgtgccatgacgtggtctgtgcggtgctaggtcttgtctgatgctttgcttgagcaaaggacgctgggtgtctgccttcccttcactcactgctaagggtaatgtctgtcctccaggcctgtccacctgtctgctgtgagctcgtccactcagtttccagagcaattattgtcctgagcagagaggcctgtctggatgggcagtgtgctcctgcccttagggtagacgggccggctgagctcagccgacgtggggtcatgtcctgtttacacagggaaggtgaagaaggagctggaccctgacgacagccatttgaacttggatgagacgacgaagctcctgcaggacctgcacgaagcacaggcggagcgcggcggctctcggccgtcgtccaacctcagctccctgtccaacgcctccgagagggaccagcaccacctgggtgagatgcccccacccacgccgcatccccagagaccccagcacagtcagtgtgacgtctagacgaggtagtgggcagcattgtagttgtgggaaggctggaggctgcatgggcagcggtgctgttgtggaggtcggtttccacagatgtccttgggtcgcggcctcggtgcagagccggagcggagctgggatgctggcctggccgcacgctgggttacaggctttctgccagataccgtccccagttctgtccacccctgtgccctctgtggaccctggttccagtgtttctgctggggagagagcatggcttccttggccatgtgtcctggagtggttttggtgggtggggttttgttcccacttgtaaacactggatcactctgtcggcagagtgaatcttggcagttcttcagctgcagaggtttagctgcaaccatctgcaaaaaggccggtattttcgattccattgaccttgtgatcagggtgttaacagtgcatggagcaggctttggagggccgtaggtcaaagtctgaggcccccgatatcccagtatgactttgggaactgccctgaggtctgggctgtgtctgagggactcctggccaaggagcgttctctccttcagaagcagcatccgtgctgtgtgctgggtcagggcgacccctggctccagggtctctacacacagctctccttggcagggagtgagaggtgcccctgtgtcctgggagtccctgagccctggcggtaggtcaggaagcagaccttgggctccaggagccccacgtgtgctgcgggtctgtcctgtgtgttgaagtcctgtgttctgaaaattgcaggaagcccttctcgcctgagtgtcggggagcagccagacgtcacccacgacccctatgagtttcttcagtctccagagcctgcggcctctgccaagacctaactctagaccaccttcagctcttttattttatttttttagttttattttgcacgtgtagagtttttgtcatcagacaaggactttgatcctgtcccctttggcatgcgggaagcagccgcggggaggtaatgaattgtctgtggtatcatgtcagcagagtctccaagccccacgaaccctgaggagtggagtcatacgcgaaggccatatggccatcgtgtcagcagagagagtctctgtacacagccccgtgaaccctgaggagtggagtcatacacgaagggcgtgtggccatcgtgtcagcagagagagtctctgtacacagccccgtgaaccctgaggagtggagtcatacgcgaagggtgtgtggccaggctgcagagctgcgtgccgtttgtgtccgagcatcacgtgtggctccagcccttgtttctgccagtgtagacacctctgtctgccccactgtcctggggtcgctcttgggaggcacaggcatgggtgtgtctggcctcattctgtatcagtccagtgtgttcctgtcatagtttgtgtctcccaggcaggccatggtaggggcctcgcaggggccattggggagcacagggccaggctggggtgaggagagctcccctgttttctgtttaattgatgagcctgggaaaggagtgtgttctgcctgcccgttacagtggagcgttccgtgtccataaaacgttttctaac

SEQ ID NO: 10998 - DNA, 3170 bp, Homo sapiens
gggcaccgggcgaggtcctggccacgagggaggggttctgggcacgcgggagggggtcctgggatttcgggcagggaaccgggcacacgtgaggggtcctgggtaggcgcttacgttcctggtagagggttctgggttcgaggctgcaagcccactcaccccggtcctggagactagggaagcatctgtgctggcttttgtgtggagctcagggagaagctgggctgccctttctcccgcctttccctccctctcccttgctcccgcagcagctccatgggtgtcagcgggcagcacgggcgcctgcaggaagtcaggcgagggtgaaccgaagtgctgggggtttctaggagggagatcgggctccggggttccaggtccctcttaatccatcttcttgaacgagtaatgtgaacaacatcccacagggcctctgattatgccgacaagcccctggagaagcctctaaagctagtcctgaaggtcggaggaagtgaagtgactgaactctcaggatccggccacgactccagttactatgatgacaggtcagaccatgagcgagagaggcacaaagaaaagaaaaagaagaagaagaagaagtccgagaaggagaagcatctggacgatgaggaaagaaggaagcgaaaggaagagaagaagcggaagcgagagagggagcactgtgacacggagggagaggctgacgactttgatcctgggaagaaggtggaggtggagccgcccccagatcggccagtccgagcgtgccggacacagccagttctcggtggaacttaaaatgctgtgagacaccagacagacagatactgtgaacttggagctctctaatgaagggataccaaagtcttgtattcaatttttttttccttaaattgtcagccgaaaatgagagcacacctattcagcaactcctggaacacttcctccgccagcttcagagaaaagatccccatggattttttgcttttcctgtcacggatgcaattgctcctggatattcaatgataataaaacatcccatggattttggcaccatgaaagacaaaattgtagctaatgaatacaagtcagttacggaatttaaggcagatttcaagctgatgtgtgataatgcaatgacatacaataggccagataccgtgtactacaagttggcgaagaagatccttcacgcaggctttaagatgatgagcaaacaggcagctcttttgggcaatgaagatacagctgttgaggaacctgtccctgaagttgtaccagtacaagtagaaactgccaagaaatccaaaaagccgagtagagaagttatcagctgcatgtttgagcctgaagggaatgcctgcagcttgacggacagtaccgcagaggagcacgtgctggcgctggtggagcacgcagctgacgaagctcgggacaggatcaaccggttcctcccaggcggcaagatgggctatctgaagaggaacggggacgggagcctgctctacagcgtggtcaacacggccgagccggacgctgatgaggaggagacccacccggtggacttgagctcgctctccagtaagctactcccaggcttcaccacgctgggcttcaaagacgagagaagaaacaaagtcacctttctctccagtgccactactgcgctttcgatgcagaataattcagtatttggcgacttgaagtcggacgagatggagctgctctactcagcctacggagatgagacaggcgtgcagtgtgcgctgagcctgcaggagtttgtgaaggatgctgggagctacagcaagaaagtggtggacgacctcctggaccagatcacaggcggagaccactctaggacgctcttccagctgaagcagagaagaaatgttcccatgaagcctccagatgaagccaaggttggggacaccctaggagacagcagcagctctgttctggagttcatgtcgatgaagtcctatcccgacgtttctgtggatatctccatgctcagctctctggggcctgccatctatcacgtgatgctgtactaaagtcggatcggaatttggtgtcttattaccacggagtctgctttgtcaaccttcagatttctgttttaaagttaatgctggtcagctgtgcctgaattccaaaagaggggataatgagggaaggtgaagaaggagctggaccctgacgacagccatttgaacttggatgagacgacgaagctcctgcaggacctgcacgaagcacaggcggagcgcggcggctctcggccgtcgtccaacctcagctccctgtccaacgcctccgagagggaccagcaccacctgggaagcccttctcgcctgagtgtcggggagcagccagacgtcacccacgacccctatgagtttcttcagtctccagagcctgcggcctctgccaagacctaactctagaccaccttcagctcttttattttatttttttagttttattttgcacgtgtagagtttttgtcatcagacaaggactttgatcctgtcccctttggcatgcgggaagcagccgcggggaggtaatgaattgtctgtggtatcatgtcagcagagtctccaagccccacgaaccctgaggagtggagtcatacgcgaaggccatatggccatcgtgtcagcagagagagtctctgtacacagccccgtgaaccctgaggagtggagtcatacacgaagggcgtgtggccatcgtgtcagcagagagagtctctgtacacagccccgtgaaccctgaggagtggagtcatacgcgaagggtgtgtggccaggctgcagagctgcgtgccgtttgtgtccgagcatcacgtgtggctccagcccttgtttctgccagtgtagacacctctgtctgccccactgtcctggggtcgctcttgggaggcacaggcatgggtgtgtctggcctcattctgtatcagtccagtgtgttcctgtcatagtttgtgtctcccaggcaggccatggtaggggcctcgcaggggccattggggagcacagggccaggctggggtgaggagagctcccctgttttctgtttaattgatgagcctgggaaaggagtgtgttctgcctgcccgttacagtggagcgttccgtgtccataaaacgttttctaac

SEQ ID NO: 10999 - DNA, 28057 bp, Homo sapiens
gtgaagtgactgaactctcaggatccggccacgactccagttactatgatgacaggtcagaccatgagcgagagaggcacaaagaaaagaaaaagaagaagaagaagaagtccgagaaggagaagcatctggacgatgaggaaagaaggaagcgaaaggtaaaggagcagcggcggtggcccggacgctgcccacgaggagcccgtggggagcctggtcccaggacccaggcagagtgcgcctgcgtggctggaggaggggagggggtgttccgttggtagcaaaacgcgaaccgctgaggcccgcagactcagttccaggatcctgggtgtgctgttcctcagcagaccctgccagggtctctgtgaggagggagcctggcatgaggaggatctcggagggggtttcccttagttctgtccctcccctgagaactgcgaggggattgggcagacctgtccggatcccgcctactcctgcctttctcactcccttgactctgccgcccaggaagagaagaagcggaagcgagagagggagcactgtgacacggagggagaggctgacgactttgatcctgggaagaaggtggaggtggagccgcccccagatcggccagtccgagcgtgccggacacagccaggcaagggtgcacttttagagactctcctggtgttcacagctcatcgttgtaaatgaggggtcggcaccgtgtcctgttgctttggggagaagcatgggagggaggagagctggtatttccagggcctcatcccaggtgtcctctggcctgaggtttcctccggtgtctctgaatgtctagagcaaggcgtggccagttaccactggtgcccttcagttttgttttttaacttgttagctaaggatggcttatatgttttttaagcgttcataaaaagaaacaaaaaggcatctccacagagaccaatcgtatgtgacccgcaaagcctagactgttttttgtctggcctttatgtaaaaagtttgccagccctgggtcttgaagtttggttttgtttgcacttaagacagtattggaacagtagccccatctgggtcagactggtaagagagatgcatgtcagtgaaaacgcaggtaattccccttgggaagaagggacctcgaggcccaaatggtgggtctgaagttgctgaaagtgaccataggctgagacaaaggaagctggaggcctttagtagaatctctgtcgtgggcaccatctgcgaaggatggcatttggctggaatttccagttgacaaggacttgccctctgagttctctttgtccccagccttcctgtgcacaactcacagtgatgaggcatttgtacctaagacaaggggtgtctcttcccagcaactctcagcatccagtggttcctggattatagggaaacagacggctgggctttgggacatgggacatcagggagtggggaggctagtgctgcgatcattcaggccgtcagaaactgtctgaggcctgctggctccactgaaggaaagttctggaaagctggtggccttctgagctcctgtggtcatttggctcttcaggcactttctttttttaatttatttttgaaacatggtcttgctgtgtcgcctaggctggagtgcagtgtcgtgattcactcctgggctcagataaccctgggctcaagcgatcctcccacctcagcctcccaagttgctgggactacaggcacgcaccaccacgccggccatttatttactttttgttgaattttaagggacctcaagtgaaataataatcggtgaattcaggatcaacctttatgtccagagcgtttgttccgtcgtccatttcttgtctagagtagtggtatgagctgaaaacattgctaagtgatcaccacatattgttgatgtaagggctaccggttattacaagagatttttatgactcctgctgtgggggtgccctttctacccggctgagcttggtgggagccaaggctgagtcggatgtatctttatatccccagttctcggtggaacttaaaatgctgtgagacaccagacagacagatactgtgaacttggagctctctaatgaagggataccaaagtcttgtattcaatttttttttccttaaattgtcagccgaaaatgagagcacacctattcagcaactcctggaacacttcctccgccagcttcagaggtaaaccggggcgtttctgaagagctagtgtctgggggggtgtggtgtcatcttttctgaggccttattccccacgccagcctcgtcagctgtgaaacagaccctgcaccttctcttggtgactcccagtccacttcggggtgcgtaggaagagttcatgaactcattagtggctcactctgaagtcagagtagagtgagggaagtcaaggctagagctgggacattgatggccgccaggatgcgttgggggaatttttattatatctgaaatacctatcacaataaattaaaagacgctcgtaacttttttatttttaagaaacaaaattcggtcagttgtatccaatttttggattgtaagagattttgtatcatttagaaatctagatttttccgctttaagatgtctttgctttcagaaaagatccccatggattttttgcttttcctgtcacggatgcaattgctcctggatattcaatgataataaaacatcccatggattttggcaccatgaaagacaaaattgtagctaatgaatacaagtcagttacggaatttaaggtaagttactttcattgcccgaagtaatcgtggcatagttctgtgtattcatgtcttgtgaagacttcattcaccttagatcatttctagtttttgagctttcacaggtgtttctgtgttcggatgatgttttacagacacagcattaaggaaatgattggtcgtgaacgttttctctgtgctttggtctagaaactaggtcaggttgcacgctgttagaagtctgtttcttttctttctaagttactgcgctggcgtaaataggacatgttgtttcaagcagtgaggtgtccggtgtggcacggcttgagactagacatttttaaaaacatacttctttttaattcttagttttgtcttacactaattgagcatttagtttttttagcatagtaagtttttctgtctcctgagtactttgctcttagctctgtttcttgctactggctgtgagaattagcaactgctcattggttttgcaacccaggggaagaaagcaaaacaaatgcttgataaagttggcattagtgtagtttagaaaggcattagatttctctcttaggttccattcccctggggaaagcttgacttttctattttatgcttactgaagggtttgctgactcacagaaacacaacagaacagacttaaaggagagtgggagaaaaggaaactcgatgagaggatcaggcagcgcctgagggtagatgttaagagcactccatgcccgaaagccctctgtattccctgcttcgggccccagtctggccattcctagcaacaaagtgagaaggggagcagcattcactccgtggagtgtccgcagtggagtcttcaggggaggggctccacagcctcgggccgggccctagggctgctggctctggaaccgggacttggggagggtccagatggcacgttctcagttagggtggccggcctccggggtcatgctccagcctgacgttggtactcacctttgagaggcctgtgctgaggaaactggcctctcataataaaatactgatgcttccgtattttcaccataaattacaaaataaggttgtccttttgtggggcaaagtctttttctagtagtttgagggaaccatttggtgacagaattttaaattcgattctgtggagaaattctagagatagaggctatcactgtgccgcacgcctgccttcatcccttgacttgcacttgaaagaatcgggtcgttgcttctcgttcctgtttatgttctggagaaatgcaagaagcgcaggaaacgctttttcctcacacagcatttgtatgtgatgcttagaaagaagttacaggcttggccaactgtttgctgtaatatttttcatgcaagaccaatgtgcaactaagaaaacttctcttaagttcttaaacgttatgtttagatcagagagcccagttgaattgttttctactcgattgtagctttttccttttggtctcttggtagtcatctagagctttgctgttgtctgtggcatttcaaacctgataagtctttcctgttttcttttcaggcagatttcaagctgatgtgtgataatgcaatgacatacaataggccagataccgtgtactacaagttggcgaagaagatccttcacgcaggctttaagatgatgagcaaagtaagaaactcactggcagcagcgagctacggaaagcaggggctctgccccccgtcgcttgtgcccgaagggagcctcacagtgaacacgtgctccatccacccgccaccctcatggtgttgccccctttgctctagggtagacgtccccggccgccctctctgctcatgacctagctgtaacatctcattgagggttggtggaaagttccgcatctcttgatcttaagcctgggtgtcaggtgtcagtcttgctggatggcagccagcattgcgggcttgttttgcgtgactgcctcactgaatccagacgggacatccttgtcttccttggccatcctgagtggcttcccagatctgtgccgtgagccaggctgcatgcatcccacgtaggagaaggtaaaggggaggtgcggcacctgccgcgctctggcggtgggtcaagcccccacaaccacctcccgctgctccgccgtggaaagttagctcttaggccaggtgaggctgtgaccatccccatcccatcccatcgtcacggcaccctggctgtgagggagaggtaaatccctgctgctctgtcctttctgattctaggagcggctgttagctttgaagcgcagcatgtcgtttatgcaggacatggatttttctcagcaggcagctcttttgggcaatgaagatacagctgttgaggaacctgtccctgaagttgtaccagtacaagtagaaactgccaagaaatccaaaaagccgagtagagaagttatcaggtaaaggttctgtggaaaccacatttgcttttggagttgagcaccatagccaggaaagcaggtgccttgtaggggagagtgagtgagtgagagaacggatgtcatgtcacatagacattcttggtgtagcttattctggcaggaggagtgtggccagacagcccctcctgcccaccggccacgtgcactctctgacccaggtgtggtacccaagcccgtccgatcacccctgcccccaactgctagtgactggtggtctctgtctctacacgccgttaagatcattggcccctccctcccctgcacagcgcctgccggcagccaaggctgtgcccttgtcccagactgtgccgcacaagcgggctgactttgggcagccagcattggcagggggcttctttgttgctgtggggcagatgcacactcctgaactgctcgcttctgtgtctgtgtagacgctggagtggagcaggtgcaggcctgtggtcaggaaggtgtggatgctgcgggggaagcaggtgaggactgcaggccacagctccctgtagctctgctccctcccacagggagcagccgacttggctggtccttcagggaaccttcttcctttttttctaaaccccagagtggttttcatgggggctctttgtctcatggtggctgagcattgagattgtatcaaagtccgtatcacacgtcattcctgtagacgctcctccacctatgtgaggtggctgcctgataggaccaaacaaagcgagagtatcgccaggggccttagaggcaccaagagcacttaacatagcctgcagcgggcagaagcgcctggcacagagcctgcttcatcacgtgtcacttgctgagtgcaggccccagagagcgcagtctcaggacatccaccctcatggccgtgtgtctgacagcactgtggctcgcggtcttcccagtatcctgagaggactggcctgttgccatcctggggacagatcagatttgaaggatggtttctgctgaagtgtattgcttttgtgccatcttgtgggaagtcagggaccgtctggagttggtactgaacgtccttgaggcaattgtgatggtcacggccctccattgtttgtttccttctcacatgtgtatgggactcacgtggatttaacaggtggggcggcagcggtgctgggctcggtgcttctgctctgagcagctccctccaaccgtcaaaagggagagtggtcttgagaccagcccctcaggtcctgcagccttggcttaggagacagggtgcgctgcgtggccagagtgtgttgcttggcaacggacgacagtcccctaaggcggtctccccacgtgcgttgcatttcccaccccgctgccgtgtgaacactcactgcgtggttggctggtggctgtgtccggcctcagcccccgactcgagtgtgctgctggccttcaggggtcggggtttcatggccgccctttgccgcctcatggtgactgagcatcgagggggaattgaagttggtgctggtcagcatgctcagctgcggtggggttgtgtcctggcagacccaccccaggttggttttgggtgtctctggtgctgcagcttcacccttgcctgtgggatccaggccctttagatggatccccagctgtcagtctgcaggcaggagagcgtgccgagctcaggcagtcaccttcacctagtgtcacagcagtgcgcatcggtaatgggctcacgcaggtgcctgagtggagcccctccctgcggagctcatggggctgtgactcctgtgtagggttgccaggttgtcactgtaggtcaggcaagggcagggccgctctcatgggcagggcttgtcctgggcctgcacctggccctaggccactcagacccatgcccaggcaagtgcccagggtgggaaggagcccactcgcttgcttctagaaccttccacactccttgggtgctacagcctgtgcccctcagctgttggagaactgcttcaggtggaacctgggaccacttgctgacgtccttgtgtgttctttgtgccacccagtggccacagcagagggggctgctgtccacccagcccagcagcaccagaccacacccgagcagccccgcctatcctgccttgctgtgaaccctgcgtagtcaggggtggcttttccagtcacttttctgatggggcctttaataactaaccagtgtgggcatctgttactttgttgcttttgttgctaaagcactttaactgagtttgcactgcgttgaaaaataggaagtctgtctacttggcttacacttaccctttattttaataaaagtgtcttaatttgtcatttggttagggtgaaaagggatgctttgagacctaaaaggagttaagtatgctctgccagctctgtgtctgagggcagggtcggtagaagctgggttaggtgccgacgcatggggagcaggtgtgcggtggggacgctgcctccaggtgacttggttgtccccacctcacagctgcatgtttgagcctgaagggaatgcctgcagcttgacggacagtaccgcagaggagcacgtgctggcgctggtggagcacgcagctgacgaagctcgggacaggatcaaccggttcctcccaggcggcaaggtagtgctctgtggccaccgagagagggtgccacgtggccccagactctctgtgtgcctctccttctgggttggtgctgtgtgatctagcacagccaccgggatccagaggtcagcgtggggccctgacgggaggtccggatcagacacacataaggctggtctcttcagtcggggtccaggtgcctctggcagggctgccgctggtgtttcatgcatcgtggaggccacgtggtcactgacctcatttccttgatggaggccctgctgcaggctaatcctttctcttggagtgaatgctgacttctgtgtctctgtcactgggtgttgacgtgaggcaccgcccttgttattccagtgggggtgctggtgttggatccgacagatggtccataataggccaccgactgtgttcacgtggctcctgccacagatggtctttgtggtggtggggcccactcagctgaccacgctctcctttctggcaggagacgttctagacccagtgtcttcagtggaaacagagcacaggctgtctgcagtctcaggcttcctagcagccctgataagagaagtagagcaatgcaggtgacattaatccttgcaggtttcatttcacctctatatccaacattttatctcaacatgtagtctgtagaaaacgttaatttgagctttatgggtttttttcatattaagtcttcaaaatgcacatgggatgggatgtaaagaacgctgaagtgggggcatttcagaggtgtctgctgctttttgcctgtgcctgctgggaagttgcagtgctctgtgtggcttgcgtgttgcgaggttgcggtctgcgtggctcacgtgttgggaggtcgtggtctgcgtggctcacgtgttgggaagttgcagtggtctgtatggcttgcgtgttgggaggttgcagtctgtgtggcccgtgtgttgggaggttgtggtctgcgtggcttgtgtgttgggaggttgtggttcacgtggcttgcatgttgggaagttgctgtggtctgcgtggcttatgtgttgggaggttgtggtttgtgtggcttgtgtgttgggaggttgcagtctgcgtggctcgtgtgttgggaagttgctgtggtctctggcttatgtgttgggaagttgctgtggtttgcgtggctcgtgtgttgggaggttgcagtttgcgtggcttgcgtgttgggaagttgctgtggtctgtgtggcttatgtgttgggaggttgtgggtttgtgtggctcaagtgttgggaggttgtggtctgcgtggctcacgtgtggggcggttgcttggctcgcctgttgggagtttgtggtttgcatggcttgtgtgttggaaagttgctgtggtctgtgtggcttatctgttgggaggttgtggtttttgtggcttgcgtgttggggggttgtggtctgtgtggctcacgtgttgggaggttgtggtctgcgtggctcacgtgttgggcagttgtctgcttggctcacgtgttgggaagttgtggtctgcgtggctcatgtgttgggaagttgtttatgtggcttgtgtgctggaggttgtggcctgcgtggctcacgtgttgggcggttgtctgcttggctcatgtgttgggaagttgtggtctgcgtggcttgtgtgttgggaagttgtttatgtggcttgtgtgctggaggttgtggtctacgtggcttgcactgtagttcttttggacagccttgttctgcagtctgtgtttcagccctggaattgccacattctccaagaagccctggtttcttgactagagagccttgtgtagaagccaggacctgggttctgggtgaagccctctgcagatagagctgggagatgcctgttgtgtgtgtctgcaccacatacatggacactgtgcagagggattctgttggcacctgtgtttacatgggttgaaaactgtttttacacggaaacttccagttccctcgtgccccgtgggttccgcccacttcttccctttcagttttgtatctgcgccgtgaggacttgtctcctaatcttcgtatcaactccgtgtcccattgagctgaccttccgcctctcccccagggccctggccatcctgtgggctctgagactttgcatggatccgcggtggggagctgcccccacacaaacgtccggctcttctcaggccaggtggctgccctgacatggcatgatgtccagcgcatggacgtcacccttgcactggagcccagccaaccgctgcatgacagccctcttcccccttgaaccccaagtctgcacacaccagtgcctcctcttcctggatcctcctgatggcctgtacacagaactggggtgtgggtggtgggtttttaaatgaaaaccagtccacacatgcttgagggctggagccgcctgccgtcagggcagtgccatgctgacctgctgaccgttccattttgtcaaggctcatgagcaattttaaatgtttactcgtgggtgaaggtttttgtttcagctgtaccccctatagcagggccatggggagcctaagaggttctccttggcacctgtgcgcgctctgctgttgccggtgagtctgaaattccagggaatgccgtgaggggccctctggcgtttgttcttggacaaatgtgctttcacccccattaagccctgcttgttggtcttcatttcatttgtgctgcgctgcccctcctgagggacagacgctcaggcagtgcttccttccagatgggctatctgaagaggaacggggacgggagcctgctctacagcgtggtcaacacggccgagccggacgctgatggtgggtgcccgctcagggctggctttatgctctccgtacactgctttttgggcctccgttgatattctgtaatgaaaagctgagccatggccatggggcagcatgagaggctgcccggcttcccgaccttgctcgcaccccaacgtgacacgtgcgctgagtggaggtgtggacggccatctcgcggggcgggggtgctggtcagacctcggtcagggctccttgggagcagcgggactcgagccatgttcctgaaaagctgccgagaggcctttaaggccaaacctcactagcatcaggaagggttcacatcccgagctcagtcttcagcaaagaccagagtgctggcccaccctgctccttgaatctggaaagcagtcttagaagagctgttagatgatgacgtcaggacagtgttgaaggatggtgcacactaggcctgtccagcccgtcaggggcactttgttggcctggaagtaattaagaggcttgtcctttgaacgaaagtgtgatcacttgggtttgaaacgcactcgcgggctcgcgtgaggaacgtgcagcctggcacgggttgcctctagattcctgcttccctcgctctcaccctcatgcctgctggtggtctttcacccagctccaccatgccagcgtggttttctccagtgtgtgaaggatagaaacgggctgatctatataatcttcagcttattttcctaaagaggatggaccgttgatccatatttagcttatgagagtgttgagaccgaggcagcggttgggaactgaggaactcctgctctgatcccatgagtggtgtgtgggtggtgacttgagcatggcagacatgctgtcagatgcacgcgctccaggtacacgccaccgtttcgctgttagaacacgcaggacaagatttcttcttggagttgttgagtgatccatttgaaaatgttctcaaagtattgctggtgtggtggccaaagatgtggtattttttattgtgttgactttggggtgataaagaaatgaaattgaaatgcagttagttttgagaatggtagttggcttttgcaaatttgttttcaggtgatcattataaaatccccccacctgcaccaatcacatccactgtgatgtggagaaagggctcatggcactgcactggggcaccgcgttggggtcacacctgccactcacggcccgccatgtccgtgttgcagaggaggagacccacccggtggacttgagctcgctctccagtaagctactcccaggcttcaccacgctgggcttcaaagacgagagaagaaacaaaggtaaatccatagtcccgtcccaggagccagccggagcagggaaggtggcaggggtttagtggagtgatggcaaatgctgctgattcgtacttcagagtttcctcactgtacctggattcatgttttcacatgggtaagattgagatcagttacagtgacaggaatgaaactcgtgttggatggggacacacacagcgggcaccttggttgcatcactggacttcaccttggtcagtgttttggggtccttgtgtttctgtccctgtcgcattacagaacatcccttcaggggtcagaatgtgtggcccctgggccttgggtctggcctgtgtgttctctccatctgcactgctgcctcctggctgcgctgctgctgggacctcctgcatggccccaccctccacttctccacctctgctgggtccctcccatgcagacagctgcatggacactgctcctgccggccctttctgcctcagccactcacaccatctgctaatgggacagctcactcttccctccaaaccatggccttggctcaagagcttccttgtttctggaatgttctttcctccagctccaggtgttgaaattctgcctggtctgggtctcctgttgaaggacgccctccactgggaaggatcctcttgccttcaccacttgtcttcaccagcccctgctcccctcttcctcttggggctgttgtggttgttgatactttttttttgttgtgtttgacacacatcttcttctcaccctctaacacagttctcaaccacagcacttttgtccctggagatgttggcagtgtccagaggcgtgttgatggtcccactggggttgggggtgctgctggcaccagatggtagggagatgccaggggtgctgctccacaccctatgggacactgcacagtacacctggcctgtgtcccccacagcgagagctggccctgggcaggcgtggtccctgcggtgtgtgttggttgggatcctccacagtgacagacggtgcgctctgcccacgtttccacacagctcttttgcttgtggagctcacccctttgcagagagctcatttccctgcggtctttggcctgcagaagtaaaatgaggggtggtgaattacacccctgctggttacacatggaaaactcaggagtgagaattttgtggagagcaagagaggtgagactggggtgctggctgccagccaggcggtccctcagcccctggagaagcggggtggggcctgcacaccgagtccttccagtgagtccagtgatgctctctcctcttcctcccagtcacctttctctccagtgccactactgcgctttcgatgcagaataattcagtatttggcgacttgaagtcggacgagatggagctgctctactcagcctacggagatgagacaggcgtgcagtgtgcgctgaggcaagtgtcggccccggggagcccttggctgctgtgcagcttgagctgtgccctggtgtgggacgtggagtcccacatgtgtgcgggtggggagagagccatcttgcagccgtccatatggcagcctgggtcttcccgttgctttcagtcatccacacaggtctgccacaggccagtcctgaaatctgggtaactcagtcagaaggtggtgatcagggcgtagcttgtgaaggggttgggggtgtgttgagcacactggatcgtattgaattgtgtttcctaagtgaccgtgctagctcaggctgcagtgacaaagcaccacagactggggtcttattcctgggggctggcatttgccatgaaggtgtgggcagggctggttcctcccgagccctctctcctgggcctgcaggtgccgtctttccgtcttttccctgtgccttcccggggccatcctgcgtgtgtctgtgtcctcggctctcctggagaccctaccgttctcaaggaccctggtcatattggatcagggccaccctaatggcctcatgtcactgcagttacctctaaaggccgttaaagtccccagctccaagtataatcacattccaaggcactggggtcgggatttcaacttacgaactctgagcgggagatacaattcaggccatggcaggctaaagtataatactaaaatcacaaatgtagcagcctgcttttccgtagaatgttgctgtgtgtattttttgttttctgtggcaaaataaaagtgggtcactcttgtaaaatttggcagtttttaatggagaaagcaacttaattttgctagcctttaagaaatggcatcttgacatatcaggtcttcattttattccaacaagaatgcagaatatgttttaaaaataaacaagaatccccttagtgcttcataaaataagtgaaaacctgaccctgatttttgtagcaaaaaatgaagtaaacgtggaaaatgaagaggaaattctagtaggagacgatggggtcataagtcagaaattaaagagttgtttgctccccaccctcccgccagccctcacctcacccctgctgtggggcctctgcccagcctgggccaaggccgtggctcccctggtgccatcctgtccgcagtcggctccctgtccacggcgtgtggctccttcaggacatcagtcacctgttgtccatgtggcacatcagtggactgtgcacaccccccgccttccccagctgtctgtccctagaacgcatcaggttccatgttgccgtgaagaaagatcattctgaccccgcctgccttgtggctgcaggggcaacactcagaagcacatctcctagggcctggcatgaggctacgtggtcccatgccagcctcagcgcacagacacccagatcctctgcccctgagtgctgcttccgtgcacgctgcgagtgccgagcttggcctgtcccgggctgtgggtgttttaacaaagacacggagtctccctgttgcctcctgtgaccgtggttcagcttctgaccagcagccatccttgttcctctctgtgaaggtctttggagtctggggagcccttctgaggcgcttgcttggtgctttgattctaagactatgcatttttgttcctggcctactttttagattgtattatattttattttttaagctgtttcatgtatatggccaagaatcaggatggtactaaaaggagtgccttggaagtgtcggcccacccctgccccacgcgcccattcctcaccggcaggcactgcccactggtgtgcttctgtccacacccacttgtgtttttaaacgcataacgagtggaaagataggagtattcttttacagatgataacatagcacacgtgtgtttctaggctgtgtgcatgtgtattcatgcttttctccctctccccactgagatctttttaacctttttgggtcatggaccactttgaaaatctaatgaaaactatcagccactccccacaaaatacccgctctgggagggtcacggggaccgaggagctgcgctggcacggcaggcttctgtgatcagggctgccgcgagggccaggcgacaagggctcctttcagcgtaccttctcccgcggcccctctagcctgcaggagtttgtgaaggatgctgggagctacagcaagaaagtggtggacgacctcctggaccagatcacaggcggagaccactctaggacgctcttccagctgaagcaggtgggctgcactcgcaccggggttggggggcaggtgcccttggggtgctgctggcgggaagagcctgcagcctgaccaggctttcggggacgaggagctgtcgcagggactctgctgccggctcctcgtcaggatctgcgtgcttctctgcacgggcaggtgtcccccggagaccgtgactgtgtgctcaccactcccagcgcactcgtaactctctatttccatcttcatctttcatctctgtcactttccttcatcctgaagagtttaaaaaaatatttcctgtagttcagatttactgacagtgatctctcagcattggcttctctgaaagtctttatttcatcttcatttttgaaattcattttccctgtgtatggaattttagatgaccttttttcccatctactgtaaaataggtttgacttgcattgttgctataaaaaagcatctgggccaagcatggtggctcacacttgtaatcccagcactttgggaggccgaggcgggcagatccaaggtcaggaggtcgagaccatcctggctaacacggtgaaaccccgtctctactaaaaaatagaaaaaattagctgggcgtggtggcaggtgcttgtagtcccagctactcgggaggctgaggcaggagaatggcatgaacccgggaggcagagcttgcagtgagccgagatcatgccactgcactccagcttgggccacagagccagaccccatctccaaaaaaaaaaaaaaagcgtctgaagtcattgtcatctttgtttcccacatgtgacgtgtcttttcggccagatctgacctgaagtctgcttttgtacagaccacaagccaggaatgtcttttacatctttaaaagggtgtttacagaaaagaaaaggaagaagaagatgcttcgggcagcgtgtggctcacagagcctcggctgctcactcccgggccctcggcaggacgggatctggccggtgctctaggagcttttgaacttttatctttctttatcagtgattttcagcattgtattttccaggtgccttggtgggcttttctttgtgttctacttagcatttgttgtttcttggatctgtctgtagttttcatcatatttggaagatttttagccattactcaaatgtcattttccaccactgcctcttcctcctcctgctggactgtggcactctgaggacagctcgtgttatctcacatggcaccgacactgtgctgccgcaccaggctgctgcagattagtttctgatgctgttggctaagttcactcacctgttctctggccacacctgaacctgttatcccagatcagttttcactgatgatgtcgtcccgcgctgctcatcacttgggctccatttgctgcttttgtgtatcttctctcatgttgtgtgtatgtttttccttacatccttgagccacgttcgtatttattgctgctgcttttgaagtcctcagtcactgagtctgtcgcctctgccgtttccggttctgtttctgtttgacactttgctgcacttggagctgtgggccattgtgcacgtgcctggtggacagtcctgaccctcgctgtctgataaaaaagcactggccacatggccgctgggaaatttgaatgtggccagtctgaatttagatgtgatgtgtgagctacaaactagatcttaaaaaactaatgcaaaaaacgtaaaaatatgagtaacgatttcttatggcccacatgttggaataaaaacatcttcaataaatttgtctaagtaaaatgcattagttaattgaatgttaagagtaattttaatgtggcagctagaattttaagagctgggtatggtggcatgcacctgtcatcagctccacaggaggctaaggtgggaggatcacttgaggccgggaggtcgaggctgcagtgcgattgcaccaccgcactctaggcaatagagcaagaccctgtctcaaaaaaaagataaaaaaacatttagaacgaggcgtgtgctcgcgttatgtctgctgggcaaggctgatctgggttctttctctctttcagagaatactgatgatcattttggcagttgttacttgtggataatggccggatcctaccaggcttgtctggggtgggtccagggcagccttattctagggttcgtgtagccttaatgctaaggagtggcccttcggggagccctgtcttttcagcgtggtctctgctgtgggtggagttcggatgagtctctgtccttcccaggctctgagaacgtttggctcatggctcccaaggaggggtcagtcccttgacctgacggtttcatctgtgcttgttacagatgaactggggtccacatgcctggtgcagtaaacccagacacccatgccgaggttttgtcatagaaaggacgtgtgtatttgcagggcgccaagcaaggtgggccaggaggctcatgtataaatcctggcctcccccactggctacaggcaaggcttgtaaagcgggggtagatctcaggaaagcagaactgaaaggcagagtcgtgcataaggacacagaggttacatgtcggcttggcctagaagggcggtatctgcaagcagggccttataggttataggtggattcaaaggttttctgatttgcagctggttaaggaggagaagctttgtttaaaaatttggggtgaagagaaaagaatgttagcttaggcttgtgggtgtggcttcctccaggcccgtcaggaagaaattcagaacaaagaacggggtcagagctcagtcttcagtttctccttatctgagcccttcatgccagtagattagtttgttggggaggtcctaggtggagggtccaggtttctgaaagacaactcagggatatacattaagatgttatctttactttctttctttttttttctttttgagacatagagtctcactctgtcacccaggctggagtgcagtggcgtgattgtggctcactgcaacctctgcctccctgattctagcgattctcctgcctcagcctcccgagtagctgggattacaggcatgcgccaccacacctggctaatttttgtatttttagtagaggcggagtttcgccatgttggccaggctggtctttaactcctgacctcaaatgatgcatccatctcagcctcccagagtggtaggatgttgtcttttctttctacagggaacagtgctgggaggttgtctttactttctacagggaacaaacatctgtctccaccttccttgactgttgttttaggatactgttaccttcttgcttatcaagtcgctgatttacttctcagagttatctaagtaactggaatttcccttgaaggaactcaagattttccttgatttccatgcttggagggctcgcaggcccctgaagagagggttgcagccaggcgggagtccccaagcagatttctgcagctctgaggagcagccccctctgcagagcctgccccaccagctcgtggttctgactctgagctctggtcaccctcccgtgtcgtggcctgcaggctccttccaggcaggaagctggcccccccaacacagcgttagaatcaggcattgctgtggggtagggaaagtgaccccctcacagcccggaaatgggaaggctctgtggtttcctctctgggttccagttagattcctttcgggaaagtgaacttggatatggagttgagtgaccccgagtgcacccccgcagtaaatgatgctcaggactaaagtgactgaaggcttttggggaaacagatgcgaacaaaacagcagtattcattttctaattaaaagcttgtgaaaatcgatgtcattgaatctgagaaacattatttcgaacaaagatcacacatgatagagtgcatatactacagcatcgctccaccggagcacaggacgggtgtgccacggaggccgacagttgtggaaggagacaatgcacggcccggcccacctgctgcaggcaccgccaggaggtgtctgcctccttcgctcctgcgcccacggcaggcccacctgccacaggcactgccaggaggtgtctgcctcctttgctcctgcacacacctgcccctgcaggactcgagctggtctcaggcaactggtcatattccaggtggaacccacgagacccttcttatcctaagcttcccataggatctaggcacatcttttttcttttgttttaagccacccaaggctgccgaaacagcatcggcgtcctctctctgtccgctccatctcgccctgtggagcgctgtccccggcacacaatcctggcgctgaggagggggctgggcgtggttgggtcagtgactggtgatgaagaaggtttggaggacccccagccttaatccattaagatggtgtgactggggagcagaattcgcagaagcgcacaagccatttttacgtgtgtgtaatgtcagcgaattgtccgtttctatgaaatcactctggaaaaactagtttctgtcctcatttacttttcagagaagaaatgttcccatgaagcctccagatgaagccaaggtaagtttttgaacatggaagggcaagccaaatattattctcacagggaaagttgtatccagcctttgaggtggggaggtctgtgtgtatgacggcgtttagaaatggagtccgtttctgatcagtaagatcaatagtgtttctcctcctcttttcatgacttgaggtgagtggtgtgaagccgcagtacattcttccaaatccagaaatgggtagtttcagagcagttggccccgctgggtgctgtccttgtgggacacccttgcaagggttgggcaggatgggccttctcaggacctgcttggtgagtagcaggtgttgtcccaagcacagtgggctctggggccagtgctggcagggcagtgctgtgagcccagactgctgcacctgccgattggcaggtgtgtgtctctgacagtcagcaggcatgggcttgggctttggtccagggtccctgggaacctggagagaccccttaacatctgtttgagggcagaggccgagctgcagggagctgatgagagagtatgtgttagggtggctgtagtctagccctgaggacacgccttgctgggaaaggaaagggaacgttgtgtgctctgtgaagtgcctgagaaatagtcctggaccctaaaattctgtgtgtcttcctgttgcataatgtccctccccaatttctttagccccaaaaagttaacaaaggattgttagtttgcgttgttggtctcagtaggtttttctttgacatggatttgcatatccattcatgagctccaacctgacagtcccttgaacagcagcctcagtgaacagggcttggtcttgtcacttactgaggggtgggttcacgtttagcaaataattagagtgatttcaatagcgagtgtgaagtaacatttcgtttttcgtttgatgtttgaattgctcttgatgtgtgtctgtctccacaggttggggacaccctaggagacagcagcagctctgttctggagttcatgtcgatgaagtcctatcccgacgtttctgtggatatctccatgctcagctctctgggtgagttgtaacaggcactttcccacagcacctggtgaaggtgtgatagaggaagaaaacacacggcctccacctcctctcccttcctgactagacagggatgccaggaaaatcttttgttacggtatttggtctttgtcccaggtttttggaccatagctcctaaaatccttggaatctcctgagtgttgtgtcttttttaagctaatgagaagtggttgcagcccctgggtaacctcaggatggggtctggccgatccccagtggctgtggatttcatcagtgttgcctaccgcctccatgaaatcccaaaaggtggggttccctagggagcctcattgctggacgcctggaggctctgggaagaaggcagccccttcccacgggtcccctctgcatcgctcccacctggggcccatccgtaccctgggtgacaccccgcagaataaatgggtaaatgtcagcctagtgtgtggacagaagagtcaaactctgcagggtatttagagaggtttcttctgagtgaaatacgaagaccgtggctgtgacacagtcccaggaggtcccaagaacatttgccgaggaggactggtctgcagcttgttttgatatgttttagggagacagaggacatcagtcagtacatgtcagttgtaacagtggttcgtgttggaaaggcgggacaacttgaagcgaggaatgtcgggtcgttggtggattcagagatttcctgattggcatttggttgaaagggttaagctctgaagagctgaagtcagaaagaaatgtgcatggttaacataagcagttgtagaagccaaggttcttgtcacatagatgaattcagccttcaggtagcaggcttcaaaaagagtagagtagatggcaaacatcactcatgaggccctcaaaggtaccagattgttagttaaatctctgttgggtcaggaagagacttggaaggggcaggagattctctacagaatgtagatttttcccacaagatacagctttgcagggctatttcaaaatatgtcaaagggatatattttgagataaaatactcagtttctttcagggcctgccatctatcacgtgatgctgtactaaagtcggatcggaatttggtgtcttattaccacggagtctgctttgtcaaccttcagatttctgttttaaagttaatgctggtcagctgtgcctgaattccaaaagaggggataatgaggcaagtccagtcccgcttcacatcatggcctgacctcattttccaggttgactttggagtgcccttggccaagagtgggaatccgttcagtccatggggcttagaattttatttttcatttacagatgtttccctgacttctgtgagtcactctaggaaattcatagagctcaagtctggtcttctgggaaccccatttgatagctggttagtcggaagcacagaccacagcctggggctttcagttggcatcagccggtggggccatcctggagactgtgccctcacctgggaggctgccggtgcagcgcccccgagctgttctgacctccagcagcatttgtggtgcctggatccatgggtcccactgctttgcgtggtgacgttccacctgtctctgctggctctgttcaggcacttatggccgtgatttattataggggaagggtgccaacagcagcagagggacaagagtgacatccaaggaaacccagcgtgaggcccagatccactcccagcagaggcacatgggacacgcttaattcccaggagtgagctgtgacaacacacgtgaaatgcccaccagggaagcccgtcagaggcttggtgctcggggtcacagggcacccccttgccaggcaggtaccaaagtccagaccccggagggaaggtgaactttagcataaaccactctgctcctgttgttggagctgtgaacaatccctagcactgggggggaccccagatgccagccgtggctggccttgccttccaggggaccctggccccaggccgctgtgacagcacttttctgcacagcagctgtttttctcagcacttctaagattttgtccttattactacttctcagcagcttggtgctgatgggctttggtgctgatgtgctgtggtgtgttagtctgtcctcacactgttataaagaaccacctgagactggtcattggtgaaggaaagaggtttaattgactcacagttcctcaggctgtttgggaggcatggctgggaggcatcaggaaacttccaatcatggcggaagatgaaggagaaacatgcatgtcttcacatggcggagcaggagagaacgcaaagggggaagtgctttgaaacaaccagatctcatgagaagtcactcactatcatgagaacagagaacagcaagggggaaatccatccccatgatccaatcaccttccaccaggaccctcccctaacattgggaattacaattcaacatgagatttgggcaggaatacagagccaaactgtatcattctgcccctgactcctctcgaatcttttgtccttttcacatttcaaaacacaatcatgccttcctaacagtcccctaaagtcttaactcattccagcattaactcagaagtccacagtccaaagtcttatctgagacaaggcaagttacttctgcctgtgagcctgtaaaatccaaaacaagttagttaattccaagatacaaatcgggtacagacattgggtaaatagacctatcccaagagggagaaatcagccaaaacaaaggggcagcaggctacaaatctgaaacccagcagggcagtcattacatcttgaggccccgaaagaatcttctttgattccttgtctcacatccaggctacactgatgcaagggatgggctcccacggccttgggcagccccgcccttgtggctctgcagggtacagcctctgtggctgctttccctggctggtgttgagtgcctgcagcttttccagatggcatggtgcaagctgtcggatctaccattctgaggtctggaggacggtggcccttttctcacagctccactaggcagtgccccagtgggtactctgtgtggggtgagggctccaacctcacatttcccctctgcactgccctagcagaggttctccatgaagggcctgcccctgcagcagacttctgcctggacaccctggcttttccatacatcctctgaaatctaggtggaggctgccaaacctcagctcttgccttctgcctacccacatacccaacaccatgtggaagcttccagggcttggggcttgcaccctctgaagcatcgacccttttagccctgtaccttggccccttttagccatggctgggacacagagcaccatggcacatgtcccagtgcttcacagagtagtggggcccttttccctcctagacccccaggcctgtgatggcagtgtctgggcaaaggtctttgaaatgtccctgaggtattaacatttggctcctctttacttacgcaaatgtctgcagccttcttgaattcctccccagaaaatgggtttttcttttctaccacatggcaggggtacaaattttccaaacttttactctctgcttcccttttaaatataagttccagtttcaggtcatttttctgtttgtgcaagtgagcataggcttttagaagcagccaagtcacctcttgaatgctttagtgcttagaaatttcttccaccaggtgccctaaatcatctctctcaagttcaaagttccacagatttctagagcagggtcacagtgctgtcagtctctcctaaagaatagcaagagtgacctttgcccccattcccaatggggtcctcgtctccatctgagaccacctcagcctggatttcactgtccatatcactatcagcatttgaatcatagccatgcaggaagtctctaggtagttccaaactttccctcatcttcctgtctttaagttctcccagctgttctagcctctgctcattacccagttctacagggcatgtctgtagtcactgttactacactttgtctactgattccctgatatcagctttgagtctctcctagtttggggctgtgttttcctgctccttcgtgtgtgttggaatcatttactggataccaggtggagtttgtagttgatgccgttgggtgataggtctgcttacacacctttgaggcctggcggcctttgttctgagtttgagaagtggcttagactctgtgggaccttccccaggcattgtcagggtaagcccagagtcaccccggggagggtgaagctggtcccctggctggtggggctcaggtgaccacagacctgtgtgcaggttcttggcatgtctggtgcacagttcaggagtgggctgggagctcatcctttccacctctcagctggacgtgctgggtccccgatggctgtggcctggaacctgctccacagtgaactgggcgggtaccagggtctgccggcctcttgcaccctccatccagctgtctggcctttgtgtgttgaggacaggagcccacaccaggcccatcctgggttgtggccacatccctccacggtgtctgtgcgtgccatgacgtggtctgtgcggtgctaggtcttgtctgatgctttgcttgagcaaaggacgctgggtgtctgccttcccttcactcactgctaagggtaatgtctgtcctccaggcctgtccacctgtctgctgtgagctcgtccactcagtttccagagcaattattgtcctgagcagagaggcctgtctggatgggcagtgtgctcctgcccttagggtagacgggccggctgagctcagccgacgtggggtcatgtcctgtttacacagggaaggtgaagaaggagctggaccctgacgacagccatttgaacttggatgagacgacgaagctcctgcaggacctgcacgaagcacaggcggagcgcggcggctctcggccgtcgtccaacctcagctccctgtccaacgcctccgagagggaccagcaccacctgggtgagatgcccccacccacgccgcatccccagagaccccagcacagtcagtgtgacgtctagacgaggtagtgggcagcattgtagttgtgggaaggctggaggctgcatgggcagcggtgctgttgtggaggtcggtttccacagatgtccttgggtcgcggcctcggtgcagagccggagcggagctgggatgctggcctggccgcacgctgggttacaggctttctgccagataccgtccccagttctgtccacccctgtgccctctgtggaccctggttccagtgtttctgctggggagagagcatggcttccttggccatgtgtcctggagtggttttggtgggtggggttttgttcccacttgtaaacactggatcactctgtcggcagagtgaatcttggcagttcttcagctgcagaggtttagctgcaaccatctgcaaaaaggccggtattttcgattccattgaccttgtgatcagggtgttaacagtgcatggagcaggctttggagggccgtaggtcaaagtctgaggcccccgatatcccagtatgactttgggaactgccctgaggtctgggctgtgtctgagggactcctggccaaggagcgttctctccttcagaagcagcatccgtgctgtgtgctgggtcagggcgacccctggctccagggtctctacacacagctctccttggcagggagtgagaggtgcccctgtgtcctgggagtccctgagccctggcggtaggtcaggaagcagaccttgggctccaggagccccacgtgtgctgcgggtctgtcctgtgtgttgaagtcctgtgttctgaaaattgcaggaagcccttctcgcctgagtgtcggggagcagccagacgtcacccacgacccctatgagtttcttcagtctccagagcctgcggcctctgccaagacctaactctagaccaccttcagctcttttattttatttttttagttttattttgcacgtgtagagtttttgtcatcagacaaggactttgatcctgtcccctttggcatgcgggaagcagccgcggggaggtaatgaattgtctgtggtatcatgtcagcagagtctccaagccccacgaaccctgaggagtggagtcatacgcgaaggccatatggccatcgtgtcagcagagagagtctctgtacacagccccgtgaaccctgaggagtggagtcatacacgaagggcgtgtggccatcgtgtcagcagagagagtctctgtacacagccccgtgaaccctgaggagtggagtcatacgcgaagggtgtgtggccaggctgcagagctgcgtgccgtttgtgtccgagcatcacgtgtggctccagcccttgtttctgccagtgtagacacctctgtctgccccactgtcctggggtcgctcttgggaggcacaggcatgggtgtgtctggcctcattctgtatcagtccagtgtgttcctgtcatagtttgtgtctcccaggcaggccatggtaggggcctcgcaggggccattggggagcacagggccaggctggggtgaggagagctcccctgttttctgtttaattgatgagcctgggaaaggagtgtgttctgcctgcccgttacagtggagcgttccgtgtccataaaacgttttctaactggg

SEQ ID NO: 11000 - DNA, 3477 bp, Homo sapiens
gtgaagtgactgaactctcaggatccggccacgactccagttactatgatgacaggtcagaccatgagcgagagaggcacaaagaaaagaaaaagaagaagaagaagaagtccgagaaggagaagcatctggacgatgaggaaagaaggaagcgaaaggaagagaagaagcggaagcgagagagggagcactgtgacacggagggagaggctgacgactttgatcctgggaagaaggtggaggtggagccgcccccagatcggccagtccgagcgtgccggacacagccagttctcggtggaacttaaaatgctgtgagacaccagacagacagatactgtgaacttggagctctctaatgaagggataccaaagtcttgtattcaatttttttttccttaaattgtcagccgaaaatgagagcacacctattcagcaactcctggaacacttcctccgccagcttcagagaaaagatccccatggattttttgcttttcctgtcacggatgcaattgctcctggatattcaatgataataaaacatcccatggattttggcaccatgaaagacaaaattgtagctaatgaatacaagtcagttacggaatttaagggtttgctgactcacagaaacacaacagaacagacttaaaggagagtgggagaaaaggaaactcgatgagaggatcaggcagcgcctgagggtagatgttaagagcactccatgcccgaaagccctctgtattccctgcttcgggccccagtctggccattcctagcaacaaagcagatttcaagctgatgtgtgataatgcaatgacatacaataggccagataccgtgtactacaagttggcgaagaagatccttcacgcaggctttaagatgatgagcaaacaggcagctcttttgggcaatgaagatacagctgttgaggaacctgtccctgaagttgtaccagtacaagtagaaactgccaagaaatccaaaaagccgagtagagaagttatcagctgcatgtttgagcctgaagggaatgcctgcagcttgacggacagtaccgcagaggagcacgtgctggcgctggtggagcacgcagctgacgaagctcgggacaggatcaaccggttcctcccaggcggcaaggagacgttctagacccagtgtcttcagtggaaacagagcacaggctgtctgcagtctcaggcttcctagcagccctgataagagaagtagagcaatgcagatgggctatctgaagaggaacggggacgggagcctgctctacagcgtggtcaacacggccgagccggacgctgatgaggaggagacccacccggtggacttgagctcgctctccagtaagctactcccaggcttcaccacgctgggcttcaaagacgagagaagaaacaaagtcacctttctctccagtgccactactgcgctttcgatgcagaataattcagtatttggcgacttgaagtcggacgagatggagctgctctactcagcctacggagatgagacaggcgtgcagtgtgcgctgagcctgcaggagtttgtgaaggatgctgggagctacagcaagaaagtggtggacgacctcctggaccagatcacaggcggagaccactctaggacgctcttccagctgaagcagagaagaaatgttcccatgaagcctccagatgaagccaaggttggggacaccctaggagacagcagcagctctgttctggagttcatgtcgatgaagtcctatcccgacgtttctgtggatatctccatgctcagctctctggtttctttcagggcctgccatctatcacgtgatgctgtactaaagtcggatcggaatttggtgtcttattaccacggagtctgctttgtcaaccttcagatttctgttttaaagttaatgctggtcagctgtgcctgaattccaaaagaggggataatgagatgtttccctgacttctgtgagtcactctaggaaattcatagagctcaagtctggtcttctgggaaccccatttgatagctggttagtcggaagcacagaccacagcctggggctttcagttggcatcagccggtggggccatcctggagactgtgccctcacctgggaggctgccggtgcagcgcccccgagctgttctgacctccagcagcatttgtggtgcctggatccatgggtcccactgctttgcgtggtgacgttccacctgtctctgctggctctgttcaggcacttatggccgtgatttattataggggaagggtgccaacagcagcagagggacaagagtgacatccaaggaaacccagcgtgaggcccagatccactcccagcagaggcacatgggacacgcttaattcccaggagtgagctgtgacaacacacgtgaaatgcccaccagggaagcccgtcagaggcttggtgctcggggtcacagggcacccccttgccagggaaggtgaagaaggagctggaccctgacgacagccatttgaacttggatgagacgacgaagctcctgcaggacctgcacgaagcacaggcggagcgcggcggctctcggccgtcgtccaacctcagctccctgtccaacgcctccgagagggaccagcaccacctgggaagcccttctcgcctgagtgtcggggagcagccagacgtcacccacgacccctatgagtttcttcagtctccagagcctgcggcctctgccaagacctaactctagaccaccttcagctcttttattttatttttttagttttattttgcacgtgtagagtttttgtcatcagacaaggactttgatcctgtcccctttggcatgcgggaagcagccgcggggaggtaatgaattgtctgtggtatcatgtcagcagagtctccaagccccacgaaccctgaggagtggagtcatacgcgaaggccatatggccatcgtgtcagcagagagagtctctgtacacagccccgtgaaccctgaggagtggagtcatacacgaagggcgtgtggccatcgtgtcagcagagagagtctctgtacacagccccgtgaaccctgaggagtggagtcatacgcgaagggtgtgtggccaggctgcagagctgcgtgccgtttgtgtccgagcatcacgtgtggctccagcccttgtttctgccagtgtagacacctctgtctgccccactgtcctggggtcgctcttgggaggcacaggcatgggtgtgtctggcctcattctgtatcagtccagtgtgttcctgtcatagtttgtgtctcccaggcaggccatggtaggggcctcgcaggggccattggggagcacagggccaggctggggtgaggagagctcccctgttttctgtttaattgatgagcctgggaaaggagtgtgttctgcctgcccgttacagtggagcgttccgtgtccataaaacgttttctaactggg

SEQ ID NO: 11001 - DNA, 29808 bp, Homo sapiens
ggggtgataaagaaatgaaattgaaatgcagttagttttgagaatggtagttggcttttgcaaatttgttttcaggtgatcattataaaatccccccacctgcaccaatcacatccactgtgatgtggagaaagggctcatggcactgcactggggcaccgcgttggggtcacacctgccactcacggcccgccatgtccgtgttgcagaggaggagacccacccggtggacttgagctcgctctccagtaagctactcccaggcttcaccacgctgggcttcaaagacgagagaagaaacaaaggtaaatccatagtcccgtcccaggagccagccggagcagggaaggtggcaggggtttagtggagtgatggcaaatgctgctgattcgtacttcagagtttcctcactgtacctggattcatgttttcacatgggtaagattgagatcagttacagtgacaggaatgaaactcgtgttggatggggacacacacagcgggcaccttggttgcatcactggacttcaccttggtcagtgttttggggtccttgtgtttctgtccctgtcgcattacagaacatcccttcaggggtcagaatgtgtggcccctgggccttgggtctggcctgtgtgttctctccatctgcactgctgcctcctggctgcgctgctgctgggacctcctgcatggccccaccctccacttctccacctctgctgggtccctcccatgcagacagctgcatggacactgctcctgccggccctttctgcctcagccactcacaccatctgctaatgggacagctcactcttccctccaaaccatggccttggctcaagagcttccttgtttctggaatgttctttcctccagctccaggtgttgaaattctgcctggtctgggtctcctgttgaaggacgccctccactgggaaggatcctcttgccttcaccacttgtcttcaccagcccctgctcccctcttcctcttggggctgttgtggttgttgatactttttttttgttgtgtttgacacacatcttcttctcaccctctaacacagttctcaaccacagcacttttgtccctggagatgttggcagtgtccagaggcgtgttgatggtcccactggggttgggggtgctgctggcaccagatggtagggagatgccaggggtgctgctccacaccctatgggacactgcacagtacacctggcctgtgtcccccacagcgagagctggccctgggcaggcgtggtccctgcggtgtgtgttggttgggatcctccacagtgacagacggtgcgctctgcccacgtttccacacagctcttttgcttgtggagctcacccctttgcagagagctcatttccctgcggtctttggcctgcagaagtaaaatgaggggtggtgaattacacccctgctggttacacatggaaaactcaggagtgagaattttgtggagagcaagagaggtgagactggggtgctggctgccagccaggcggtccctcagcccctggagaagcggggtggggcctgcacaccgagtccttccagtgagtccagtgatgctctctcctcttcctcccagtcacctttctctccagtgccactactgcgctttcgatgcagaataattcagtatttggcgacttgaagtcggacgagatggagctgctctactcagcctacggagatgagacaggcgtgcagtgtgcgctgaggcaagtgtcggccccggggagcccttggctgctgtgcagcttgagctgtgccctggtgtgggacgtggagtcccacatgtgtgcgggtggggagagagccatcttgcagccgtccatatggcagcctgggtcttcccgttgctttcagtcatccacacaggtctgccacaggccagtcctgaaatctgggtaactcagtcagaaggtggtgatcagggcgtagcttgtgaaggggttgggggtgtgttgagcacactggatcgtattgaattgtgtttcctaagtgaccgtgctagctcaggctgcagtgacaaagcaccacagactggggtcttattcctgggggctggcatttgccatgaaggtgtgggcagggctggttcctcccgagccctctctcctgggcctgcaggtgccgtctttccgtcttttccctgtgccttcccggggccatcctgcgtgtgtctgtgtcctcggctctcctggagaccctaccgttctcaaggaccctggtcatattggatcagggccaccctaatggcctcatgtcactgcagttacctctaaaggccgttaaagtccccagctccaagtataatcacattccaaggcactggggtcgggatttcaacttacgaactctgagcgggagatacaattcaggccatggcaggctaaagtataatactaaaatcacaaatgtagcagcctgcttttccgtagaatgttgctgtgtgtattttttgttttctgtggcaaaataaaagtgggtcactcttgtaaaatttggcagtttttaatggagaaagcaacttaattttgctagcctttaagaaatggcatcttgacatatcaggtcttcattttattccaacaagaatgcagaatatgttttaaaaataaacaagaatccccttagtgcttcataaaataagtgaaaacctgaccctgatttttgtagcaaaaaatgaagtaaacgtggaaaatgaagaggaaattctagtaggagacgatggggtcataagtcagaaattaaagagttgtttgctccccaccctcccgccagccctcacctcacccctgctgtggggcctctgcccagcctgggccaaggccgtggctcccctggtgccatcctgtccgcagtcggctccctgtccacggcgtgtggctccttcaggacatcagtcacctgttgtccatgtggcacatcagtggactgtgcacaccccccgccttccccagctgtctgtccctagaacgcatcaggttccatgttgccgtgaagaaagatcattctgaccccgcctgccttgtggctgcaggggcaacactcagaagcacatctcctagggcctggcatgaggctacgtggtcccatgccagcctcagcgcacagacacccagatcctctgcccctgagtgctgcttccgtgcacgctgcgagtgccgagcttggcctgtcccgggctgtgggtgttttaacaaagacacggagtctccctgttgcctcctgtgaccgtggttcagcttctgaccagcagccatccttgttcctctctgtgaaggtctttggagtctggggagcccttctgaggcgcttgcttggtgctttgattctaagactatgcatttttgttcctggcctactttttagattgtattatattttattttttaagctgtttcatgtatatggccaagaatcaggatggtactaaaaggagtgccttggaagtgtcggcccacccctgccccacgcgcccattcctcaccggcaggcactgcccactggtgtgcttctgtccacacccacttgtgtttttaaacgcataacgagtggaaagataggagtattcttttacagatgataacatagcacacgtgtgtttctaggctgtgtgcatgtgtattcatgcttttctccctctccccactgagatctttttaacctttttgggtcatggaccactttgaaaatctaatgaaaactatcagccactccccacaaaatacccgctctgggagggtcacggggaccgaggagctgcgctggcacggcaggcttctgtgatcagggctgccgcgagggccaggcgacaagggctcctttcagcgtaccttctcccgcggcccctctagcctgcaggagtttgtgaaggatgctgggagctacagcaagaaagtggtggacgacctcctggaccagatcacaggcggagaccactctaggacgctcttccagctgaagcaggtgggctgcactcgcaccggggttggggggcaggtgcccttggggtgctgctggcgggaagagcctgcagcctgaccaggctttcggggacgaggagctgtcgcagggactctgctgccggctcctcgtcaggatctgcgtgcttctctgcacgggcaggtgtcccccggagaccgtgactgtgtgctcaccactcccagcgcactcgtaactctctatttccatcttcatctttcatctctgtcactttccttcatcctgaagagtttaaaaaaatatttcctgtagttcagatttactgacagtgatctctcagcattggcttctctgaaagtctttatttcatcttcatttttgaaattcattttccctgtgtatggaattttagatgaccttttttcccatctactgtaaaataggtttgacttgcattgttgctataaaaaagcatctgggccaagcatggtggctcacacttgtaatcccagcactttgggaggccgaggcgggcagatccaaggtcaggaggtcgagaccatcctggctaacacggtgaaaccccgtctctactaaaaaatagaaaaaattagctgggcgtggtggcaggtgcttgtagtcccagctactcgggaggctgaggcaggagaatggcatgaacccgggaggcagagcttgcagtgagccgagatcatgccactgcactccagcttgggccacagagccagaccccatctccaaaaaaaaaaaaaaagcgtctgaagtcattgtcatctttgtttcccacatgtgacgtgtcttttcggccagatctgacctgaagtctgcttttgtacagaccacaagccaggaatgtcttttacatctttaaaagggtgtttacagaaaagaaaaggaagaagaagatgcttcgggcagcgtgtggctcacagagcctcggctgctcactcccgggccctcggcaggacgggatctggccggtgctctaggagcttttgaacttttatctttctttatcagtgattttcagcattgtattttccaggtgccttggtgggcttttctttgtgttctacttagcatttgttgtttcttggatctgtctgtagttttcatcatatttggaagatttttagccattactcaaatgtcattttccaccactgcctcttcctcctcctgctggactgtggcactctgaggacagctcgtgttatctcacatggcaccgacactgtgctgccgcaccaggctgctgcagattagtttctgatgctgttggctaagttcactcacctgttctctggccacacctgaacctgttatcccagatcagttttcactgatgatgtcgtcccgcgctgctcatcacttgggctccatttgctgcttttgtgtatcttctctcatgttgtgtgtatgtttttccttacatccttgagccacgttcgtatttattgctgctgcttttgaagtcctcagtcactgagtctgtcgcctctgccgtttccggttctgtttctgtttgacactttgctgcacttggagctgtgggccattgtgcacgtgcctggtggacagtcctgaccctcgctgtctgataaaaaagcactggccacatggccgctgggaaatttgaatgtggccagtctgaatttagatgtgatgtgtgagctacaaactagatcttaaaaaactaatgcaaaaaacgtaaaaatatgagtaacgatttcttatggcccacatgttggaataaaaacatcttcaataaatttgtctaagtaaaatgcattagttaattgaatgttaagagtaattttaatgtggcagctagaattttaagagctgggtatggtggcatgcacctgtcatcagctccacaggaggctaaggtgggaggatcacttgaggccgggaggtcgaggctgcagtgcgattgcaccaccgcactctaggcaatagagcaagaccctgtctcaaaaaaaagataaaaaaacatttagaacgaggcgtgtgctcgcgttatgtctgctgggcaaggctgatctgggttctttctctctttcagagaatactgatgatcattttggcagttgttacttgtggataatggccggatcctaccaggcttgtctggggtgggtccagggcagccttattctagggttcgtgtagccttaatgctaaggagtggcccttcggggagccctgtcttttcagcgtggtctctgctgtgggtggagttcggatgagtctctgtccttcccaggctctgagaacgtttggctcatggctcccaaggaggggtcagtcccttgacctgacggtttcatctgtgcttgttacagatgaactggggtccacatgcctggtgcagtaaacccagacacccatgccgaggttttgtcatagaaaggacgtgtgtatttgcagggcgccaagcaaggtgggccaggaggctcatgtataaatcctggcctcccccactggctacaggcaaggcttgtaaagcgggggtagatctcaggaaagcagaactgaaaggcagagtcgtgcataaggacacagaggttacatgtcggcttggcctagaagggcggtatctgcaagcagggccttataggttataggtggattcaaaggttttctgatttgcagctggttaaggaggagaagctttgtttaaaaatttggggtgaagagaaaagaatgttagcttaggcttgtgggtgtggcttcctccaggcccgtcaggaagaaattcagaacaaagaacggggtcagagctcagtcttcagtttctccttatctgagcccttcatgccagtagattagtttgttggggaggtcctaggtggagggtccaggtttctgaaagacaactcagggatatacattaagatgttatctttactttctttctttttttttctttttgagacatagagtctcactctgtcacccaggctggagtgcagtggcgtgattgtggctcactgcaacctctgcctccctgattctagcgattctcctgcctcagcctcccgagtagctgggattacaggcatgcgccaccacacctggctaatttttgtatttttagtagaggcggagtttcgccatgttggccaggctggtctttaactcctgacctcaaatgatgcatccatctcagcctcccagagtggtaggatgttgtcttttctttctacagggaacagtgctgggaggttgtctttactttctacagggaacaaacatctgtctccaccttccttgactgttgttttaggatactgttaccttcttgcttatcaagtcgctgatttacttctcagagttatctaagtaactggaatttcccttgaaggaactcaagattttccttgatttccatgcttggagggctcgcaggcccctgaagagagggttgcagccaggcgggagtccccaagcagatttctgcagctctgaggagcagccccctctgcagagcctgccccaccagctcgtggttctgactctgagctctggtcaccctcccgtgtcgtggcctgcaggctccttccaggcaggaagctggcccccccaacacagcgttagaatcaggcattgctgtggggtagggaaagtgaccccctcacagcccggaaatgggaaggctctgtggtttcctctctgggttccagttagattcctttcgggaaagtgaacttggatatggagttgagtgaccccgagtgcacccccgcagtaaatgatgctcaggactaaagtgactgaaggcttttggggaaacagatgcgaacaaaacagcagtattcattttctaattaaaagcttgtgaaaatcgatgtcattgaatctgagaaacattatttcgaacaaagatcacacatgatagagtgcatatactacagcatcgctccaccggagcacaggacgggtgtgccacggaggccgacagttgtggaaggagacaatgcacggcccggcccacctgctgcaggcaccgccaggaggtgtctgcctccttcgctcctgcgcccacggcaggcccacctgccacaggcactgccaggaggtgtctgcctcctttgctcctgcacacacctgcccctgcaggactcgagctggtctcaggcaactggtcatattccaggtggaacccacgagacccttcttatcctaagcttcccataggatctaggcacatcttttttcttttgttttaagccacccaaggctgccgaaacagcatcggcgtcctctctctgtccgctccatctcgccctgtggagcgctgtccccggcacacaatcctggcgctgaggagggggctgggcgtggttgggtcagtgactggtgatgaagaaggtttggaggacccccagccttaatccattaagatggtgtgactggggagcagaattcgcagaagcgcacaagccatttttacgtgtgtgtaatgtcagcgaattgtccgtttctatgaaatcactctggaaaaactagtttctgtcctcatttacttttcagagaagaaatgttcccatgaagcctccagatgaagccaaggtaagtttttgaacatggaagggcaagccaaatattattctcacagggaaagttgtatccagcctttgaggtggggaggtctgtgtgtatgacggcgtttagaaatggagtccgtttctgatcagtaagatcaatagtgtttctcctcctcttttcatgacttgaggtgagtggtgtgaagccgcagtacattcttccaaatccagaaatgggtagtttcagagcagttggccccgctgggtgctgtccttgtgggacacccttgcaagggttgggcaggatgggccttctcaggacctgcttggtgagtagcaggtgttgtcccaagcacagtgggctctggggccagtgctggcagggcagtgctgtgagcccagactgctgcacctgccgattggcaggtgtgtgtctctgacagtcagcaggcatgggcttgggctttggtccagggtccctgggaacctggagagaccccttaacatctgtttgagggcagaggccgagctgcagggagctgatgagagagtatgtgttagggtggctgtagtctagccctgaggacacgccttgctgggaaaggaaagggaacgttgtgtgctctgtgaagtgcctgagaaatagtcctggaccctaaaattctgtgtgtcttcctgttgcataatgtccctccccaatttctttagccccaaaaagttaacaaaggattgttagtttgcgttgttggtctcagtaggtttttctttgacatggatttgcatatccattcatgagctccaacctgacagtcccttgaacagcagcctcagtgaacagggcttggtcttgtcacttactgaggggtgggttcacgtttagcaaataattagagtgatttcaatagcgagtgtgaagtaacatttcgtttttcgtttgatgtttgaattgctcttgatgtgtgtctgtctccacaggttggggacaccctaggagacagcagcagctctgttctggagttcatgtcgatgaagtcctatcccgacgtttctgtggatatctccatgctcagctctctgggtgagttgtaacaggcactttcccacagcacctggtgaaggtgtgatagaggaagaaaacacacggcctccacctcctctcccttcctgactagacagggatgccaggaaaatcttttgttacggtatttggtctttgtcccaggtttttggaccatagctcctaaaatccttggaatctcctgagtgttgtgtcttttttaagctaatgagaagtggttgcagcccctgggtaacctcaggatggggtctggccgatccccagtggctgtggatttcatcagtgttgcctaccgcctccatgaaatcccaaaaggtggggttccctagggagcctcattgctggacgcctggaggctctgggaagaaggcagccccttcccacgggtcccctctgcatcgctcccacctggggcccatccgtaccctgggtgacaccccgcagaataaatgggtaaatgtcagcctagtgtgtggacagaagagtcaaactctgcagggtatttagagaggtttcttctgagtgaaatacgaagaccgtggctgtgacacagtcccaggaggtcccaagaacatttgccgaggaggactggtctgcagcttgttttgatatgttttagggagacagaggacatcagtcagtacatgtcagttgtaacagtggttcgtgttggaaaggcgggacaacttgaagcgaggaatgtcgggtcgttggtggattcagagatttcctgattggcatttggttgaaagggttaagctctgaagagctgaagtcagaaagaaatgtgcatggttaacataagcagttgtagaagccaaggttcttgtcacatagatgaattcagccttcaggtagcaggcttcaaaaagagtagagtagatggcaaacatcactcatgaggccctcaaaggtaccagattgttagttaaatctctgttgggtcaggaagagacttggaaggggcaggagattctctacagaatgtagatttttcccacaagatacagctttgcagggctatttcaaaatatgtcaaagggatatattttgagataaaatactcagtttctttcagggcctgccatctatcacgtgatgctgtactaaagtcggatcggaatttggtgtcttattaccacggagtctgctttgtcaaccttcagatttctgttttaaagttaatgctggtcagctgtgcctgaattccaaaagaggggataatgaggcaagtccagtcccgcttcacatcatggcctgacctcattttccaggttgactttggagtgcccttggccaagagtgggaatccgttcagtccatggggcttagaattttatttttcatttacagatgtttccctgacttctgtgagtcactctaggaaattcatagagctcaagtctggtcttctgggaaccccatttgatagctggttagtcggaagcacagaccacagcctggggctttcagttggcatcagccggtggggccatcctggagactgtgccctcacctgggaggctgccggtgcagcgcccccgagctgttctgacctccagcagcatttgtggtgcctggatccatgggtcccactgctttgcgtggtgacgttccacctgtctctgctggctctgttcaggcacttatggccgtgatttattataggggaagggtgccaacagcagcagagggacaagagtgacatccaaggaaacccagcgtgaggcccagatccactcccagcagaggcacatgggacacgcttaattcccaggagtgagctgtgacaacacacgtgaaatgcccaccagggaagcccgtcagaggcttggtgctcggggtcacagggcacccccttgccaggcaggtaccaaagtccagaccccggagggaaggtgaactttagcataaaccactctgctcctgttgttggagctgtgaacaatccctagcactgggggggaccccagatgccagccgtggctggccttgccttccaggggaccctggccccaggccgctgtgacagcacttttctgcacagcagctgtttttctcagcacttctaagattttgtccttattactacttctcagcagcttggtgctgatgggctttggtgctgatgtgctgtggtgtgttagtctgtcctcacactgttataaagaaccacctgagactggtcattggtgaaggaaagaggtttaattgactcacagttcctcaggctgtttgggaggcatggctgggaggcatcaggaaacttccaatcatggcggaagatgaaggagaaacatgcatgtcttcacatggcggagcaggagagaacgcaaagggggaagtgctttgaaacaaccagatctcatgagaagtcactcactatcatgagaacagagaacagcaagggggaaatccatccccatgatccaatcaccttccaccaggaccctcccctaacattgggaattacaattcaacatgagatttgggcaggaatacagagccaaactgtatcattctgcccctgactcctctcgaatcttttgtccttttcacatttcaaaacacaatcatgccttcctaacagtcccctaaagtcttaactcattccagcattaactcagaagtccacagtccaaagtcttatctgagacaaggcaagttacttctgcctgtgagcctgtaaaatccaaaacaagttagttaattccaagatacaaatcgggtacagacattgggtaaatagacctatcccaagagggagaaatcagccaaaacaaaggggcagcaggctacaaatctgaaacccagcagggcagtcattacatcttgaggccccgaaagaatcttctttgattccttgtctcacatccaggctacactgatgcaagggatgggctcccacggccttgggcagccccgcccttgtggctctgcagggtacagcctctgtggctgctttccctggctggtgttgagtgcctgcagcttttccagatggcatggtgcaagctgtcggatctaccattctgaggtctggaggacggtggcccttttctcacagctccactaggcagtgccccagtgggtactctgtgtggggtgagggctccaacctcacatttcccctctgcactgccctagcagaggttctccatgaagggcctgcccctgcagcagacttctgcctggacaccctggcttttccatacatcctctgaaatctaggtggaggctgccaaacctcagctcttgccttctgcctacccacatacccaacaccatgtggaagcttccagggcttggggcttgcaccctctgaagcatcgacccttttagccctgtaccttggccccttttagccatggctgggacacagagcaccatggcacatgtcccagtgcttcacagagtagtggggcccttttccctcctagacccccaggcctgtgatggcagtgtctgggcaaaggtctttgaaatgtccctgaggtattaacatttggctcctctttacttacgcaaatgtctgcagccttcttgaattcctccccagaaaatgggtttttcttttctaccacatggcaggggtacaaattttccaaacttttactctctgcttcccttttaaatataagttccagtttcaggtcatttttctgtttgtgcaagtgagcataggcttttagaagcagccaagtcacctcttgaatgctttagtgcttagaaatttcttccaccaggtgccctaaatcatctctctcaagttcaaagttccacagatttctagagcagggtcacagtgctgtcagtctctcctaaagaatagcaagagtgacctttgcccccattcccaatggggtcctcgtctccatctgagaccacctcagcctggatttcactgtccatatcactatcagcatttgaatcatagccatgcaggaagtctctaggtagttccaaactttccctcatcttcctgtctttaagttctcccagctgttctagcctctgctcattacccagttctacagggcatgtctgtagtcactgttactacactttgtctactgattccctgatatcagctttgagtctctcctagtttggggctgtgttttcctgctccttcgtgtgtgttggaatcatttactggataccaggtggagtttgtagttgatgccgttgggtgataggtctgcttacacacctttgaggcctggcggcctttgttctgagtttgagaagtggcttagactctgtgggaccttccccaggcattgtcagggtaagcccagagtcaccccggggagggtgaagctggtcccctggctggtggggctcaggtgaccacagacctgtgtgcaggttcttggcatgtctggtgcacagttcaggagtgggctgggagctcatcctttccacctctcagctggacgtgctgggtccccgatggctgtggcctggaacctgctccacagtgaactgggcgggtaccagggtctgccggcctcttgcaccctccatccagctgtctggcctttgtgtgttgaggacaggagcccacaccaggcccatcctgggttgtggccacatccctccacggtgtctgtgcgtgccatgacgtggtctgtgcggtgctaggtcttgtctgatgctttgcttgagcaaaggacgctgggtgtctgccttcccttcactcactgctaagggtaatgtctgtcctccaggcctgtccacctgtctgctgtgagctcgtccactcagtttccagagcaattattgtcctgagcagagaggcctgtctggatgggcagtgtgctcctgcccttagggtagacgggccggctgagctcagccgacgtggggtcatgtcctgtttacacagggaaggtgaagaaggagctggaccctgacgacagccatttgaacttggatgagacgacgaagctcctgcaggacctgcacgaagcacaggcggagcgcggcggctctcggccgtcgtccaacctcagctccctgtccaacgcctccgagagggaccagcaccacctgggtgagatgcccccacccacgccgcatccccagagaccccagcacagtcagtgtgacgtctagacgaggtagtgggcagcattgtagttgtgggaaggctggaggctgcatgggcagcggtgctgttgtggaggtcggtttccacagatgtccttgggtcgcggcctcggtgcagagccggagcggagctgggatgctggcctggccgcacgctgggttacaggctttctgccagataccgtccccagttctgtccacccctgtgccctctgtggaccctggttccagtgtttctgctggggagagagcatggcttccttggccatgtgtcctggagtggttttggtgggtggggttttgttcccacttgtaaacactggatcactctgtcggcagagtgaatcttggcagttcttcagctgcagaggtttagctgcaaccatctgcaaaaaggccggtattttcgattccattgaccttgtgatcagggtgttaacagtgcatggagcaggctttggagggccgtaggtcaaagtctgaggcccccgatatcccagtatgactttgggaactgccctgaggtctgggctgtgtctgagggactcctggccaaggagcgttctctccttcagaagcagcatccgtgctgtgtgctgggtcagggcgacccctggctccagggtctctacacacagctctccttggcagggagtgagaggtgcccctgtgtcctgggagtccctgagccctggcggtaggtcaggaagcagaccttgggctccaggagccccacgtgtgctgcgggtctgtcctgtgtgttgaagtcctgtgttctgaaaattgcaggaagcccttctcgcctgagtgtcggggagcagccagacgtcacccacgacccctatgagtttcttcagtctccagagcctgcggcctctgccaagacctaactctagaccaccttcagctcttttattttatttttttagttttattttgcacgtgtagagtttttgtcatcagacaaggactttgatcctgtcccctttggcatgcgggaagcagccgcggggaggtaatgaattgtctgtggtatcatgtcagcagagtctccaagccccacgaaccctgaggagtggagtcatacgcgaaggccatatggccatcgtgtcagcagagagagtctctgtacacagccccgtgaaccctgaggagtggagtcatacacgaagggcgtgtggccatcgtgtcagcagagagagtctctgtacacagccccgtgaaccctgaggagtggagtcatacgcgaagggtgtgtggccaggctgcagagctgcgtgccgtttgtgtccgagcatcacgtgtggctccagcccttgtttctgccagtgtagacacctctgtctgccccactgtcctggggtcgctcttgggaggcacaggcatgggtgtgtctggcctcattctgtatcagtccagtgtgttcctgtcatagtttgtgtctcccaggcaggccatggtaggggcctcgcaggggccattggggagcacagggccaggctggggtgaggagagctcccctgttttctgtttaattgatgagcctgggaaaggagtgtgttctgcctgcccgttacagtggagcgttccgtgtccataaaacgttttctaactgggtgtttactgagtgcccatttatgttagtatttgcaaaataccataaacacagcttccagtcacaagacacagagcgccaaagtgcacccaactgctcccagcacgcgagggtgctgtgtcctaccagctggtggtggtcctctggcccagctgtcgtgcccacagtgacatcaggtgcacctgtgcgcccaccagcacctcctgcagggtgccctgctctgtgaccatggaaacttgaaagtgaagaagccacaccttccagaggccaggcatggatgggagctcagtcgtcctgggggcagcggcatttgtgactctgaagaggccccgggggcagtatgcagtgcctgggccctcacaccacgggaccacagggctgaccctcgcaggccattgacgctgggtgagcagggtggccggtgctctgtgtggcatgggtgagcattctcaggtccttcctgggccctggtggaagtgggagcaaagccattgcctctggacagagcatgaagaagccacagtagctgactcacaggaagagtttgtgaacagggctcagacgaggggcagagcctgggctgcaccctccgtgctggctgggaagcagactccacgcttgtctgcacagctgcacctgccatcctgtccctggatgccaccaagtgcaccgttccagtggctgcctgcaggctctgctccccacccccaactctgggaggacgcccttgctgcagggaggctgggaaaggcagcatctgcagtcccaagctcagtggggctgtgtaccgcacccagcttccactggggctccagaggccaggattcccttaacaggacagacacttcccacagccgggtccccagggtacagccttggagagcttgggctcaggaacaacgtggctcctgacagcaggttgctgtggagtcaggtgtcctcccaccatccgatctctgaacacctcgctccacatccactgtgagtggaggagccctcgccacatgctggggccccgtcttaaactttgcagccccaggaccatgagccaaataagcctcgtgtctttcaggttacccagtctcaggcattcttttacagcagcacaaagcagcctgcatcgagatgacacagctgtgccctcatggtgcggcaggcgtgggcggccgtccctctgggctcgtagcgctctgaagcagtttctgggtggaggtcaggtgcagcccacaggcagtgctgagctgcgggaggcagccaccctgcccggcttcctggtggcctggcccttgttcctgcacccctcactccccgaggtccccgagactggctatccctctgggcggcattgttggtccacagggtcccagcagagaggggcactgggcagcagccaccacgtggcttcagtcttagtgagtgtgcaatgaggggacatcttgaagaggcctatgggtgacctacaggccgagaggctcccctcgggtcaggagatgggagtgggctggagagtccagggctcctcccgctgccccttgggctgcgcagatacggggccaccctggtcagctgatcctgcaggacttagagggccctagtggtggctggagctgtccaggtaggtcatgcgtggcctccccgggattccggcagcctctgctcttgctagcagcccgtgagcccctccaccctcttttgtgggtacaccacctttgggtgtccccaagcccgcatgccagggcacagagcagccacggtggagggagcaggggctggggccttccctgagctcagcttctctctggtccctggatgcttcctttgtggtcacacagtgactgctgctgtggcagccatctcacgttgaggccagaggaggggcagaggggaacaggctgccacgcctgtgtctgacaggacacaagagctttccagggaggccccacagacatggccgtgtctcagcctggggagcggctgggtgtgcagctccagctctccctgtgcaggcagggaacagctaccggtaccccctaccctgctccccgcttgatgtgggcagaacctgggtaggggagggggagatagctgggagcagagggcggcagtgacagggaccacttgcagattgtggggcgtgagggccagcagctgtgcatcgccggccagggccctgcaagcctgtgcttgtctgagccaggaagcaggagggtggtgggacctgctgtgtgggaggtggcatcctctgggcttggcttgggccacacttccaacctctgtccagcccctcccaccctttggtggttctggggcctgcagaatccaagatccgctcaccccgtggtgccctcagggctttgttgcaggtggggaaactgaggcagatgcccagtcgcccagaactaccctaggtcctctgagtgtggctgagcctcccccaccatctgttaaccttgggcacttgtcaacttttaggtgcctgacccctccccgagctcacagcttcctgttctgaattgggaggcagaggaggggcaaaggggtctcctccaagacctcagtctggatagggagtgcgtgcatgggctgcaggtgtgggggtgtgcaggttcggatggggtgcaggtgtgggggtgtgcaggttcggatggggtgcaggtgtgtgtgcaggtgtgtatggggtgcgggtgtgggggtgtgcaggtgtgtatgggggtgaagctatggggtctatgcaggtgcgtatgaaggtgcatgtatgggggtgtgcagatgtgtatgaggtacaggtattgggtgtgtgagtgtgtatggggtgcaggtgggtgtgtgggtgtgcgagtgcatgatgtgtttggtgtgaggggtcggggtgtgggtgtgctgtggtttttgtctccaccaaaatttaagcgtcataaccgaatggccagtgtgatggtgttaggagtggtgaggccgtgaaggggatgaaggtccttgcagaccaggcctcagtcagcagagacctctcaccctcccagcgcctccacgtgagaacacagtgtctgtcccctccgtaggatgcagcagaaaggtaccaccttggaagctgagcgcccccctcgccagacaccagacctgctggctcctgaatcttggacttccagcctccagaatggggagaaataagtttctgttctttaaaattactccgtctcaggtattttgttacagcagcacatggggactgagactgggtgtgcaggtggtggaggagggtgtgcaggtgtgtttgagggtgtttgcctcaatctttagacagcatcagggccacaatacctgcaggtgtcaggacgttaactgcagacattggtgaataaaagccagttgtcctgagtttggcaagaaaacctttggaagaggcctcacaagccactccaggctacaagacggggcgtttgtcctgggggacctgccgtcacccttagtggtccagcagcaccgtctcagcctctctggccagagcagctgccccgcaggggcccccgagtcctggagagctctgtcaggtaggcttccctgccccttccccccatgtcgtcctgggcacccgccccagcccagctgttcctcttacttgtgtacctcgtgtgtgcccctgacagacaagatgtccatgggcagcagacctctggccactgcaggctccaggcaccagagtgagacccagcaggcttcagccggcaagagggcccctgactgtggacgactccctcacggtggtggtcttggagggacccctgctaacagaaagggtgcatccctgtccagcttcccgtcctcacccccaaagtcagcgtcagcagctggcccgcatcggaggcattcagataggagtccttggggaccccccccaaccgacacgaactggaaatgccttgagtactgagggaggagggctgcagggacaggagggaggatgtccttaaacacacttgctggcccttctcaggagaaacccttccttgtcatgggtcgtggtgaagctgtgctccgagttaagccagtgaccgaattcctgagctcagaggatggccagtgaaacaacttgctaaaatgctgagactccctgcactcgcgagactacgaaaacacgtgctgaagtcagtgagagccacggtggccaaagtctttgctcagaaccagctgcgcaggtccctcccccggttcctcctaggctgagtactctggggtcgcagtcttcctggacgtcgcctgttggttgttgtaggggttttaggtgtttttttttagggttgtcttgctgcattttgttgcggaccacaacgcgttgcaatcctagtcagctcaggggcttttcaggtatttgacttaagagctgagtagctgggcaggctgataagaacagacaaagcgagctcttttgcaggctagtaaactttcatcttagactactttggttcaggtgagggcggctaagcaggtgggaaggcagggagggggaggccgacaagcaggcattggggcccatccaagcaggggcctagtacgtcctgtttttttgtagtttgctgacctaaaccggatcaagccaccttgtcttggaaatggaccactgcatgcattatttcacctccacccgagtccatctcacgctttcctccctcctcatgcccccttgtcccctcatcctcccaactgccatggctttgtgaggcgccctgggttccatggctaccgtgtcgaccagggcagcccacccacttctcactttggtctggagttagcgagagcgacgctgcttttctcttgctcttcagcctggacctgtgatgtgataggcgtgagaaggaactgtgggttctggcggtaaggaaagtggggccttactttcccatgttcccaaaaggcagatgcaatccctgcactcctgaaggagtcaagcagtaaaggcaacacagcaagactgtccgggactcaggctgtgaggatttgtcttatgaggggcctcagaaaaggccgtttccactgtggggagtagaggaatggaaggtttcaccagggtggggtggcttccagagggtccccatggaaaaagcgtggctgagcaggcccagagggggacgaggacacgtttggggggctggaggagagtgaggatatgctcaggggtgccagagtgtcataagggcagggacggtgaggacagactcagggaccacagtgtcataaaggaaggacagggatgaagaggacagacctgtgggaccatggtgtcataaagacaggatggggacttggaccaggatagattcagggaccacggtgtcataaagacaggacggggacctggacagacttgggggaccacggtgtcataaagacaggatggggaccaggacagactctaggggcctggtgtcataaagacagggttgggacctggacagactctaggggcctggtgtcataaagacaggatggggaccaggacagactctggggatctggtgtcataaagacagggatgggaccaggacagactctgggggcctggtgtcataaagacaggcctgggacaggaccgggacagacccgggggaccacggtgtcataaagataggacggggaccaggacagactctaggggcctggtgtcataaagacatgacagggacctggacagactcaggggaccacggtgtcataaagacaggcctgggacaggaccgggacagacccgggggaccacggtgtcataaagataggacggggaccaggacagactctaggggcctggtgtcataaagacaggacagggacctggacagactcaggggaccacggtgtcataaagacaggacggggaccaggacagactctgggggcctggtgtcataaagacaggatggggacctggacagactcaggggaccacggtgtcataaagacaggatggggaccgggacagactcgggggaccacggtgtcataaagacaggacggggaccgagacagactcaggggaccatggtgtcataaagacagggatgggacctggacagactctaggggcctggtgtcataaagacagggatgggaccgggacagactctgggggcctggtgtcgtaaagacaggatggggaccaggacagactcgggggaccacggagtcataaagataggacggggaccaggacagactctaggggcctggtgtcataaagacagggatgggaccgggacagactctgggggcctggtgtcatatacacagatggaaacaggaaagactgaggaggtcatggcatcttaaagacctgatagggtgggatgggcacctgtggtctctggggtctgtggcaggggctggttctcatgtgtggtggtgcagagaaggatggagtcccagtctgagaagggggctgtctccacatccacagatgggggcagacaggaggcgcctggggtccaccacacaggattgcgctgcaggccccggtgctgggcagccagttccccgggcatcggtccggttgtcataacacaggggggcccatccagccttagtcgtgctaaggggacctgaacccaacattacaagtcttcagtgtcatgactcacagatgctcctttcacttgaattgtgtgtgggagtgtgtgtgcattgtgtggtgtgtgtgggagtgtgagcattgtgtgttgtgtgtggtattctgtgggggttgtatgtgtgcggtatgtggtgtgtgtggtttgtgtgctgtgtgtggtatgcggtgtgtagtgcaaatgggtgtgctcggtggtgtgtggtttggtgtgtgtgtggtgtgtggtttggtgtatgtgtggtattttgggggtgtggtatgtgtgcagtatgtggtgtgatgtttggtgtgtgtggtgtgcagtgtgtagtgcaagtgtgtgtgctctgtgtgtggtttgtgtggtgtgctgtgtgtggtgtgtattctgtgtgcgtgatgtgtattgtgtgtattgtgtggtccctgtgtggtatggggagagtgatgcgtttgtggttggtgtctggtacttgtcacgtggtgcacgtgcagtgtgtggtgtgtttggtgtgtgtgttttgcttctgttgcatatgtgtggcgtgaggtgtgtgcgtgtggtttgtgtggtgtgtggtgcatgtgtggtgtgcatggagttgtgtggtgtgtgatctgttttgtgtattgtgtggtgtgtgggtggtgtgtgttgtggattgtgtggtctcgtgtgtttcgtgtggtgtggtgtgtaatctgtatgatgtgtgttgtgtggtttctgttttgtggtttgtgttgtgtgtctgtggtatgtgttgtgggtggtctgtgttgtatgatatatgtggtatgtattgtgtggtgtgtggcgtgtggtgtatggtgtgtgtggtgtcttgtgtgtgtgttgtgttttgtgtgttgtggtttctgtttggtgtgtgttgtgtgttttatgtggtatgcggtgtgtggtcagtgtggtctgtgttgtgtggtgtgtggtgtgtgtggtacgtggtctgtgtggtatatggtgtgtgatgtggattgtgtggtgtggtatatgaacgtgcttacaggccacggtggtatcgaggctgagcgtgggcctgaggggaaggagctgtcctggagtcttctctggctgatgtgacgtccgtgtcccctgctcgctgtcctccatggggtccatgccccttgcttgctgtcctccgcggggtctgtgcccctcgctcactgtctgtcctctgtggggtctgtccccccggctcgctgtcctcggtggggtctatccccactgctcactgtcctctgtggggtctgtgcccctcgctcgctgtctgtcctctgtggggtctgtgccccccggctcactgtcctctgtggggtctgtccccactgctcactgtcctctgtggtgtctgtaaccctcgctcgctgtcctctgtggggtctgtccccgctgctcactgtcctctgtggggtctgtccccccggctcactgtcctccgtggggtctgtccccccggctggctgtcctctgtggggtctgtgccccccagctcactgtcctcggtggggtctgtccccgctgctcactgtcctctgtgcggtctgtccccccggcttgctgtcctccatggggtctgtcttgccggctcgctgtcctctgtggggtctgtgaccccagcttgctgtcctctgtggggtctgtccccgctgctcactgtcctctgtggggtctgtgccccctggctcgctgtcctctatggggtctgtgccccctggctcgctgtcctctgtggggtctgtctccccggctctctgtcctctgtggggtctgtgccccctgactcgctgtcctctgtggggtctgtgccccctggctcgctgtcctctgtgggatctgtctccctggctcgctgtcctccatggtgtctctccccccggctcgctgtcctctgtggggtctgtccccgctgctcactgttctccatggggtctgtctccccggctctctgttctctgtagggtctgtgtcccccggctcgctgtcctccatggggtctgtccccgcggctcgctgtcctccgtggggtctgtccccgcggctcgctgtcctctgtggggtctgtccccctggcttgctgtcctctgtgggttctgtccccctggctcactgtcctctgtggggtctgtccccctggctcgctgtcctccgtggggtctgtgccccccggctcactgtccttggtggggtctatccccactgctcactgtcctctgggcagtctgaccccctggcttgctatcctccatggggtctgtccccccggctcgctgtcctctgtgtggtctgtgccccccggctcgctgtcctctgtggggtctgtccccgctcctcactgtcctccgtggggtctgtgccctccggctcgctgtcctcggtggggtctgtcccggctgctcactgtcctctgtgcggtctgtccccccggcttgctgtcctccatgggatctgtgcccccagctcactgtcctctgtggggtctgtgaccctggctcgctgtcctctgtggggtctgtgccactcgctcgctgtcctctgtgggatctgtgacccctggctcactgttctctgtgggatctgtctccccggctcgctgtcctccatggtgtctctccccccggctcgctgtcctctgtggggtctgtcccagctgctcactgtcctccgtggggtctgtctccccggctctctgtcctctgtagggtctgtgccccccggctcactgtcctccgtggggtctgtctccctggctctctgtcctacatgggttctgtccccacggctcgctgtcctctgtgggttctgtccccctggcttgctgtcctccgtggggtctgtggcccctggctcactgtccttggtggggtctatccacactgctcaatgtcctctgggcagtctgaccccctggcttgctatcctccatggggtctgtccccccggctcgctgtcctctgtgtggtctgtgccccccggctcgctgtcctctgtggggtctgtccccgctcctcactgtcctccgtggggtctgtgccccccggctcgctgtcctcggtggggtctgtcccggctgctcactgtcctctgtgcggtctgtccccctggcttgctgtcctccatgggatctgtgcccccagctcactgtcctctgtggggtctgtccccctggcttgctgtcctctgtggggtctgtccccctggcttgctgtcctctgtggggtctgtccccctggcttgctgtcctctgtggggtctgtccccgctgctcactgtcctctgtggggtctgtgcccccagctggctgtcctcggtggggtctgtccccgctgctcactgtcctctgtgcggtctgtccccccggcttgctgtcctccatgggatctgtctccccagctcactgtcctctgtggggtctgtctccctggctcactgtcctacatggggtctgtccccgtggctcgctgtcctctgtggggtctgtccccctggcttgctgtcctctgtggggtctgtccccgtggcttgctgtccactgtggggtctgtcccccgggcttgctgtcctctgtggggtctgtccccgctgctcactgtcctctgtgggatctgtctccccagctcgctgtcctctgtggggtctgtgctcctcgctcgctgtcctctgtggggtctgtgccccctggctcactgtcctctgtggggtctgtccccgctgctcactgtcctctgtggggtctgtccccctggctcgctgtcctccgtggggtctgtacccccgactcgctgtcctctgcggggtctgtgcccgactcgctgtcctcggtggggtctatccctgctgctcactgtcctctgtggggtctgtgcccgctgctcactgtcctccgtggggtccgtgccccccggctcgctgtcctctgtggagtctctgccccctggctcgctgtcctctgtggggtctgtctccctggctcgctgtcctccgtggggtctgtccccgctgctaattgtcctccgtggggcctgtgtcccctggctcgctgtcctccatggggtctgtccacctggctcgctgtcctccgtggggtctgtgcccgctgctcgctgtcctccatggggtctgtccccctggctcgctgtcctccgtggggtctttccctgctgcttgctgtcctgcgtggggtctgtcccctcggctcgctgtcctccgcggggtctgtccccgctgctcactgtcctccgtggggtctgtccccgctgctcgctgtcctccgtgtggtctgtacccccggctcgctgtcctccgtggggtctgtccccgctgcttgctgtcctccgtggggtctcttcccccggctcgctgtcctccatggggtctgtcccccggtttgctgtcctctgtggggtctgtccccgctgctcgctgtcctccgtgtggtctgtccccccggctcgctgtcctccgtggggtctgtcccccttgctcactgtcctctgtggagtctgtacctccagcttactgtcctccgtggcgtctgtccccgctgctcattgtcctccgtggggtctgtccccctggctcactgtcctctgtggagtctgtccccgctgctcgttgtcctctgtggggtctgtctccctggcttgctcacattttctctaatttggatgtattactttttccaatcatcctttccagctcttggtgcacagtttcgacctgaagtcttcagtcttctcaaagttcttcagtgttttcttttttctctcacagactctccacctttctgttctgaaatcctgacagatgaacgtgttgtctccaggctcaaggctcaaggccgctgagcgattcccctcttctcctctctaagatctgtggtccttcctggatttgatattccaggttttaccaatgtgacttggcgacatcatttctgtttgttggcactttcatttgggttttgtttttaactgggaattgtgtttttaatgtacagggttgtctttctgtgtttctatttccttccttggtaactttgacttttctttctttcttttttttttttttgagatggagtctccctctgttgcccaggctggaatgcagtggtgcaatcttggctcactgcagcctcgacctcccaggttcaaacgattctcatgcctcagcctcccgagtagctgggattagaggcatgtgccaccatgccctgctaatctttgtatttttagtagagacagggtttcgccgtgttgcccaggctggtctggaactcctgacctcaggtgataggcacgcctcggcttcccacagtgctgggattacaggcgtgagcccccgcgcccggccaaagaaccatggtcctgtttcataactgtgagtctctcgggtctcccagagacattcttgtgtgactcaagccccagggtcctgtggccccgcatccgcctggtgtcacatttagaggaccagggaggagccaccaaaggcagcgcagagccactgtatcatggacgttcacgactgcaagaacgaagaattgttaactatttctcaatgtctctcttctcaaagaaatacatttaatatcaacttcattttctgaaggttttttcccaaagagacaacaaggactttgagcgaggcataacgtggcgaagcttcctaaccctcctctgtagagaccgcccagcccctcaagatcaaccccccaccccgtagcggccgttgagtgtctttcactgccgctctgtgacaccacgtccctcccacccctgccgccctccccacctgactggccaggagcagccgcagcgtgttcagaacctcccagccactgtccacccgggcggagaccccagccccgcgtggctggacgggcttccctgtcctgtggaaggggagacacacaggaccctgtgaagtgagctctcgggtcctgctcctctgggaagctcagagaagcctctcagggaggatctggcaggtttcagtgttgcaccagtgagtaacggctcacgagctcttcaggcattgcctcagtttctcacaggcgcagccctctgctcagtgtggcctctttctgacgtgggttttcttcttgcacctggggagtcctgggtgggcctgtgtattcgtgaacgggttgtgggacctgtcgctgtgtgggggctgtcgagcactccccagaacgtaacaaatcctcaggggaactgatgggcggtcgcgcgggcactgggtcctccacaccctggagagccgttttccgttgccactcggctctggccggggtcacattctgcagcatgtctgttcattcccctgggcggggccctgcaccgactccagcccagcccctgctccctctgcggggaacgtggccccaggcagtgctgggccattggctgtcagtgctggtcctggcggctgcattcccagtccccttggtctctgtgacagtgggcggggccggccctcccaggatctgacggcgcaggtcctccccttctgtgtcctgcagatggacacccgctccgggagccagtgttccgtcaccccagaagccatactcaataatgaaaagctggtcttgccgccccgcatctccagagtgaacggctggtcgttacccctgcactacttccaggtggtgacctgggctgtcttcgtgggcctttcctcggccaccttcgggatcttcattcccttcctgcctcacgcgtggaaatacattgcctacgtggtatccttttcatcgtggcatggtctaagcgggaggggttcctggaggaacttgcgatggacctggctgtggggtctgggccatggctgc

SEQ ID NO: 11002 - DNA, 750 bp, Homo sapiens
ggggtgataaagaaatgaaattgaaatgcagttagttttgagaatggtagttggcttttgcaaatttgttttcaggtgatcattataaaatccccccacctgcaccaatcacatccactgtgatgtggagaaagggctcatggcactgcactggggcaccgcgttggggtcacacctgccactcacggcccgccatgtccgtgttgcagaggaggagacccacccggtggacttgagctcgctctccagtaagctactcccaggcttcaccacgctgggcttcaaagacgagagaagaaacaaagtcacctttctctccagtgccactactgcgctttcgatgcagaataattcagtatttggcgacttgaagtcggacgagatggagctgctctactcagcctacggagatgagacaggcgtgcagtgtgcgctgagatggacacccgctccgggagccagtgttccgtcaccccagaagccatactcaataatgaaaagctggtcttgccgccccgcatctccagagtgaacggctggtcgttacccctgcactacttccaggtggtgacctgggctgtcttcgtgggcctttcctcggccaccttcgggatcttcattcccttcctgcctcacgcgtggaaatacattgcctacgtggtatccttttcatcgtggcatggtctaagcgggaggggttcctggaggaacttgcgatggacctggctgtggggtctgggccatggctgc

SEQ ID NO: 11003 - DNA, 8553 bp, Homo sapiens
ccacctcccgctgctccgccgtggaaagttagctcttaggccaggtgaggctgtgaccatccccatcccatcccatcgtcacggcaccctggctgtgagggagaggtaaatccctgctgctctgtcctttctgattctaggagcggctgttagctttgaagcgcagcatgtcgtttatgcaggacatggatttttctcagcaggcagctcttttgggcaatgaagatacagctgttgaggaacctgtccctgaagttgtaccagtacaagtagaaactgccaagaaatccaaaaagccgagtagagaagttatcaggtaaaggttctgtggaaaccacatttgcttttggagttgagcaccatagccaggaaagcaggtgccttgtaggggagagtgagtgagtgagagaacggatgtcatgtcacatagacattcttggtgtagcttattctggcaggaggagtgtggccagacagcccctcctgcccaccggccacgtgcactctctgacccaggtgtggtacccaagcccgtccgatcacccctgcccccaactgctagtgactggtggtctctgtctctacacgccgttaagatcattggcccctccctcccctgcacagcgcctgccggcagccaaggctgtgcccttgtcccagactgtgccgcacaagcgggctgactttgggcagccagcattggcagggggcttctttgttgctgtggggcagatgcacactcctgaactgctcgcttctgtgtctgtgtagacgctggagtggagcaggtgcaggcctgtggtcaggaaggtgtggatgctgcgggggaagcaggtgaggactgcaggccacagctccctgtagctctgctccctcccacagggagcagccgacttggctggtccttcagggaaccttcttcctttttttctaaaccccagagtggttttcatgggggctctttgtctcatggtggctgagcattgagattgtatcaaagtccgtatcacacgtcattcctgtagacgctcctccacctatgtgaggtggctgcctgataggaccaaacaaagcgagagtatcgccaggggccttagaggcaccaagagcacttaacatagcctgcagcgggcagaagcgcctggcacagagcctgcttcatcacgtgtcacttgctgagtgcaggccccagagagcgcagtctcaggacatccaccctcatggccgtgtgtctgacagcactgtggctcgcggtcttcccagtatcctgagaggactggcctgttgccatcctggggacagatcagatttgaaggatggtttctgctgaagtgtattgcttttgtgccatcttgtgggaagtcagggaccgtctggagttggtactgaacgtccttgaggcaattgtgatggtcacggccctccattgtttgtttccttctcacatgtgtatgggactcacgtggatttaacaggtggggcggcagcggtgctgggctcggtgcttctgctctgagcagctccctccaaccgtcaaaagggagagtggtcttgagaccagcccctcaggtcctgcagccttggcttaggagacagggtgcgctgcgtggccagagtgtgttgcttggcaacggacgacagtcccctaaggcggtctccccacgtgcgttgcatttcccaccccgctgccgtgtgaacactcactgcgtggttggctggtggctgtgtccggcctcagcccccgactcgagtgtgctgctggccttcaggggtcggggtttcatggccgccctttgccgcctcatggtgactgagcatcgagggggaattgaagttggtgctggtcagcatgctcagctgcggtggggttgtgtcctggcagacccaccccaggttggttttgggtgtctctggtgctgcagcttcacccttgcctgtgggatccaggccctttagatggatccccagctgtcagtctgcaggcaggagagcgtgccgagctcaggcagtcaccttcacctagtgtcacagcagtgcgcatcggtaatgggctcacgcaggtgcctgagtggagcccctccctgcggagctcatggggctgtgactcctgtgtagggttgccaggttgtcactgtaggtcaggcaagggcagggccgctctcatgggcagggcttgtcctgggcctgcacctggccctaggccactcagacccatgcccaggcaagtgcccagggtgggaaggagcccactcgcttgcttctagaaccttccacactccttgggtgctacagcctgtgcccctcagctgttggagaactgcttcaggtggaacctgggaccacttgctgacgtccttgtgtgttctttgtgccacccagtggccacagcagagggggctgctgtccacccagcccagcagcaccagaccacacccgagcagccccgcctatcctgccttgctgtgaaccctgcgtagtcaggggtggcttttccagtcacttttctgatggggcctttaataactaaccagtgtgggcatctgttactttgttgcttttgttgctaaagcactttaactgagtttgcactgcgttgaaaaataggaagtctgtctacttggcttacacttaccctttattttaataaaagtgtcttaatttgtcatttggttagggtgaaaagggatgctttgagacctaaaaggagttaagtatgctctgccagctctgtgtctgagggcagggtcggtagaagctgggttaggtgccgacgcatggggagcaggtgtgcggtggggacgctgcctccaggtgacttggttgtccccacctcacagctgcatgtttgagcctgaagggaatgcctgcagcttgacggacagtaccgcagaggagcacgtgctggcgctggtggagcacgcagctgacgaagctcgggacaggatcaaccggttcctcccaggcggcaaggtagtgctctgtggccaccgagagagggtgccacgtggccccagactctctgtgtgcctctccttctgggttggtgctgtgtgatctagcacagccaccgggatccagaggtcagcgtggggccctgacgggaggtccggatcagacacacataaggctggtctcttcagtcggggtccaggtgcctctggcagggctgccgctggtgtttcatgcatcgtggaggccacgtggtcactgacctcatttccttgatggaggccctgctgcaggctaatcctttctcttggagtgaatgctgacttctgtgtctctgtcactgggtgttgacgtgaggcaccgcccttgttattccagtgggggtgctggtgttggatccgacagatggtccataataggccaccgactgtgttcacgtggctcctgccacagatggtctttgtggtggtggggcccactcagctgaccacgctctcctttctggcaggagacgttctagacccagtgtcttcagtggaaacagagcacaggctgtctgcagtctcaggcttcctagcagccctgataagagaagtagagcaatgcaggtgacattaatccttgcaggtttcatttcacctctatatccaacattttatctcaacatgtagtctgtagaaaacgttaatttgagctttatgggtttttttcatattaagtcttcaaaatgcacatgggatgggatgtaaagaacgctgaagtgggggcatttcagaggtgtctgctgctttttgcctgtgcctgctgggaagttgcagtgctctgtgtggcttgcgtgttgcgaggttgcggtctgcgtggctcacgtgttgggaggtcgtggtctgcgtggctcacgtgttgggaagttgcagtggtctgtatggcttgcgtgttgggaggttgcagtctgtgtggcccgtgtgttgggaggttgtggtctgcgtggcttgtgtgttgggaggttgtggttcacgtggcttgcatgttgggaagttgctgtggtctgcgtggcttatgtgttgggaggttgtggtttgtgtggcttgtgtgttgggaggttgcagtctgcgtggctcgtgtgttgggaagttgctgtggtctctggcttatgtgttgggaagttgctgtggtttgcgtggctcgtgtgttgggaggttgcagtttgcgtggcttgcgtgttgggaagttgctgtggtctgtgtggcttatgtgttgggaggttgtgggtttgtgtggctcaagtgttgggaggttgtggtctgcgtggctcacgtgtggggcggttgcttggctcgcctgttgggagtttgtggtttgcatggcttgtgtgttggaaagttgctgtggtctgtgtggcttatctgttgggaggttgtggtttttgtggcttgcgtgttggggggttgtggtctgtgtggctcacgtgttgggaggttgtggtctgcgtggctcacgtgttgggcagttgtctgcttggctcacgtgttgggaagttgtggtctgcgtggctcatgtgttgggaagttgtttatgtggcttgtgtgctggaggttgtggcctgcgtggctcacgtgttgggcggttgtctgcttggctcatgtgttgggaagttgtggtctgcgtggcttgtgtgttgggaagttgtttatgtggcttgtgtgctggaggttgtggtctacgtggcttgcactgtagttcttttggacagccttgttctgcagtctgtgtttcagccctggaattgccacattctccaagaagccctggtttcttgactagagagccttgtgtagaagccaggacctgggttctgggtgaagccctctgcagatagagctgggagatgcctgttgtgtgtgtctgcaccacatacatggacactgtgcagagggattctgttggcacctgtgtttacatgggttgaaaactgtttttacacggaaacttccagttccctcgtgccccgtgggttccgcccacttcttccctttcagttttgtatctgcgccgtgaggacttgtctcctaatcttcgtatcaactccgtgtcccattgagctgaccttccgcctctcccccagggccctggccatcctgtgggctctgagactttgcatggatccgcggtggggagctgcccccacacaaacgtccggctcttctcaggccaggtggctgccctgacatggcatgatgtccagcgcatggacgtcacccttgcactggagcccagccaaccgctgcatgacagccctcttcccccttgaaccccaagtctgcacacaccagtgcctcctcttcctggatcctcctgatggcctgtacacagaactggggtgtgggtggtgggtttttaaatgaaaaccagtccacacatgcttgagggctggagccgcctgccgtcagggcagtgccatgctgacctgctgaccgttccattttgtcaaggctcatgagcaattttaaatgtttactcgtgggtgaaggtttttgtttcagctgtaccccctatagcagggccatggggagcctaagaggttctccttggcacctgtgcgcgctctgctgttgccggtgagtctgaaattccagggaatgccgtgaggggccctctggcgtttgttcttggacaaatgtgctttcacccccattaagccctgcttgttggtcttcatttcatttgtgctgcgctgcccctcctgagggacagacgctcaggcagtgcttccttccagatgggctatctgaagaggaacggggacgggagcctgctctacagcgtggtcaacacggccgagccggacgctgatggtgggtgcccgctcagggctggctttatgctctccgtacactgctttttgggcctccgttgatattctgtaatgaaaagctgagccatggccatggggcagcatgagaggctgcccggcttcccgaccttgctcgcaccccaacgtgacacgtgcgctgagtggaggtgtggacggccatctcgcggggcgggggtgctggtcagacctcggtcagggctccttgggagcagcgggactcgagccatgttcctgaaaagctgccgagaggcctttaaggccaaacctcactagcatcaggaagggttcacatcccgagctcagtcttcagcaaagaccagagtgctggcccaccctgctccttgaatctggaaagcagtcttagaagagctgttagatgatgacgtcaggacagtgttgaaggatggtgcacactaggcctgtccagcccgtcaggggcactttgttggcctggaagtaattaagaggcttgtcctttgaacgaaagtgtgatcacttgggtttgaaacgcactcgcgggctcgcgtgaggaacgtgcagcctggcacgggttgcctctagattcctgcttccctcgctctcaccctcatgcctgctggtggtctttcacccagctccaccatgccagcgtggttttctccagtgtgtgaaggatagaaacgggctgatctatataatcttcagcttattttcctaaagaggatggaccgttgatccatatttagcttatgagagtgttgagaccgaggcagcggttgggaactgaggaactcctgctctgatcccatgagtggtgtgtgggtggtgacttgagcatggcagacatgctgtcagatgcacgcgctccaggtacacgccaccgtttcgctgttagaacacgcaggacaagatttcttcttggagttgttgagtgatccatttgaaaatgttctcaaagtattgctggtgtggtggccaaagatgtggtattttttattgtgttgactttggggtgataaagaaatgaaattgaaatgcagttagttttgagaatggtagttggcttttgcaaatttgttttcaggtgatcattataaaatccccccacctgcaccaatcacatccactgtgatgtggagaaagggctcatggcactgcactggggcaccgcgttggggtcacacctgccactcacggcccgccatgtccgtgttgcagaggaggagacccacccggtggacttgagctcgctctccagtaagctactcccaggcttcaccacgctgggcttcaaagacgagagaagaaacaaaggtaaatccatagtcccgtcccaggagccagccggagcagggaaggtggcaggggtttagtggagtgatggcaaatgctgctgattcgtacttcagagtttcctcactgtacctggattcatgttttcacatgggtaagattgagatcagttacagtgacaggaatgaaactcgtgttggatggggacacacacagcgggcaccttggttgcatcactggacttcaccttggtcagtgttttggggtccttgtgtttctgtccctgtcgcattacagaacatcccttcaggggtcagaatgtgtggcccctgggccttgggtctggcctgtgtgttctctccatctgcactgctgcctcctggctgcgctgctgctgggacctcctgcatggccccaccctccacttctccacctctgctgggtccctcccatgcagacagctgcatggacactgctcctgccggccctttctgcctcagccactcacaccatctgctaatgggacagctcactcttccctccaaaccatggccttggctcaagagcttccttgtttctggaatgttctttcctccagctccaggtgttgaaattctgcctggtctgggtctcctgttgaaggacgccctccactgggaaggatcctcttgccttcaccacttgtcttcaccagcccctgctcccctcttcctcttggggctgttgtggttgttgatactttttttttgttgtgtttgacacacatcttcttctcaccctctaacacagttctcaaccacagcacttttgtccctggagatgttggcagtgtccagaggcgtgttgatggtcccactggggttgggggtgctgctggcaccagatggtagggagatgccaggggtgctgctccacaccctatgggacactgcacagtacacctggcctgtgtcccccacagcgagagctggccctgggcaggcgtggtccctgcggtgtgtgttggttgggatcctccacagtgacagacggtgcgctctgcccacgtttccacacagctcttttgcttgtggagctcacccctttgcagagagctcatttccctgcggtctttggcctgcagaagtaaaatgaggggtggtgaattacacccctgctggttacacatggaaaactcaggagtgagaattttgtggagagcaagagaggtgagactggggtgctggctgccagccaggcggtccctcagcccctggagaagcggggtggggcctgcacaccgagtccttccagtgagtccagtgatgctctctcctcttcctcccagtcacctttctctccagtgccactactgcgctttcgatgcagaataattcagtatttggcgacttgaagtcggacgagatggagctgctctactcagcctacggagatgagacaggcgtgcagtgtgcgctgag

SEQ ID NO: 11004 - DNA, 449 bp, Homo sapiens
ccacctcccgctgctccgccgtggaaagttagctcttaggccaggagcggctgttagctttgaagcgcagcatgtcgtttatgcaggacatggatttttctcagcaggcagctcttttgggcaatgaagatacagctgttgaggaacctgtccctgaagttgtaccagtacaagtagaaactgccaagaaatccaaaaagccgagtagagaagttatcagaggaggagacccacccggtggacttgagctcgctctccagtaagctactcccaggcttcaccacgctgggcttcaaagacgagagaagaaacaaagtcacctttctctccagtgccactactgcgctttcgatgcagaataattcagtatttggcgacttgaagtcggacgagatggagctgctctactcagcctacggagatgagacaggcgtgcagtgtgcgctgag

SEQ ID NO: 11005 - DNA, 29060 bp, Homo sapiens
tttccggcgcggcccagcgagctcggcaacctcggcgcagcgagcgcgggcggccagccagggccagggggcggtggcggccaaggtccgaccgggtgccagctgttcccagcccccgcctcgggcccgccgccggcgccgccatgggcaagaagcacaagaagcacaaggccgagtggcgctcgtcctacgagggtgaggcggcggcgctttgtgacgcgcggcgggcggggtcccgggcacgggggaggagttccgggcacgcggacgggggtcctgggcaccgggcgaggtcctggccacgagggaggggttctgggcacgcgggagggggtcctgggatttcgggcagggaaccgggcacacgtgaggggtcctgggtaggcgcttacgttcctggtagagggttctgggttcgaggctgcaagcccactcaccccggtcctggagactagggaagcatctgtgctggcttttgtgtggagctcagggagaagctgggctgccctttctcccgcctttccctccctctcccttgctcccgcagcagctccatgggtgtcagcgggcagcacgggcgcctgcaggaagtcaggcgagggtgaaccgaagtgctgggggtttctaggagggagatcgggctccggggttccaggtccctcttaatccatcttcttgaacgagtaatgtgaacaacatcccacagggcctctggtgaggacaccgtggctcgaaagggacctgaagctccctgcggaggggaagggagaacaaggaggcagtgacatgccgccactgtggtcttcccttccgtctttccctgctggttggcagccccgctgtactccttagggaggcctttccctcttagcaccttcacgtctcacctggctgcgtggcgtttgcacctgagcacgcgggtagaactcggtctgtgtctgtgcagattatgccgacaagcccctggagaagcctctaaagctagtcctgaaggtcggaggaagtgaagtgactgaactctcaggatccggccacgactccagttactatgatgacaggtcagaccatgagcgagagaggcacaaagaaaagaaaaagaagaagaagaagaagtccgagaaggagaagcatctggacgatgaggaaagaaggaagcgaaaggtaaaggagcagcggcggtggcccggacgctgcccacgaggagcccgtggggagcctggtcccaggacccaggcagagtgcgcctgcgtggctggaggaggggagggggtgttccgttggtagcaaaacgcgaaccgctgaggcccgcagactcagttccaggatcctgggtgtgctgttcctcagcagaccctgccagggtctctgtgaggagggagcctggcatgaggaggatctcggagggggtttcccttagttctgtccctcccctgagaactgcgaggggattgggcagacctgtccggatcccgcctactcctgcctttctcactcccttgactctgccgcccaggaagagaagaagcggaagcgagagagggagcactgtgacacggagggagaggctgacgactttgatcctgggaagaaggtggaggtggagccgcccccagatcggccagtccgagcgtgccggacacagccaggcaagggtgcacttttagagactctcctggtgttcacagctcatcgttgtaaatgaggggtcggcaccgtgtcctgttgctttggggagaagcatgggagggaggagagctggtatttccagggcctcatcccaggtgtcctctggcctgaggtttcctccggtgtctctgaatgtctagagcaaggcgtggccagttaccactggtgcccttcagttttgttttttaacttgttagctaaggatggcttatatgttttttaagcgttcataaaaagaaacaaaaaggcatctccacagagaccaatcgtatgtgacccgcaaagcctagactgttttttgtctggcctttatgtaaaaagtttgccagccctgggtcttgaagtttggttttgtttgcacttaagacagtattggaacagtagccccatctgggtcagactggtaagagagatgcatgtcagtgaaaacgcaggtaattccccttgggaagaagggacctcgaggcccaaatggtgggtctgaagttgctgaaagtgaccataggctgagacaaaggaagctggaggcctttagtagaatctctgtcgtgggcaccatctgcgaaggatggcatttggctggaatttccagttgacaaggacttgccctctgagttctctttgtccccagccttcctgtgcacaactcacagtgatgaggcatttgtacctaagacaaggggtgtctcttcccagcaactctcagcatccagtggttcctggattatagggaaacagacggctgggctttgggacatgggacatcagggagtggggaggctagtgctgcgatcattcaggccgtcagaaactgtctgaggcctgctggctccactgaaggaaagttctggaaagctggtggccttctgagctcctgtggtcatttggctcttcaggcactttctttttttaatttatttttgaaacatggtcttgctgtgtcgcctaggctggagtgcagtgtcgtgattcactcctgggctcagataaccctgggctcaagcgatcctcccacctcagcctcccaagttgctgggactacaggcacgcaccaccacgccggccatttatttactttttgttgaattttaagggacctcaagtgaaataataatcggtgaattcaggatcaacctttatgtccagagcgtttgttccgtcgtccatttcttgtctagagtagtggtatgagctgaaaacattgctaagtgatcaccacatattgttgatgtaagggctaccggttattacaagagatttttatgactcctgctgtgggggtgccctttctacccggctgagcttggtgggagccaaggctgagtcggatgtatctttatatccccagttctcggtggaacttaaaatgctgtgagacaccagacagacagatactgtgaacttggagctctctaatgaagggataccaaagtcttgtattcaatttttttttccttaaattgtcagccgaaaatgagagcacacctattcagcaactcctggaacacttcctccgccagcttcagaggtaaaccggggcgtttctgaagagctagtgtctgggggggtgtggtgtcatcttttctgaggccttattccccacgccagcctcgtcagctgtgaaacagaccctgcaccttctcttggtgactcccagtccacttcggggtgcgtaggaagagttcatgaactcattagtggctcactctgaagtcagagtagagtgagggaagtcaaggctagagctgggacattgatggccgccaggatgcgttgggggaatttttattatatctgaaatacctatcacaataaattaaaagacgctcgtaacttttttatttttaagaaacaaaattcggtcagttgtatccaatttttggattgtaagagattttgtatcatttagaaatctagatttttccgctttaagatgtctttgctttcagaaaagatccccatggattttttgcttttcctgtcacggatgcaattgctcctggatattcaatgataataaaacatcccatggattttggcaccatgaaagacaaaattgtagctaatgaatacaagtcagttacggaatttaaggtaagttactttcattgcccgaagtaatcgtggcatagttctgtgtattcatgtcttgtgaagacttcattcaccttagatcatttctagtttttgagctttcacaggtgtttctgtgttcggatgatgttttacagacacagcattaaggaaatgattggtcgtgaacgttttctctgtgctttggtctagaaactaggtcaggttgcacgctgttagaagtctgtttcttttctttctaagttactgcgctggcgtaaataggacatgttgtttcaagcagtgaggtgtccggtgtggcacggcttgagactagacatttttaaaaacatacttctttttaattcttagttttgtcttacactaattgagcatttagtttttttagcatagtaagtttttctgtctcctgagtactttgctcttagctctgtttcttgctactggctgtgagaattagcaactgctcattggttttgcaacccaggggaagaaagcaaaacaaatgcttgataaagttggcattagtgtagtttagaaaggcattagatttctctcttaggttccattcccctggggaaagcttgacttttctattttatgcttactgaagggtttgctgactcacagaaacacaacagaacagacttaaaggagagtgggagaaaaggaaactcgatgagaggatcaggcagcgcctgagggtagatgttaagagcactccatgcccgaaagccctctgtattccctgcttcgggccccagtctggccattcctagcaacaaagtgagaaggggagcagcattcactccgtggagtgtccgcagtggagtcttcaggggaggggctccacagcctcgggccgggccctagggctgctggctctggaaccgggacttggggagggtccagatggcacgttctcagttagggtggccggcctccggggtcatgctccagcctgacgttggtactcacctttgagaggcctgtgctgaggaaactggcctctcataataaaatactgatgcttccgtattttcaccataaattacaaaataaggttgtccttttgtggggcaaagtctttttctagtagtttgagggaaccatttggtgacagaattttaaattcgattctgtggagaaattctagagatagaggctatcactgtgccgcacgcctgccttcatcccttgacttgcacttgaaagaatcgggtcgttgcttctcgttcctgtttatgttctggagaaatgcaagaagcgcaggaaacgctttttcctcacacagcatttgtatgtgatgcttagaaagaagttacaggcttggccaactgtttgctgtaatatttttcatgcaagaccaatgtgcaactaagaaaacttctcttaagttcttaaacgttatgtttagatcagagagcccagttgaattgttttctactcgattgtagctttttccttttggtctcttggtagtcatctagagctttgctgttgtctgtggcatttcaaacctgataagtctttcctgttttcttttcaggcagatttcaagctgatgtgtgataatgcaatgacatacaataggccagataccgtgtactacaagttggcgaagaagatccttcacgcaggctttaagatgatgagcaaagtaagaaactcactggcagcagcgagctacggaaagcaggggctctgccccccgtcgcttgtgcccgaagggagcctcacagtgaacacgtgctccatccacccgccaccctcatggtgttgccccctttgctctagggtagacgtccccggccgccctctctgctcatgacctagctgtaacatctcattgagggttggtggaaagttccgcatctcttgatcttaagcctgggtgtcaggtgtcagtcttgctggatggcagccagcattgcgggcttgttttgcgtgactgcctcactgaatccagacgggacatccttgtcttccttggccatcctgagtggcttcccagatctgtgccgtgagccaggctgcatgcatcccacgtaggagaaggtaaaggggaggtgcggcacctgccgcgctctggcggtgggtcaagcccccacaaccacctcccgctgctccgccgtggaaagttagctcttaggccaggtgaggctgtgaccatccccatcccatcccatcgtcacggcaccctggctgtgagggagaggtaaatccctgctgctctgtcctttctgattctaggagcggctgttagctttgaagcgcagcatgtcgtttatgcaggacatggatttttctcagcaggcagctcttttgggcaatgaagatacagctgttgaggaacctgtccctgaagttgtaccagtacaagtagaaactgccaagaaatccaaaaagccgagtagagaagttatcaggtaaaggttctgtggaaaccacatttgcttttggagttgagcaccatagccaggaaagcaggtgccttgtaggggagagtgagtgagtgagagaacggatgtcatgtcacatagacattcttggtgtagcttattctggcaggaggagtgtggccagacagcccctcctgcccaccggccacgtgcactctctgacccaggtgtggtacccaagcccgtccgatcacccctgcccccaactgctagtgactggtggtctctgtctctacacgccgttaagatcattggcccctccctcccctgcacagcgcctgccggcagccaaggctgtgcccttgtcccagactgtgccgcacaagcgggctgactttgggcagccagcattggcagggggcttctttgttgctgtggggcagatgcacactcctgaactgctcgcttctgtgtctgtgtagacgctggagtggagcaggtgcaggcctgtggtcaggaaggtgtggatgctgcgggggaagcaggtgaggactgcaggccacagctccctgtagctctgctccctcccacagggagcagccgacttggctggtccttcagggaaccttcttcctttttttctaaaccccagagtggttttcatgggggctctttgtctcatggtggctgagcattgagattgtatcaaagtccgtatcacacgtcattcctgtagacgctcctccacctatgtgaggtggctgcctgataggaccaaacaaagcgagagtatcgccaggggccttagaggcaccaagagcacttaacatagcctgcagcgggcagaagcgcctggcacagagcctgcttcatcacgtgtcacttgctgagtgcaggccccagagagcgcagtctcaggacatccaccctcatggccgtgtgtctgacagcactgtggctcgcggtcttcccagtatcctgagaggactggcctgttgccatcctggggacagatcagatttgaaggatggtttctgctgaagtgtattgcttttgtgccatcttgtgggaagtcagggaccgtctggagttggtactgaacgtccttgaggcaattgtgatggtcacggccctccattgtttgtttccttctcacatgtgtatgggactcacgtggatttaacaggtggggcggcagcggtgctgggctcggtgcttctgctctgagcagctccctccaaccgtcaaaagggagagtggtcttgagaccagcccctcaggtcctgcagccttggcttaggagacagggtgcgctgcgtggccagagtgtgttgcttggcaacggacgacagtcccctaaggcggtctccccacgtgcgttgcatttcccaccccgctgccgtgtgaacactcactgcgtggttggctggtggctgtgtccggcctcagcccccgactcgagtgtgctgctggccttcaggggtcggggtttcatggccgccctttgccgcctcatggtgactgagcatcgagggggaattgaagttggtgctggtcagcatgctcagctgcggtggggttgtgtcctggcagacccaccccaggttggttttgggtgtctctggtgctgcagcttcacccttgcctgtgggatccaggccctttagatggatccccagctgtcagtctgcaggcaggagagcgtgccgagctcaggcagtcaccttcacctagtgtcacagcagtgcgcatcggtaatgggctcacgcaggtgcctgagtggagcccctccctgcggagctcatggggctgtgactcctgtgtagggttgccaggttgtcactgtaggtcaggcaagggcagggccgctctcatgggcagggcttgtcctgggcctgcacctggccctaggccactcagacccatgcccaggcaagtgcccagggtgggaaggagcccactcgcttgcttctagaaccttccacactccttgggtgctacagcctgtgcccctcagctgttggagaactgcttcaggtggaacctgggaccacttgctgacgtccttgtgtgttctttgtgccacccagtggccacagcagagggggctgctgtccacccagcccagcagcaccagaccacacccgagcagccccgcctatcctgccttgctgtgaaccctgcgtagtcaggggtggcttttccagtcacttttctgatggggcctttaataactaaccagtgtgggcatctgttactttgttgcttttgttgctaaagcactttaactgagtttgcactgcgttgaaaaataggaagtctgtctacttggcttacacttaccctttattttaataaaagtgtcttaatttgtcatttggttagggtgaaaagggatgctttgagacctaaaaggagttaagtatgctctgccagctctgtgtctgagggcagggtcggtagaagctgggttaggtgccgacgcatggggagcaggtgtgcggtggggacgctgcctccaggtgacttggttgtccccacctcacagctgcatgtttgagcctgaagggaatgcctgcagcttgacggacagtaccgcagaggagcacgtgctggcgctggtggagcacgcagctgacgaagctcgggacaggatcaaccggttcctcccaggcggcaaggtagtgctctgtggccaccgagagagggtgccacgtggccccagactctctgtgtgcctctccttctgggttggtgctgtgtgatctagcacagccaccgggatccagaggtcagcgtggggccctgacgggaggtccggatcagacacacataaggctggtctcttcagtcggggtccaggtgcctctggcagggctgccgctggtgtttcatgcatcgtggaggccacgtggtcactgacctcatttccttgatggaggccctgctgcaggctaatcctttctcttggagtgaatgctgacttctgtgtctctgtcactgggtgttgacgtgaggcaccgcccttgttattccagtgggggtgctggtgttggatccgacagatggtccataataggccaccgactgtgttcacgtggctcctgccacagatggtctttgtggtggtggggcccactcagctgaccacgctctcctttctggcaggagacgttctagacccagtgtcttcagtggaaacagagcacaggctgtctgcagtctcaggcttcctagcagccctgataagagaagtagagcaatgcaggtgacattaatccttgcaggtttcatttcacctctatatccaacattttatctcaacatgtagtctgtagaaaacgttaatttgagctttatgggtttttttcatattaagtcttcaaaatgcacatgggatgggatgtaaagaacgctgaagtgggggcatttcagaggtgtctgctgctttttgcctgtgcctgctgggaagttgcagtgctctgtgtggcttgcgtgttgcgaggttgcggtctgcgtggctcacgtgttgggaggtcgtggtctgcgtggctcacgtgttgggaagttgcagtggtctgtatggcttgcgtgttgggaggttgcagtctgtgtggcccgtgtgttgggaggttgtggtctgcgtggcttgtgtgttgggaggttgtggttcacgtggcttgcatgttgggaagttgctgtggtctgcgtggcttatgtgttgggaggttgtggtttgtgtggcttgtgtgttgggaggttgcagtctgcgtggctcgtgtgttgggaagttgctgtggtctctggcttatgtgttgggaagttgctgtggtttgcgtggctcgtgtgttgggaggttgcagtttgcgtggcttgcgtgttgggaagttgctgtggtctgtgtggcttatgtgttgggaggttgtgggtttgtgtggctcaagtgttgggaggttgtggtctgcgtggctcacgtgtggggcggttgcttggctcgcctgttgggagtttgtggtttgcatggcttgtgtgttggaaagttgctgtggtctgtgtggcttatctgttgggaggttgtggtttttgtggcttgcgtgttggggggttgtggtctgtgtggctcacgtgttgggaggttgtggtctgcgtggctcacgtgttgggcagttgtctgcttggctcacgtgttgggaagttgtggtctgcgtggctcatgtgttgggaagttgtttatgtggcttgtgtgctggaggttgtggcctgcgtggctcacgtgttgggcggttgtctgcttggctcatgtgttgggaagttgtggtctgcgtggcttgtgtgttgggaagttgtttatgtggcttgtgtgctggaggttgtggtctacgtggcttgcactgtagttcttttggacagccttgttctgcagtctgtgtttcagccctggaattgccacattctccaagaagccctggtttcttgactagagagccttgtgtagaagccaggacctgggttctgggtgaagccctctgcagatagagctgggagatgcctgttgtgtgtgtctgcaccacatacatggacactgtgcagagggattctgttggcacctgtgtttacatgggttgaaaactgtttttacacggaaacttccagttccctcgtgccccgtgggttccgcccacttcttccctttcagttttgtatctgcgccgtgaggacttgtctcctaatcttcgtatcaactccgtgtcccattgagctgaccttccgcctctcccccagggccctggccatcctgtgggctctgagactttgcatggatccgcggtggggagctgcccccacacaaacgtccggctcttctcaggccaggtggctgccctgacatggcatgatgtccagcgcatggacgtcacccttgcactggagcccagccaaccgctgcatgacagccctcttcccccttgaaccccaagtctgcacacaccagtgcctcctcttcctggatcctcctgatggcctgtacacagaactggggtgtgggtggtgggtttttaaatgaaaaccagtccacacatgcttgagggctggagccgcctgccgtcagggcagtgccatgctgacctgctgaccgttccattttgtcaaggctcatgagcaattttaaatgtttactcgtgggtgaaggtttttgtttcagctgtaccccctatagcagggccatggggagcctaagaggttctccttggcacctgtgcgcgctctgctgttgccggtgagtctgaaattccagggaatgccgtgaggggccctctggcgtttgttcttggacaaatgtgctttcacccccattaagccctgcttgttggtcttcatttcatttgtgctgcgctgcccctcctgagggacagacgctcaggcagtgcttccttccagatgggctatctgaagaggaacggggacgggagcctgctctacagcgtggtcaacacggccgagccggacgctgatggtgggtgcccgctcagggctggctttatgctctccgtacactgctttttgggcctccgttgatattctgtaatgaaaagctgagccatggccatggggcagcatgagaggctgcccggcttcccgaccttgctcgcaccccaacgtgacacgtgcgctgagtggaggtgtggacggccatctcgcggggcgggggtgctggtcagacctcggtcagggctccttgggagcagcgggactcgagccatgttcctgaaaagctgccgagaggcctttaaggccaaacctcactagcatcaggaagggttcacatcccgagctcagtcttcagcaaagaccagagtgctggcccaccctgctccttgaatctggaaagcagtcttagaagagctgttagatgatgacgtcaggacagtgttgaaggatggtgcacactaggcctgtccagcccgtcaggggcactttgttggcctggaagtaattaagaggcttgtcctttgaacgaaagtgtgatcacttgggtttgaaacgcactcgcgggctcgcgtgaggaacgtgcagcctggcacgggttgcctctagattcctgcttccctcgctctcaccctcatgcctgctggtggtctttcacccagctccaccatgccagcgtggttttctccagtgtgtgaaggatagaaacgggctgatctatataatcttcagcttattttcctaaagaggatggaccgttgatccatatttagcttatgagagtgttgagaccgaggcagcggttgggaactgaggaactcctgctctgatcccatgagtggtgtgtgggtggtgacttgagcatggcagacatgctgtcagatgcacgcgctccaggtacacgccaccgtttcgctgttagaacacgcaggacaagatttcttcttggagttgttgagtgatccatttgaaaatgttctcaaagtattgctggtgtggtggccaaagatgtggtattttttattgtgttgactttggggtgataaagaaatgaaattgaaatgcagttagttttgagaatggtagttggcttttgcaaatttgttttcaggtgatcattataaaatccccccacctgcaccaatcacatccactgtgatgtggagaaagggctcatggcactgcactggggcaccgcgttggggtcacacctgccactcacggcccgccatgtccgtgttgcagaggaggagacccacccggtggacttgagctcgctctccagtaagctactcccaggcttcaccacgctgggcttcaaagacgagagaagaaacaaaggtaaatccatagtcccgtcccaggagccagccggagcagggaaggtggcaggggtttagtggagtgatggcaaatgctgctgattcgtacttcagagtttcctcactgtacctggattcatgttttcacatgggtaagattgagatcagttacagtgacaggaatgaaactcgtgttggatggggacacacacagcgggcaccttggttgcatcactggacttcaccttggtcagtgttttggggtccttgtgtttctgtccctgtcgcattacagaacatcccttcaggggtcagaatgtgtggcccctgggccttgggtctggcctgtgtgttctctccatctgcactgctgcctcctggctgcgctgctgctgggacctcctgcatggccccaccctccacttctccacctctgctgggtccctcccatgcagacagctgcatggacactgctcctgccggccctttctgcctcagccactcacaccatctgctaatgggacagctcactcttccctccaaaccatggccttggctcaagagcttccttgtttctggaatgttctttcctccagctccaggtgttgaaattctgcctggtctgggtctcctgttgaaggacgccctccactgggaaggatcctcttgccttcaccacttgtcttcaccagcccctgctcccctcttcctcttggggctgttgtggttgttgatactttttttttgttgtgtttgacacacatcttcttctcaccctctaacacagttctcaaccacagcacttttgtccctggagatgttggcagtgtccagaggcgtgttgatggtcccactggggttgggggtgctgctggcaccagatggtagggagatgccaggggtgctgctccacaccctatgggacactgcacagtacacctggcctgtgtcccccacagcgagagctggccctgggcaggcgtggtccctgcggtgtgtgttggttgggatcctccacagtgacagacggtgcgctctgcccacgtttccacacagctcttttgcttgtggagctcacccctttgcagagagctcatttccctgcggtctttggcctgcagaagtaaaatgaggggtggtgaattacacccctgctggttacacatggaaaactcaggagtgagaattttgtggagagcaagagaggtgagactggggtgctggctgccagccaggcggtccctcagcccctggagaagcggggtggggcctgcacaccgagtccttccagtgagtccagtgatgctctctcctcttcctcccagtcacctttctctccagtgccactactgcgctttcgatgcagaataattcagtatttggcgacttgaagtcggacgagatggagctgctctactcagcctacggagatgagacaggcgtgcagtgtgcgctgaggcaagtgtcggccccggggagcccttggctgctgtgcagcttgagctgtgccctggtgtgggacgtggagtcccacatgtgtgcgggtggggagagagccatcttgcagccgtccatatggcagcctgggtcttcccgttgctttcagtcatccacacaggtctgccacaggccagtcctgaaatctgggtaactcagtcagaaggtggtgatcagggcgtagcttgtgaaggggttgggggtgtgttgagcacactggatcgtattgaattgtgtttcctaagtgaccgtgctagctcaggctgcagtgacaaagcaccacagactggggtcttattcctgggggctggcatttgccatgaaggtgtgggcagggctggttcctcccgagccctctctcctgggcctgcaggtgccgtctttccgtcttttccctgtgccttcccggggccatcctgcgtgtgtctgtgtcctcggctctcctggagaccctaccgttctcaaggaccctggtcatattggatcagggccaccctaatggcctcatgtcactgcagttacctctaaaggccgttaaagtccccagctccaagtataatcacattccaaggcactggggtcgggatttcaacttacgaactctgagcgggagatacaattcaggccatggcaggctaaagtataatactaaaatcacaaatgtagcagcctgcttttccgtagaatgttgctgtgtgtattttttgttttctgtggcaaaataaaagtgggtcactcttgtaaaatttggcagtttttaatggagaaagcaacttaattttgctagcctttaagaaatggcatcttgacatatcaggtcttcattttattccaacaagaatgcagaatatgttttaaaaataaacaagaatccccttagtgcttcataaaataagtgaaaacctgaccctgatttttgtagcaaaaaatgaagtaaacgtggaaaatgaagaggaaattctagtaggagacgatggggtcataagtcagaaattaaagagttgtttgctccccaccctcccgccagccctcacctcacccctgctgtggggcctctgcccagcctgggccaaggccgtggctcccctggtgccatcctgtccgcagtcggctccctgtccacggcgtgtggctccttcaggacatcagtcacctgttgtccatgtggcacatcagtggactgtgcacaccccccgccttccccagctgtctgtccctagaacgcatcaggttccatgttgccgtgaagaaagatcattctgaccccgcctgccttgtggctgcaggggcaacactcagaagcacatctcctagggcctggcatgaggctacgtggtcccatgccagcctcagcgcacagacacccagatcctctgcccctgagtgctgcttccgtgcacgctgcgagtgccgagcttggcctgtcccgggctgtgggtgttttaacaaagacacggagtctccctgttgcctcctgtgaccgtggttcagcttctgaccagcagccatccttgttcctctctgtgaaggtctttggagtctggggagcccttctgaggcgcttgcttggtgctttgattctaagactatgcatttttgttcctggcctactttttagattgtattatattttattttttaagctgtttcatgtatatggccaagaatcaggatggtactaaaaggagtgccttggaagtgtcggcccacccctgccccacgcgcccattcctcaccggcaggcactgcccactggtgtgcttctgtccacacccacttgtgtttttaaacgcataacgagtggaaagataggagtattcttttacagatgataacatagcacacgtgtgtttctaggctgtgtgcatgtgtattcatgcttttctccctctccccactgagatctttttaacctttttgggtcatggaccactttgaaaatctaatgaaaactatcagccactccccacaaaatacccgctctgggagggtcacggggaccgaggagctgcgctggcacggcaggcttctgtgatcagggctgccgcgagggccaggcgacaagggctcctttcagcgtaccttctcccgcggcccctctagcctgcaggagtttgtgaaggatgctgggagctacagcaagaaagtggtggacgacctcctggaccagatcacaggcggagaccactctaggacgctcttccagctgaagcaggtgggctgcactcgcaccggggttggggggcaggtgcccttggggtgctgctggcgggaagagcctgcagcctgaccaggctttcggggacgaggagctgtcgcagggactctgctgccggctcctcgtcaggatctgcgtgcttctctgcacgggcaggtgtcccccggagaccgtgactgtgtgctcaccactcccagcgcactcgtaactctctatttccatcttcatctttcatctctgtcactttccttcatcctgaagagtttaaaaaaatatttcctgtagttcagatttactgacagtgatctctcagcattggcttctctgaaagtctttatttcatcttcatttttgaaattcattttccctgtgtatggaattttagatgaccttttttcccatctactgtaaaataggtttgacttgcattgttgctataaaaaagcatctgggccaagcatggtggctcacacttgtaatcccagcactttgggaggccgaggcgggcagatccaaggtcaggaggtcgagaccatcctggctaacacggtgaaaccccgtctctactaaaaaatagaaaaaattagctgggcgtggtggcaggtgcttgtagtcccagctactcgggaggctgaggcaggagaatggcatgaacccgggaggcagagcttgcagtgagccgagatcatgccactgcactccagcttgggccacagagccagaccccatctccaaaaaaaaaaaaaaagcgtctgaagtcattgtcatctttgtttcccacatgtgacgtgtcttttcggccagatctgacctgaagtctgcttttgtacagaccacaagccaggaatgtcttttacatctttaaaagggtgtttacagaaaagaaaaggaagaagaagatgcttcgggcagcgtgtggctcacagagcctcggctgctcactcccgggccctcggcaggacgggatctggccggtgctctaggagcttttgaacttttatctttctttatcagtgattttcagcattgtattttccaggtgccttggtgggcttttctttgtgttctacttagcatttgttgtttcttggatctgtctgtagttttcatcatatttggaagatttttagccattactcaaatgtcattttccaccactgcctcttcctcctcctgctggactgtggcactctgaggacagctcgtgttatctcacatggcaccgacactgtgctgccgcaccaggctgctgcagattagtttctgatgctgttggctaagttcactcacctgttctctggccacacctgaacctgttatcccagatcagttttcactgatgatgtcgtcccgcgctgctcatcacttgggctccatttgctgcttttgtgtatcttctctcatgttgtgtgtatgtttttccttacatccttgagccacgttcgtatttattgctgctgcttttgaagtcctcagtcactgagtctgtcgcctctgccgtttccggttctgtttctgtttgacactttgctgcacttggagctgtgggccattgtgcacgtgcctggtggacagtcctgaccctcgctgtctgataaaaaagcactggccacatggccgctgggaaatttgaatgtggccagtctgaatttagatgtgatgtgtgagctacaaactagatcttaaaaaactaatgcaaaaaacgtaaaaatatgagtaacgatttcttatggcccacatgttggaataaaaacatcttcaataaatttgtctaagtaaaatgcattagttaattgaatgttaagagtaattttaatgtggcagctagaattttaagagctgggtatggtggcatgcacctgtcatcagctccacaggaggctaaggtgggaggatcacttgaggccgggaggtcgaggctgcagtgcgattgcaccaccgcactctaggcaatagagcaagaccctgtctcaaaaaaaagataaaaaaacatttagaacgaggcgtgtgctcgcgttatgtctgctgggcaaggctgatctgggttctttctctctttcagagaatactgatgatcattttggcagttgttacttgtggataatggccggatcctaccaggcttgtctggggtgggtccagggcagccttattctagggttcgtgtagccttaatgctaaggagtggcccttcggggagccctgtcttttcagcgtggtctctgctgtgggtggagttcggatgagtctctgtccttcccaggctctgagaacgtttggctcatggctcccaaggaggggtcagtcccttgacctgacggtttcatctgtgcttgttacagatgaactggggtccacatgcctggtgcagtaaacccagacacccatgccgaggttttgtcatagaaaggacgtgtgtatttgcagggcgccaagcaaggtgggccaggaggctcatgtataaatcctggcctcccccactggctacaggcaaggcttgtaaagcgggggtagatctcaggaaagcagaactgaaaggcagagtcgtgcataaggacacagaggttacatgtcggcttggcctagaagggcggtatctgcaagcagggccttataggttataggtggattcaaaggttttctgatttgcagctggttaaggaggagaagctttgtttaaaaatttggggtgaagagaaaagaatgttagcttaggcttgtgggtgtggcttcctccaggcccgtcaggaagaaattcagaacaaagaacggggtcagagctcagtcttcagtttctccttatctgagcccttcatgccagtagattagtttgttggggaggtcctaggtggagggtccaggtttctgaaagacaactcagggatatacattaagatgttatctttactttctttctttttttttctttttgagacatagagtctcactctgtcacccaggctggagtgcagtggcgtgattgtggctcactgcaacctctgcctccctgattctagcgattctcctgcctcagcctcccgagtagctgggattacaggcatgcgccaccacacctggctaatttttgtatttttagtagaggcggagtttcgccatgttggccaggctggtctttaactcctgacctcaaatgatgcatccatctcagcctcccagagtggtaggatgttgtcttttctttctacagggaacagtgctgggaggttgtctttactttctacagggaacaaacatctgtctccaccttccttgactgttgttttaggatactgttaccttcttgcttatcaagtcgctgatttacttctcagagttatctaagtaactggaatttcccttgaaggaactcaagattttccttgatttccatgcttggagggctcgcaggcccctgaagagagggttgcagccaggcgggagtccccaagcagatttctgcagctctgaggagcagccccctctgcagagcctgccccaccagctcgtggttctgactctgagctctggtcaccctcccgtgtcgtggcctgcaggctccttccaggcaggaagctggcccccccaacacagcgttagaatcaggcattgctgtggggtagggaaagtgaccccctcacagcccggaaatgggaaggctctgtggtttcctctctgggttccagttagattcctttcgggaaagtgaacttggatatggagttgagtgaccccgagtgcacccccgcagtaaatgatgctcaggactaaagtgactgaaggcttttggggaaacagatgcgaacaaaacagcagtattcattttctaattaaaagcttgtgaaaatcgatgtcattgaatctgagaaacattatttcgaacaaagatcacacatgatagagtgcatatactacagcatcgctccaccggagcacaggacgggtgtgccacggaggccgacagttgtggaaggagacaatgcacggcccggcccacctgctgcaggcaccgccaggaggtgtctgcctccttcgctcctgcgcccacggcaggcccacctgccacaggcactgccaggaggtgtctgcctcctttgctcctgcacacacctgcccctgcaggactcgagctggtctcaggcaactggtcatattccaggtggaacccacgagacccttcttatcctaagcttcccataggatctaggcacatcttttttcttttgttttaagccacccaaggctgccgaaacagcatcggcgtcctctctctgtccgctccatctcgccctgtggagcgctgtccccggcacacaatcctggcgctgaggagggggctgggcgtggttgggtcagtgactggtgatgaagaaggtttggaggacccccagccttaatccattaagatggtgtgactggggagcagaattcgcagaagcgcacaagccatttttacgtgtgtgtaatgtcagcgaattgtccgtttctatgaaatcactctggaaaaactagtttctgtcctcatttacttttcagagaagaaatgttcccatgaagcctccagatgaagccaaggtaagtttttgaacatggaagggcaagccaaatattattctcacagggaaagttgtatccagcctttgaggtggggaggtctgtgtgtatgacggcgtttagaaatggagtccgtttctgatcagtaagatcaatagtgtttctcctcctcttttcatgacttgaggtgagtggtgtgaagccgcagtacattcttccaaatccagaaatgggtagtttcagagcagttggccccgctgggtgctgtccttgtgggacacccttgcaagggttgggcaggatgggccttctcaggacctgcttggtgagtagcaggtgttgtcccaagcacagtgggctctggggccagtgctggcagggcagtgctgtgagcccagactgctgcacctgccgattggcaggtgtgtgtctctgacagtcagcaggcatgggcttgggctttggtccagggtccctgggaacctggagagaccccttaacatctgtttgagggcagaggccgagctgcagggagctgatgagagagtatgtgttagggtggctgtagtctagccctgaggacacgccttgctgggaaaggaaagggaacgttgtgtgctctgtgaagtgcctgagaaatagtcctggaccctaaaattctgtgtgtcttcctgttgcataatgtccctccccaatttctttagccccaaaaagttaacaaaggattgttagtttgcgttgttggtctcagtaggtttttctttgacatggatttgcatatccattcatgagctccaacctgacagtcccttgaacagcagcctcagtgaacagggcttggtcttgtcacttactgaggggtgggttcacgtttagcaaataattagagtgatttcaatagcgagtgtgaagtaacatttcgtttttcgtttgatgtttgaattgctcttgatgtgtgtctgtctccacaggttggggacaccctaggagacagcagcagctctgttctggagttcatgtcgatgaagtcctatcccgacgtttctgtggatatctccatgctcagctctctgggtgagttgtaacaggcactttcccacagcacctggtgaaggtgtgatagaggaagaaaacacacggcctccacctcctctcccttcctgactagacagggatgccaggaaaatcttttgttacggtatttggtctttgtcccaggtttttggaccatagctcctaaaatccttggaatctcctgagtgttgtgtcttttttaagctaatgagaagtggttgcagcccctgggtaacctcaggatggggtctggccgatccccagtggctgtggatttcatcagtgttgcctaccgcctccatgaaatcccaaaaggtggggttccctagggagcctcattgctggacgcctggaggctctgggaagaaggcagccccttcccacgggtcccctctgcatcgctcccacctggggcccatccgtaccctgggtgacaccccgcagaataaatgggtaaatgtcagcctagtgtgtggacagaagagtcaaactctgcagggtatttagagaggtttcttctgagtgaaatacgaagaccgtggctgtgacacagtcccaggaggtcccaagaacatttgccgaggaggactggtctgcagcttgttttgatatgttttagggagacagaggacatcagtcagtacatgtcagttgtaacagtggttcgtgttggaaaggcgggacaacttgaagcgaggaatgtcgggtcgttggtggattcagagatttcctgattggcatttggttgaaagggttaagctctgaagagctgaagtcagaaagaaatgtgcatggttaacataagcagttgtagaagccaaggttcttgtcacatagatgaattcagccttcaggtagcaggcttcaaaaagagtagagtagatggcaaacatcactcatgaggccctcaaaggtaccagattgttagttaaatctctgttgggtcaggaagagacttggaaggggcaggagattctctacagaatgtagatttttcccacaagatacagctttgcagggctatttcaaaatatgtcaaagggatatattttgagataaaatactcagtttctttcagggcctgccatctatcacgtgatgctgtactaaagtcggatcggaatttggtgtcttattaccacggagtctgctttgtcaaccttcagatttctgttttaaagttaatgctggtcagctgtgcctgaattccaaaagaggggataatgaggcaagtccagtcccgcttcacatcatggcctgacctcattttccaggttgactttggagtgcccttggccaagagtgggaatccgttcagtccatggggcttagaattttatttttcatttacagatgtttccctgacttctgtgagtcactctaggaaattcatagagctcaagtctggtcttctgggaaccccatttgatagctggttagtcggaagcacagaccacagcctggggctttcagttggcatcagccggtggggccatcctggagactgtgccctcacctgggaggctgccggtgcagcgcccccgagctgttctgacctccagcagcatttgtggtgcctggatccatgggtcccactgctttgcgtggtgacgttccacctgtctctgctggctctgttcaggcacttatggccgtgatttattataggggaagggtgccaacagcagcagagggacaagagtgacatccaaggaaacccagcgtgaggcccagatccactcccagcagaggcacatgggacacgcttaattcccaggagtgagctgtgacaacacacgtgaaatgcccaccagggaagcccgtcagaggcttggtgctcggggtcacagggcacccccttgccaggcaggtaccaaagtccagaccccggagggaaggtgaactttagcataaaccactctgctcctgttgttggagctgtgaacaatccctagcactgggggggaccccagatgccagccgtggctggccttgccttccaggggaccctggccccaggccgctgtgacagcacttttctgcacagcagctgtttttctcagcacttctaagattttgtccttattactacttctcagcagcttggtgctgatgggctttggtgctgatgtgctgtggtgtgttagtctgtcctcacactgttataaagaaccacctgagactggtcattggtgaaggaaagaggtttaattgactcacagttcctcaggctgtttgggaggcatggctgggaggcatcaggaaacttccaatcatggcggaagatgaaggagaaacatgcatgtcttcacatggcggagcaggagagaacgcaaagggggaagtgctttgaaacaaccagatctcatgagaagtcactcactatcatgagaacagagaacagcaagggggaaatccatccccatgatccaatcaccttccaccaggaccctcccctaacattgggaattacaattcaacatgagatttgggcaggaatacagagccaaactgtatcattctgcccctgactcctctcgaatcttttgtccttttcacatttcaaaacacaatcatgccttcctaacagtcccctaaagtcttaactcattccagcattaactcagaagtccacagtccaaagtcttatctgagacaaggcaagttacttctgcctgtgagcctgtaaaatccaaaacaagttagttaattccaagatacaaatcgggtacagacattgggtaaatagacctatcccaagagggagaaatcagccaaaacaaaggggcagcaggctacaaatctgaaacccagcagggcagtcattacatcttgaggccccgaaagaatcttctttgattccttgtctcacatccaggctacactgatgcaagggatgggctcccacggccttgggcagccccgcccttgtggctctgcagggtacagcctctgtggctgctttccctggctggtgttgagtgcctgcagcttttccagatggcatggtgcaagctgtcggatctaccattctgaggtctggaggacggtggcccttttctcacagctccactaggcagtgccccagtgggtactctgtgtggggtgagggctccaacctcacatttcccctctgcactgccctagcagaggttctccatgaagggcctgcccctgcagcagacttctgcctggacaccctggcttttccatacatcctctgaaatctaggtggaggctgccaaacctcagctcttgccttctgcctacccacatacccaacaccatgtggaagcttccagggcttggggcttgcaccctctgaagcatcgacccttttagccctgtaccttggccccttttagccatggctgggacacagagcaccatggcacatgtcccagtgcttcacagagtagtggggcccttttccctcctagacccccaggcctgtgatggcagtgtctgggcaaaggtctttgaaatgtccctgaggtattaacatttggctcctctttacttacgcaaatgtctgcagccttcttgaattcctccccagaaaatgggtttttcttttctaccacatggcaggggtacaaattttccaaacttttactctctgcttcccttttaaatataagttccagtttcaggtcatttttctgtttgtgcaagtgagcataggcttttagaagcagccaagtcacctcttgaatgctttagtgcttagaaatttcttccaccaggtgccctaaatcatctctctcaagttcaaagttccacagatttctagagcagggtcacagtgctgtcagtctctcctaaagaatagcaagagtgacctttgcccccattcccaatggggtcctcgtctccatctgagaccacctcagcctggatttcactgtccatatcactatcagcatttgaatcatagccatgcaggaagtctctaggtagttccaaactttccctcatcttcctgtctttaagttctcccagctgttctagcctctgctcattacccagttctacagggcatgtctgtagtcactgttactacactttgtctactgattccctgatatcagctttgagtctctcctagtttggggctgtgttttcctgctccttcgtgtgtgttggaatcatttactggataccaggtggagtttgtagttgatgccgttgggtgataggtctgcttacacacctttgaggcctggcggcctttgttctgagtttgagaagtggcttagactctgtgggaccttccccaggcattgtcagggtaagcccagagtcaccccggggagggtgaagctggtcccctggctggtggggctcaggtgaccacagacctgtgtgcaggttcttggcatgtctggtgcacagttcaggagtgggctgggagctcatcctttccacctctcagctggacgtgctgggtccccgatggctgtggcctggaacctgctccacagtgaactgggcgggtaccagggtctgccggcctcttgcaccctccatccagctgtctggcctttgtgtgttgaggacaggagcccacaccaggcccatcctgggttgtggccacatccctccacggtgtctgtgcgtgccatgacgtggtctgtgcggtgctaggtcttgtctgatgctttgcttgagcaaaggacgctgggtgtctgccttcccttcactcactgctaagggtaatgtctgtcctccaggcctgtccacctgtctgctgtgagctcgtccactcagtttccagagcaattattgtcctgagcagagaggcctgtctggatgggcagtgtgctcctgcccttagggtagacgggccggctgagctcagccgacgtggggtcatgtcctgtttacacagggaaggtgaagaaggagctggaccctgacgacagccatttgaacttggatgagacgacgaagctcctgcaggacctgcacgaagcacaggcggagcgcggcggctctcggccgtcgtccaacctcagctccctgtccaacgcctccgagagggaccagcaccacctgggtgagatgcccccacccacgccgcatccccagagaccccagcacagtcagtgtgacgtctagacgaggtagtgggcagcattgtagttgtgggaaggctggaggctgcatgggcagcggtgctgttgtggaggtcggtttccacagatgtccttgggtcgcggcctcggtgcagagccggagcggagctgggatgctggcctggccgcacgctgggttacaggctttctgccagataccgtccccagttctgtccacccctgtgccctctgtggaccctggttccagtgtttctgctggggagagagcatggcttccttggccatgtgtcctggagtggttttggtgggtggggttttgttcccacttgtaaacactggatcactctgtcggcagagtgaatcttggcagttcttcagctgcagaggtttagctgcaaccatctgcaaaaaggccggtattttcgattccattgaccttgtgatcagggtgttaacagtgcatggagcaggctttggagggccgtaggtcaaagtctgaggcccccgatatcccagtatgactttgggaactgccctgaggtctgggctgtgtctgagggactcctggccaaggagcgttctctccttcagaagcagcatccgtgctgtgtgctgggtcagggcgacccctggctccagggtctctacacacagctctccttggcagggagtgagaggtgcccctgtgtcctgggagtccctgagccctggcggtaggtcaggaagcagaccttgggctccaggagccccacgtgtgctgcgggtctgtcctgtgtgttgaagtcctgtgttctgaaaattgcaggaagcccttctcgcctgagtgtcggggagcagccagacgtcacccacgacccctatgagtttcttcagtctccagagcctgcggcctctgccaagacctaactctagaccaccttcagctcttttattttatttttttagttttattttgcacgtgtagagtttttgtcatcagacaaggactttgatcctgtcccctttggcatgcgggaagcagccgcggggaggtaatgaattgtctgtggtatcatgtcagcagagtctccaagccccacgaaccctgaggagtggagtcatacgcgaaggccatatggccatcgtgtcagcagagagagtctctgtacacagccccgtgaaccctgaggagtggagtcatacacgaagggcgtgtggccatcgtgtcagcagagagagtctctgtacacagccccgtgaaccctgaggagtggagtcatacgcgaagggtgtgtggccaggctgcagagctgcgtgccgtttgtgtccgagcatcacgtgtggctccagcccttgtttctgccagtgtagacacctctgtctgccccactgtcctggggtcgctcttgggaggcacaggcatgggtgtgtctggcctcattctgtatcagtccagtgtgttcctgtcatagtttgtgtctcccaggcaggccatggtaggggcctcgcaggggccattggggagcacagggccaggctggggtgaggagagctcccctgttttctgtttaattgatgagcctgggaaaggagtgtgttctgcctgcccgttacagtggagcgttccgtgtccataaaacgttttctaactggg

SEQ ID NO: 11006 - DNA, 2843 bp, Homo sapiens
tttccggcgcggcccagcgagctcggcaacctcggcgcagcgagcgcgggcggccagccagggccagggggcggtggcggccaaggtccgaccgggtgccagctgttcccagcccccgcctcgggcccgccgccggcgccgccatgggcaagaagcacaagaagcacaaggccgagtggcgctcgtcctacgaggattatgccgacaagcccctggagaagcctctaaagctagtcctgaaggtcggaggaagtgaagtgactgaactctcaggatccggccacgactccagttactatgatgacaggtcagaccatgagcgagagaggcacaaagaaaagaaaaagaagaagaagaagaagtccgagaaggagaagcatctggacgatgaggaaagaaggaagcgaaaggaagagaagaagcggaagcgagagagggagcactgtgacacggagggagaggctgacgactttgatcctgggaagaaggtggaggtggagccgcccccagatcggccagtccgagcgtgccggacacagccagttctcggtggaacttaaaatgctgtgagacaccagacagacagatactgtgaacttggagctctctaatgaagggataccaaagtcttgtattcaatttttttttccttaaattgtcagccgaaaatgagagcacacctattcagcaactcctggaacacttcctccgccagcttcagagaaaagatccccatggattttttgcttttcctgtcacggatgcaattgctcctggatattcaatgataataaaacatcccatggattttggcaccatgaaagacaaaattgtagctaatgaatacaagtcagttacggaatttaaggcagatttcaagctgatgtgtgataatgcaatgacatacaataggccagataccgtgtactacaagttggcgaagaagatccttcacgcaggctttaagatgatgagcaaagagcggctgttagctttgaagcgcagcatgtcgtttatgcaggacatggatttttctcagcaggcagctcttttgggcaatgaagatacagctgttgaggaacctgtccctgaagttgtaccagtacaagtagaaactgccaagaaatccaaaaagccgagtagagaagttatcagctgcatgtttgagcctgaagggaatgcctgcagcttgacggacagtaccgcagaggagcacgtgctggcgctggtggagcacgcagctgacgaagctcgggacaggatcaaccggttcctcccaggcggcaagatgggctatctgaagaggaacggggacgggagcctgctctacagcgtggtcaacacggccgagccggacgctgatgaggaggagacccacccggtggacttgagctcgctctccagtaagctactcccaggcttcaccacgctgggcttcaaagacgagagaagaaacaaagtcacctttctctccagtgccactactgcgctttcgatgcagaataattcagtatttggcgacttgaagtcggacgagatggagctgctctactcagcctacggagatgagacaggcgtgcagtgtgcgctgagcctgcaggagtttgtgaaggatgctgggagctacagcaagaaagtggtggacgacctcctggaccagatcacaggcggagaccactctaggacgctcttccagctgaagcagagaagaaatgttcccatgaagcctccagatgaagccaaggttggggacaccctaggagacagcagcagctctgttctggagttcatgtcgatgaagtcctatcccgacgtttctgtggatatctccatgctcagctctctggggaaggtgaagaaggagctggaccctgacgacagccatttgaacttggatgagacgacgaagctcctgcaggacctgcacgaagcacaggcggagcgcggcggctctcggccgtcgtccaacctcagctccctgtccaacgcctccgagagggaccagcaccacctgggaagcccttctcgcctgagtgtcggggagcagccagacgtcacccacgacccctatgagtttcttcagtctccagagcctgcggcctctgccaagacctaactctagaccaccttcagctcttttattttatttttttagttttattttgcacgtgtagagtttttgtcatcagacaaggactttgatcctgtcccctttggcatgcgggaagcagccgcggggaggtaatgaattgtctgtggtatcatgtcagcagagtctccaagccccacgaaccctgaggagtggagtcatacgcgaaggccatatggccatcgtgtcagcagagagagtctctgtacacagccccgtgaaccctgaggagtggagtcatacacgaagggcgtgtggccatcgtgtcagcagagagagtctctgtacacagccccgtgaaccctgaggagtggagtcatacgcgaagggtgtgtggccaggctgcagagctgcgtgccgtttgtgtccgagcatcacgtgtggctccagcccttgtttctgccagtgtagacacctctgtctgccccactgtcctggggtcgctcttgggaggcacaggcatgggtgtgtctggcctcattctgtatcagtccagtgtgttcctgtcatagtttgtgtctcccaggcaggccatggtaggggcctcgcaggggccattggggagcacagggccaggctggggtgaggagagctcccctgttttctgtttaattgatgagcctgggaaaggagtgtgttctgcctgcccgttacagtggagcgttccgtgtccataaaacgttttctaactggg

SEQ ID NO: 11007 - DNA, 26306 bp, Homo sapiens
tatttactttttgttgaattttaagggacctcaagtgaaataataatcggtgaattcaggatcaacctttatgtccagagcgtttgttccgtcgtccatttcttgtctagagtagtggtatgagctgaaaacattgctaagtgatcaccacatattgttgatgtaagggctaccggttattacaagagatttttatgactcctgctgtgggggtgccctttctacccggctgagcttggtgggagccaaggctgagtcggatgtatctttatatccccagttctcggtggaacttaaaatgctgtgagacaccagacagacagatactgtgaacttggagctctctaatgaagggataccaaagtcttgtattcaatttttttttccttaaattgtcagccgaaaatgagagcacacctattcagcaactcctggaacacttcctccgccagcttcagaggtaaaccggggcgtttctgaagagctagtgtctgggggggtgtggtgtcatcttttctgaggccttattccccacgccagcctcgtcagctgtgaaacagaccctgcaccttctcttggtgactcccagtccacttcggggtgcgtaggaagagttcatgaactcattagtggctcactctgaagtcagagtagagtgagggaagtcaaggctagagctgggacattgatggccgccaggatgcgttgggggaatttttattatatctgaaatacctatcacaataaattaaaagacgctcgtaacttttttatttttaagaaacaaaattcggtcagttgtatccaatttttggattgtaagagattttgtatcatttagaaatctagatttttccgctttaagatgtctttgctttcagaaaagatccccatggattttttgcttttcctgtcacggatgcaattgctcctggatattcaatgataataaaacatcccatggattttggcaccatgaaagacaaaattgtagctaatgaatacaagtcagttacggaatttaaggtaagttactttcattgcccgaagtaatcgtggcatagttctgtgtattcatgtcttgtgaagacttcattcaccttagatcatttctagtttttgagctttcacaggtgtttctgtgttcggatgatgttttacagacacagcattaaggaaatgattggtcgtgaacgttttctctgtgctttggtctagaaactaggtcaggttgcacgctgttagaagtctgtttcttttctttctaagttactgcgctggcgtaaataggacatgttgtttcaagcagtgaggtgtccggtgtggcacggcttgagactagacatttttaaaaacatacttctttttaattcttagttttgtcttacactaattgagcatttagtttttttagcatagtaagtttttctgtctcctgagtactttgctcttagctctgtttcttgctactggctgtgagaattagcaactgctcattggttttgcaacccaggggaagaaagcaaaacaaatgcttgataaagttggcattagtgtagtttagaaaggcattagatttctctcttaggttccattcccctggggaaagcttgacttttctattttatgcttactgaagggtttgctgactcacagaaacacaacagaacagacttaaaggagagtgggagaaaaggaaactcgatgagaggatcaggcagcgcctgagggtagatgttaagagcactccatgcccgaaagccctctgtattccctgcttcgggccccagtctggccattcctagcaacaaagtgagaaggggagcagcattcactccgtggagtgtccgcagtggagtcttcaggggaggggctccacagcctcgggccgggccctagggctgctggctctggaaccgggacttggggagggtccagatggcacgttctcagttagggtggccggcctccggggtcatgctccagcctgacgttggtactcacctttgagaggcctgtgctgaggaaactggcctctcataataaaatactgatgcttccgtattttcaccataaattacaaaataaggttgtccttttgtggggcaaagtctttttctagtagtttgagggaaccatttggtgacagaattttaaattcgattctgtggagaaattctagagatagaggctatcactgtgccgcacgcctgccttcatcccttgacttgcacttgaaagaatcgggtcgttgcttctcgttcctgtttatgttctggagaaatgcaagaagcgcaggaaacgctttttcctcacacagcatttgtatgtgatgcttagaaagaagttacaggcttggccaactgtttgctgtaatatttttcatgcaagaccaatgtgcaactaagaaaacttctcttaagttcttaaacgttatgtttagatcagagagcccagttgaattgttttctactcgattgtagctttttccttttggtctcttggtagtcatctagagctttgctgttgtctgtggcatttcaaacctgataagtctttcctgttttcttttcaggcagatttcaagctgatgtgtgataatgcaatgacatacaataggccagataccgtgtactacaagttggcgaagaagatccttcacgcaggctttaagatgatgagcaaagtaagaaactcactggcagcagcgagctacggaaagcaggggctctgccccccgtcgcttgtgcccgaagggagcctcacagtgaacacgtgctccatccacccgccaccctcatggtgttgccccctttgctctagggtagacgtccccggccgccctctctgctcatgacctagctgtaacatctcattgagggttggtggaaagttccgcatctcttgatcttaagcctgggtgtcaggtgtcagtcttgctggatggcagccagcattgcgggcttgttttgcgtgactgcctcactgaatccagacgggacatccttgtcttccttggccatcctgagtggcttcccagatctgtgccgtgagccaggctgcatgcatcccacgtaggagaaggtaaaggggaggtgcggcacctgccgcgctctggcggtgggtcaagcccccacaaccacctcccgctgctccgccgtggaaagttagctcttaggccaggtgaggctgtgaccatccccatcccatcccatcgtcacggcaccctggctgtgagggagaggtaaatccctgctgctctgtcctttctgattctaggagcggctgttagctttgaagcgcagcatgtcgtttatgcaggacatggatttttctcagcaggcagctcttttgggcaatgaagatacagctgttgaggaacctgtccctgaagttgtaccagtacaagtagaaactgccaagaaatccaaaaagccgagtagagaagttatcaggtaaaggttctgtggaaaccacatttgcttttggagttgagcaccatagccaggaaagcaggtgccttgtaggggagagtgagtgagtgagagaacggatgtcatgtcacatagacattcttggtgtagcttattctggcaggaggagtgtggccagacagcccctcctgcccaccggccacgtgcactctctgacccaggtgtggtacccaagcccgtccgatcacccctgcccccaactgctagtgactggtggtctctgtctctacacgccgttaagatcattggcccctccctcccctgcacagcgcctgccggcagccaaggctgtgcccttgtcccagactgtgccgcacaagcgggctgactttgggcagccagcattggcagggggcttctttgttgctgtggggcagatgcacactcctgaactgctcgcttctgtgtctgtgtagacgctggagtggagcaggtgcaggcctgtggtcaggaaggtgtggatgctgcgggggaagcaggtgaggactgcaggccacagctccctgtagctctgctccctcccacagggagcagccgacttggctggtccttcagggaaccttcttcctttttttctaaaccccagagtggttttcatgggggctctttgtctcatggtggctgagcattgagattgtatcaaagtccgtatcacacgtcattcctgtagacgctcctccacctatgtgaggtggctgcctgataggaccaaacaaagcgagagtatcgccaggggccttagaggcaccaagagcacttaacatagcctgcagcgggcagaagcgcctggcacagagcctgcttcatcacgtgtcacttgctgagtgcaggccccagagagcgcagtctcaggacatccaccctcatggccgtgtgtctgacagcactgtggctcgcggtcttcccagtatcctgagaggactggcctgttgccatcctggggacagatcagatttgaaggatggtttctgctgaagtgtattgcttttgtgccatcttgtgggaagtcagggaccgtctggagttggtactgaacgtccttgaggcaattgtgatggtcacggccctccattgtttgtttccttctcacatgtgtatgggactcacgtggatttaacaggtggggcggcagcggtgctgggctcggtgcttctgctctgagcagctccctccaaccgtcaaaagggagagtggtcttgagaccagcccctcaggtcctgcagccttggcttaggagacagggtgcgctgcgtggccagagtgtgttgcttggcaacggacgacagtcccctaaggcggtctccccacgtgcgttgcatttcccaccccgctgccgtgtgaacactcactgcgtggttggctggtggctgtgtccggcctcagcccccgactcgagtgtgctgctggccttcaggggtcggggtttcatggccgccctttgccgcctcatggtgactgagcatcgagggggaattgaagttggtgctggtcagcatgctcagctgcggtggggttgtgtcctggcagacccaccccaggttggttttgggtgtctctggtgctgcagcttcacccttgcctgtgggatccaggccctttagatggatccccagctgtcagtctgcaggcaggagagcgtgccgagctcaggcagtcaccttcacctagtgtcacagcagtgcgcatcggtaatgggctcacgcaggtgcctgagtggagcccctccctgcggagctcatggggctgtgactcctgtgtagggttgccaggttgtcactgtaggtcaggcaagggcagggccgctctcatgggcagggcttgtcctgggcctgcacctggccctaggccactcagacccatgcccaggcaagtgcccagggtgggaaggagcccactcgcttgcttctagaaccttccacactccttgggtgctacagcctgtgcccctcagctgttggagaactgcttcaggtggaacctgggaccacttgctgacgtccttgtgtgttctttgtgccacccagtggccacagcagagggggctgctgtccacccagcccagcagcaccagaccacacccgagcagccccgcctatcctgccttgctgtgaaccctgcgtagtcaggggtggcttttccagtcacttttctgatggggcctttaataactaaccagtgtgggcatctgttactttgttgcttttgttgctaaagcactttaactgagtttgcactgcgttgaaaaataggaagtctgtctacttggcttacacttaccctttattttaataaaagtgtcttaatttgtcatttggttagggtgaaaagggatgctttgagacctaaaaggagttaagtatgctctgccagctctgtgtctgagggcagggtcggtagaagctgggttaggtgccgacgcatggggagcaggtgtgcggtggggacgctgcctccaggtgacttggttgtccccacctcacagctgcatgtttgagcctgaagggaatgcctgcagcttgacggacagtaccgcagaggagcacgtgctggcgctggtggagcacgcagctgacgaagctcgggacaggatcaaccggttcctcccaggcggcaaggtagtgctctgtggccaccgagagagggtgccacgtggccccagactctctgtgtgcctctccttctgggttggtgctgtgtgatctagcacagccaccgggatccagaggtcagcgtggggccctgacgggaggtccggatcagacacacataaggctggtctcttcagtcggggtccaggtgcctctggcagggctgccgctggtgtttcatgcatcgtggaggccacgtggtcactgacctcatttccttgatggaggccctgctgcaggctaatcctttctcttggagtgaatgctgacttctgtgtctctgtcactgggtgttgacgtgaggcaccgcccttgttattccagtgggggtgctggtgttggatccgacagatggtccataataggccaccgactgtgttcacgtggctcctgccacagatggtctttgtggtggtggggcccactcagctgaccacgctctcctttctggcaggagacgttctagacccagtgtcttcagtggaaacagagcacaggctgtctgcagtctcaggcttcctagcagccctgataagagaagtagagcaatgcaggtgacattaatccttgcaggtttcatttcacctctatatccaacattttatctcaacatgtagtctgtagaaaacgttaatttgagctttatgggtttttttcatattaagtcttcaaaatgcacatgggatgggatgtaaagaacgctgaagtgggggcatttcagaggtgtctgctgctttttgcctgtgcctgctgggaagttgcagtgctctgtgtggcttgcgtgttgcgaggttgcggtctgcgtggctcacgtgttgggaggtcgtggtctgcgtggctcacgtgttgggaagttgcagtggtctgtatggcttgcgtgttgggaggttgcagtctgtgtggcccgtgtgttgggaggttgtggtctgcgtggcttgtgtgttgggaggttgtggttcacgtggcttgcatgttgggaagttgctgtggtctgcgtggcttatgtgttgggaggttgtggtttgtgtggcttgtgtgttgggaggttgcagtctgcgtggctcgtgtgttgggaagttgctgtggtctctggcttatgtgttgggaagttgctgtggtttgcgtggctcgtgtgttgggaggttgcagtttgcgtggcttgcgtgttgggaagttgctgtggtctgtgtggcttatgtgttgggaggttgtgggtttgtgtggctcaagtgttgggaggttgtggtctgcgtggctcacgtgtggggcggttgcttggctcgcctgttgggagtttgtggtttgcatggcttgtgtgttggaaagttgctgtggtctgtgtggcttatctgttgggaggttgtggtttttgtggcttgcgtgttggggggttgtggtctgtgtggctcacgtgttgggaggttgtggtctgcgtggctcacgtgttgggcagttgtctgcttggctcacgtgttgggaagttgtggtctgcgtggctcatgtgttgggaagttgtttatgtggcttgtgtgctggaggttgtggcctgcgtggctcacgtgttgggcggttgtctgcttggctcatgtgttgggaagttgtggtctgcgtggcttgtgtgttgggaagttgtttatgtggcttgtgtgctggaggttgtggtctacgtggcttgcactgtagttcttttggacagccttgttctgcagtctgtgtttcagccctggaattgccacattctccaagaagccctggtttcttgactagagagccttgtgtagaagccaggacctgggttctgggtgaagccctctgcagatagagctgggagatgcctgttgtgtgtgtctgcaccacatacatggacactgtgcagagggattctgttggcacctgtgtttacatgggttgaaaactgtttttacacggaaacttccagttccctcgtgccccgtgggttccgcccacttcttccctttcagttttgtatctgcgccgtgaggacttgtctcctaatcttcgtatcaactccgtgtcccattgagctgaccttccgcctctcccccagggccctggccatcctgtgggctctgagactttgcatggatccgcggtggggagctgcccccacacaaacgtccggctcttctcaggccaggtggctgccctgacatggcatgatgtccagcgcatggacgtcacccttgcactggagcccagccaaccgctgcatgacagccctcttcccccttgaaccccaagtctgcacacaccagtgcctcctcttcctggatcctcctgatggcctgtacacagaactggggtgtgggtggtgggtttttaaatgaaaaccagtccacacatgcttgagggctggagccgcctgccgtcagggcagtgccatgctgacctgctgaccgttccattttgtcaaggctcatgagcaattttaaatgtttactcgtgggtgaaggtttttgtttcagctgtaccccctatagcagggccatggggagcctaagaggttctccttggcacctgtgcgcgctctgctgttgccggtgagtctgaaattccagggaatgccgtgaggggccctctggcgtttgttcttggacaaatgtgctttcacccccattaagccctgcttgttggtcttcatttcatttgtgctgcgctgcccctcctgagggacagacgctcaggcagtgcttccttccagatgggctatctgaagaggaacggggacgggagcctgctctacagcgtggtcaacacggccgagccggacgctgatggtgggtgcccgctcagggctggctttatgctctccgtacactgctttttgggcctccgttgatattctgtaatgaaaagctgagccatggccatggggcagcatgagaggctgcccggcttcccgaccttgctcgcaccccaacgtgacacgtgcgctgagtggaggtgtggacggccatctcgcggggcgggggtgctggtcagacctcggtcagggctccttgggagcagcgggactcgagccatgttcctgaaaagctgccgagaggcctttaaggccaaacctcactagcatcaggaagggttcacatcccgagctcagtcttcagcaaagaccagagtgctggcccaccctgctccttgaatctggaaagcagtcttagaagagctgttagatgatgacgtcaggacagtgttgaaggatggtgcacactaggcctgtccagcccgtcaggggcactttgttggcctggaagtaattaagaggcttgtcctttgaacgaaagtgtgatcacttgggtttgaaacgcactcgcgggctcgcgtgaggaacgtgcagcctggcacgggttgcctctagattcctgcttccctcgctctcaccctcatgcctgctggtggtctttcacccagctccaccatgccagcgtggttttctccagtgtgtgaaggatagaaacgggctgatctatataatcttcagcttattttcctaaagaggatggaccgttgatccatatttagcttatgagagtgttgagaccgaggcagcggttgggaactgaggaactcctgctctgatcccatgagtggtgtgtgggtggtgacttgagcatggcagacatgctgtcagatgcacgcgctccaggtacacgccaccgtttcgctgttagaacacgcaggacaagatttcttcttggagttgttgagtgatccatttgaaaatgttctcaaagtattgctggtgtggtggccaaagatgtggtattttttattgtgttgactttggggtgataaagaaatgaaattgaaatgcagttagttttgagaatggtagttggcttttgcaaatttgttttcaggtgatcattataaaatccccccacctgcaccaatcacatccactgtgatgtggagaaagggctcatggcactgcactggggcaccgcgttggggtcacacctgccactcacggcccgccatgtccgtgttgcagaggaggagacccacccggtggacttgagctcgctctccagtaagctactcccaggcttcaccacgctgggcttcaaagacgagagaagaaacaaaggtaaatccatagtcccgtcccaggagccagccggagcagggaaggtggcaggggtttagtggagtgatggcaaatgctgctgattcgtacttcagagtttcctcactgtacctggattcatgttttcacatgggtaagattgagatcagttacagtgacaggaatgaaactcgtgttggatggggacacacacagcgggcaccttggttgcatcactggacttcaccttggtcagtgttttggggtccttgtgtttctgtccctgtcgcattacagaacatcccttcaggggtcagaatgtgtggcccctgggccttgggtctggcctgtgtgttctctccatctgcactgctgcctcctggctgcgctgctgctgggacctcctgcatggccccaccctccacttctccacctctgctgggtccctcccatgcagacagctgcatggacactgctcctgccggccctttctgcctcagccactcacaccatctgctaatgggacagctcactcttccctccaaaccatggccttggctcaagagcttccttgtttctggaatgttctttcctccagctccaggtgttgaaattctgcctggtctgggtctcctgttgaaggacgccctccactgggaaggatcctcttgccttcaccacttgtcttcaccagcccctgctcccctcttcctcttggggctgttgtggttgttgatactttttttttgttgtgtttgacacacatcttcttctcaccctctaacacagttctcaaccacagcacttttgtccctggagatgttggcagtgtccagaggcgtgttgatggtcccactggggttgggggtgctgctggcaccagatggtagggagatgccaggggtgctgctccacaccctatgggacactgcacagtacacctggcctgtgtcccccacagcgagagctggccctgggcaggcgtggtccctgcggtgtgtgttggttgggatcctccacagtgacagacggtgcgctctgcccacgtttccacacagctcttttgcttgtggagctcacccctttgcagagagctcatttccctgcggtctttggcctgcagaagtaaaatgaggggtggtgaattacacccctgctggttacacatggaaaactcaggagtgagaattttgtggagagcaagagaggtgagactggggtgctggctgccagccaggcggtccctcagcccctggagaagcggggtggggcctgcacaccgagtccttccagtgagtccagtgatgctctctcctcttcctcccagtcacctttctctccagtgccactactgcgctttcgatgcagaataattcagtatttggcgacttgaagtcggacgagatggagctgctctactcagcctacggagatgagacaggcgtgcagtgtgcgctgaggcaagtgtcggccccggggagcccttggctgctgtgcagcttgagctgtgccctggtgtgggacgtggagtcccacatgtgtgcgggtggggagagagccatcttgcagccgtccatatggcagcctgggtcttcccgttgctttcagtcatccacacaggtctgccacaggccagtcctgaaatctgggtaactcagtcagaaggtggtgatcagggcgtagcttgtgaaggggttgggggtgtgttgagcacactggatcgtattgaattgtgtttcctaagtgaccgtgctagctcaggctgcagtgacaaagcaccacagactggggtcttattcctgggggctggcatttgccatgaaggtgtgggcagggctggttcctcccgagccctctctcctgggcctgcaggtgccgtctttccgtcttttccctgtgccttcccggggccatcctgcgtgtgtctgtgtcctcggctctcctggagaccctaccgttctcaaggaccctggtcatattggatcagggccaccctaatggcctcatgtcactgcagttacctctaaaggccgttaaagtccccagctccaagtataatcacattccaaggcactggggtcgggatttcaacttacgaactctgagcgggagatacaattcaggccatggcaggctaaagtataatactaaaatcacaaatgtagcagcctgcttttccgtagaatgttgctgtgtgtattttttgttttctgtggcaaaataaaagtgggtcactcttgtaaaatttggcagtttttaatggagaaagcaacttaattttgctagcctttaagaaatggcatcttgacatatcaggtcttcattttattccaacaagaatgcagaatatgttttaaaaataaacaagaatccccttagtgcttcataaaataagtgaaaacctgaccctgatttttgtagcaaaaaatgaagtaaacgtggaaaatgaagaggaaattctagtaggagacgatggggtcataagtcagaaattaaagagttgtttgctccccaccctcccgccagccctcacctcacccctgctgtggggcctctgcccagcctgggccaaggccgtggctcccctggtgccatcctgtccgcagtcggctccctgtccacggcgtgtggctccttcaggacatcagtcacctgttgtccatgtggcacatcagtggactgtgcacaccccccgccttccccagctgtctgtccctagaacgcatcaggttccatgttgccgtgaagaaagatcattctgaccccgcctgccttgtggctgcaggggcaacactcagaagcacatctcctagggcctggcatgaggctacgtggtcccatgccagcctcagcgcacagacacccagatcctctgcccctgagtgctgcttccgtgcacgctgcgagtgccgagcttggcctgtcccgggctgtgggtgttttaacaaagacacggagtctccctgttgcctcctgtgaccgtggttcagcttctgaccagcagccatccttgttcctctctgtgaaggtctttggagtctggggagcccttctgaggcgcttgcttggtgctttgattctaagactatgcatttttgttcctggcctactttttagattgtattatattttattttttaagctgtttcatgtatatggccaagaatcaggatggtactaaaaggagtgccttggaagtgtcggcccacccctgccccacgcgcccattcctcaccggcaggcactgcccactggtgtgcttctgtccacacccacttgtgtttttaaacgcataacgagtggaaagataggagtattcttttacagatgataacatagcacacgtgtgtttctaggctgtgtgcatgtgtattcatgcttttctccctctccccactgagatctttttaacctttttgggtcatggaccactttgaaaatctaatgaaaactatcagccactccccacaaaatacccgctctgggagggtcacggggaccgaggagctgcgctggcacggcaggcttctgtgatcagggctgccgcgagggccaggcgacaagggctcctttcagcgtaccttctcccgcggcccctctagcctgcaggagtttgtgaaggatgctgggagctacagcaagaaagtggtggacgacctcctggaccagatcacaggcggagaccactctaggacgctcttccagctgaagcaggtgggctgcactcgcaccggggttggggggcaggtgcccttggggtgctgctggcgggaagagcctgcagcctgaccaggctttcggggacgaggagctgtcgcagggactctgctgccggctcctcgtcaggatctgcgtgcttctctgcacgggcaggtgtcccccggagaccgtgactgtgtgctcaccactcccagcgcactcgtaactctctatttccatcttcatctttcatctctgtcactttccttcatcctgaagagtttaaaaaaatatttcctgtagttcagatttactgacagtgatctctcagcattggcttctctgaaagtctttatttcatcttcatttttgaaattcattttccctgtgtatggaattttagatgaccttttttcccatctactgtaaaataggtttgacttgcattgttgctataaaaaagcatctgggccaagcatggtggctcacacttgtaatcccagcactttgggaggccgaggcgggcagatccaaggtcaggaggtcgagaccatcctggctaacacggtgaaaccccgtctctactaaaaaatagaaaaaattagctgggcgtggtggcaggtgcttgtagtcccagctactcgggaggctgaggcaggagaatggcatgaacccgggaggcagagcttgcagtgagccgagatcatgccactgcactccagcttgggccacagagccagaccccatctccaaaaaaaaaaaaaaagcgtctgaagtcattgtcatctttgtttcccacatgtgacgtgtcttttcggccagatctgacctgaagtctgcttttgtacagaccacaagccaggaatgtcttttacatctttaaaagggtgtttacagaaaagaaaaggaagaagaagatgcttcgggcagcgtgtggctcacagagcctcggctgctcactcccgggccctcggcaggacgggatctggccggtgctctaggagcttttgaacttttatctttctttatcagtgattttcagcattgtattttccaggtgccttggtgggcttttctttgtgttctacttagcatttgttgtttcttggatctgtctgtagttttcatcatatttggaagatttttagccattactcaaatgtcattttccaccactgcctcttcctcctcctgctggactgtggcactctgaggacagctcgtgttatctcacatggcaccgacactgtgctgccgcaccaggctgctgcagattagtttctgatgctgttggctaagttcactcacctgttctctggccacacctgaacctgttatcccagatcagttttcactgatgatgtcgtcccgcgctgctcatcacttgggctccatttgctgcttttgtgtatcttctctcatgttgtgtgtatgtttttccttacatccttgagccacgttcgtatttattgctgctgcttttgaagtcctcagtcactgagtctgtcgcctctgccgtttccggttctgtttctgtttgacactttgctgcacttggagctgtgggccattgtgcacgtgcctggtggacagtcctgaccctcgctgtctgataaaaaagcactggccacatggccgctgggaaatttgaatgtggccagtctgaatttagatgtgatgtgtgagctacaaactagatcttaaaaaactaatgcaaaaaacgtaaaaatatgagtaacgatttcttatggcccacatgttggaataaaaacatcttcaataaatttgtctaagtaaaatgcattagttaattgaatgttaagagtaattttaatgtggcagctagaattttaagagctgggtatggtggcatgcacctgtcatcagctccacaggaggctaaggtgggaggatcacttgaggccgggaggtcgaggctgcagtgcgattgcaccaccgcactctaggcaatagagcaagaccctgtctcaaaaaaaagataaaaaaacatttagaacgaggcgtgtgctcgcgttatgtctgctgggcaaggctgatctgggttctttctctctttcagagaatactgatgatcattttggcagttgttacttgtggataatggccggatcctaccaggcttgtctggggtgggtccagggcagccttattctagggttcgtgtagccttaatgctaaggagtggcccttcggggagccctgtcttttcagcgtggtctctgctgtgggtggagttcggatgagtctctgtccttcccaggctctgagaacgtttggctcatggctcccaaggaggggtcagtcccttgacctgacggtttcatctgtgcttgttacagatgaactggggtccacatgcctggtgcagtaaacccagacacccatgccgaggttttgtcatagaaaggacgtgtgtatttgcagggcgccaagcaaggtgggccaggaggctcatgtataaatcctggcctcccccactggctacaggcaaggcttgtaaagcgggggtagatctcaggaaagcagaactgaaaggcagagtcgtgcataaggacacagaggttacatgtcggcttggcctagaagggcggtatctgcaagcagggccttataggttataggtggattcaaaggttttctgatttgcagctggttaaggaggagaagctttgtttaaaaatttggggtgaagagaaaagaatgttagcttaggcttgtgggtgtggcttcctccaggcccgtcaggaagaaattcagaacaaagaacggggtcagagctcagtcttcagtttctccttatctgagcccttcatgccagtagattagtttgttggggaggtcctaggtggagggtccaggtttctgaaagacaactcagggatatacattaagatgttatctttactttctttctttttttttctttttgagacatagagtctcactctgtcacccaggctggagtgcagtggcgtgattgtggctcactgcaacctctgcctccctgattctagcgattctcctgcctcagcctcccgagtagctgggattacaggcatgcgccaccacacctggctaatttttgtatttttagtagaggcggagtttcgccatgttggccaggctggtctttaactcctgacctcaaatgatgcatccatctcagcctcccagagtggtaggatgttgtcttttctttctacagggaacagtgctgggaggttgtctttactttctacagggaacaaacatctgtctccaccttccttgactgttgttttaggatactgttaccttcttgcttatcaagtcgctgatttacttctcagagttatctaagtaactggaatttcccttgaaggaactcaagattttccttgatttccatgcttggagggctcgcaggcccctgaagagagggttgcagccaggcgggagtccccaagcagatttctgcagctctgaggagcagccccctctgcagagcctgccccaccagctcgtggttctgactctgagctctggtcaccctcccgtgtcgtggcctgcaggctccttccaggcaggaagctggcccccccaacacagcgttagaatcaggcattgctgtggggtagggaaagtgaccccctcacagcccggaaatgggaaggctctgtggtttcctctctgggttccagttagattcctttcgggaaagtgaacttggatatggagttgagtgaccccgagtgcacccccgcagtaaatgatgctcaggactaaagtgactgaaggcttttggggaaacagatgcgaacaaaacagcagtattcattttctaattaaaagcttgtgaaaatcgatgtcattgaatctgagaaacattatttcgaacaaagatcacacatgatagagtgcatatactacagcatcgctccaccggagcacaggacgggtgtgccacggaggccgacagttgtggaaggagacaatgcacggcccggcccacctgctgcaggcaccgccaggaggtgtctgcctccttcgctcctgcgcccacggcaggcccacctgccacaggcactgccaggaggtgtctgcctcctttgctcctgcacacacctgcccctgcaggactcgagctggtctcaggcaactggtcatattccaggtggaacccacgagacccttcttatcctaagcttcccataggatctaggcacatcttttttcttttgttttaagccacccaaggctgccgaaacagcatcggcgtcctctctctgtccgctccatctcgccctgtggagcgctgtccccggcacacaatcctggcgctgaggagggggctgggcgtggttgggtcagtgactggtgatgaagaaggtttggaggacccccagccttaatccattaagatggtgtgactggggagcagaattcgcagaagcgcacaagccatttttacgtgtgtgtaatgtcagcgaattgtccgtttctatgaaatcactctggaaaaactagtttctgtcctcatttacttttcagagaagaaatgttcccatgaagcctccagatgaagccaaggtaagtttttgaacatggaagggcaagccaaatattattctcacagggaaagttgtatccagcctttgaggtggggaggtctgtgtgtatgacggcgtttagaaatggagtccgtttctgatcagtaagatcaatagtgtttctcctcctcttttcatgacttgaggtgagtggtgtgaagccgcagtacattcttccaaatccagaaatgggtagtttcagagcagttggccccgctgggtgctgtccttgtgggacacccttgcaagggttgggcaggatgggccttctcaggacctgcttggtgagtagcaggtgttgtcccaagcacagtgggctctggggccagtgctggcagggcagtgctgtgagcccagactgctgcacctgccgattggcaggtgtgtgtctctgacagtcagcaggcatgggcttgggctttggtccagggtccctgggaacctggagagaccccttaacatctgtttgagggcagaggccgagctgcagggagctgatgagagagtatgtgttagggtggctgtagtctagccctgaggacacgccttgctgggaaaggaaagggaacgttgtgtgctctgtgaagtgcctgagaaatagtcctggaccctaaaattctgtgtgtcttcctgttgcataatgtccctccccaatttctttagccccaaaaagttaacaaaggattgttagtttgcgttgttggtctcagtaggtttttctttgacatggatttgcatatccattcatgagctccaacctgacagtcccttgaacagcagcctcagtgaacagggcttggtcttgtcacttactgaggggtgggttcacgtttagcaaataattagagtgatttcaatagcgagtgtgaagtaacatttcgtttttcgtttgatgtttgaattgctcttgatgtgtgtctgtctccacaggttggggacaccctaggagacagcagcagctctgttctggagttcatgtcgatgaagtcctatcccgacgtttctgtggatatctccatgctcagctctctgggtgagttgtaacaggcactttcccacagcacctggtgaaggtgtgatagaggaagaaaacacacggcctccacctcctctcccttcctgactagacagggatgccaggaaaatcttttgttacggtatttggtctttgtcccaggtttttggaccatagctcctaaaatccttggaatctcctgagtgttgtgtcttttttaagctaatgagaagtggttgcagcccctgggtaacctcaggatggggtctggccgatccccagtggctgtggatttcatcagtgttgcctaccgcctccatgaaatcccaaaaggtggggttccctagggagcctcattgctggacgcctggaggctctgggaagaaggcagccccttcccacgggtcccctctgcatcgctcccacctggggcccatccgtaccctgggtgacaccccgcagaataaatgggtaaatgtcagcctagtgtgtggacagaagagtcaaactctgcagggtatttagagaggtttcttctgagtgaaatacgaagaccgtggctgtgacacagtcccaggaggtcccaagaacatttgccgaggaggactggtctgcagcttgttttgatatgttttagggagacagaggacatcagtcagtacatgtcagttgtaacagtggttcgtgttggaaaggcgggacaacttgaagcgaggaatgtcgggtcgttggtggattcagagatttcctgattggcatttggttgaaagggttaagctctgaagagctgaagtcagaaagaaatgtgcatggttaacataagcagttgtagaagccaaggttcttgtcacatagatgaattcagccttcaggtagcaggcttcaaaaagagtagagtagatggcaaacatcactcatgaggccctcaaaggtaccagattgttagttaaatctctgttgggtcaggaagagacttggaaggggcaggagattctctacagaatgtagatttttcccacaagatacagctttgcagggctatttcaaaatatgtcaaagggatatattttgagataaaatactcagtttctttcagggcctgccatctatcacgtgatgctgtactaaagtcggatcggaatttggtgtcttattaccacggagtctgctttgtcaaccttcagatttctgttttaaagttaatgctggtcagctgtgcctgaattccaaaagaggggataatgaggcaagtccagtcccgcttcacatcatggcctgacctcattttccaggttgactttggagtgcccttggccaagagtgggaatccgttcagtccatggggcttagaattttatttttcatttacagatgtttccctgacttctgtgagtcactctaggaaattcatagagctcaagtctggtcttctgggaaccccatttgatagctggttagtcggaagcacagaccacagcctggggctttcagttggcatcagccggtggggccatcctggagactgtgccctcacctgggaggctgccggtgcagcgcccccgagctgttctgacctccagcagcatttgtggtgcctggatccatgggtcccactgctttgcgtggtgacgttccacctgtctctgctggctctgttcaggcacttatggccgtgatttattataggggaagggtgccaacagcagcagagggacaagagtgacatccaaggaaacccagcgtgaggcccagatccactcccagcagaggcacatgggacacgcttaattcccaggagtgagctgtgacaacacacgtgaaatgcccaccagggaagcccgtcagaggcttggtgctcggggtcacagggcacccccttgccaggcaggtaccaaagtccagaccccggagggaaggtgaactttagcataaaccactctgctcctgttgttggagctgtgaacaatccctagcactgggggggaccccagatgccagccgtggctggccttgccttccaggggaccctggccccaggccgctgtgacagcacttttctgcacagcagctgtttttctcagcacttctaagattttgtccttattactacttctcagcagcttggtgctgatgggctttggtgctgatgtgctgtggtgtgttagtctgtcctcacactgttataaagaaccacctgagactggtcattggtgaaggaaagaggtttaattgactcacagttcctcaggctgtttgggaggcatggctgggaggcatcaggaaacttccaatcatggcggaagatgaaggagaaacatgcatgtcttcacatggcggagcaggagagaacgcaaagggggaagtgctttgaaacaaccagatctcatgagaagtcactcactatcatgagaacagagaacagcaagggggaaatccatccccatgatccaatcaccttccaccaggaccctcccctaacattgggaattacaattcaacatgagatttgggcaggaatacagagccaaactgtatcattctgcccctgactcctctcgaatcttttgtccttttcacatttcaaaacacaatcatgccttcctaacagtcccctaaagtcttaactcattccagcattaactcagaagtccacagtccaaagtcttatctgagacaaggcaagttacttctgcctgtgagcctgtaaaatccaaaacaagttagttaattccaagatacaaatcgggtacagacattgggtaaatagacctatcccaagagggagaaatcagccaaaacaaaggggcagcaggctacaaatctgaaacccagcagggcagtcattacatcttgaggccccgaaagaatcttctttgattccttgtctcacatccaggctacactgatgcaagggatgggctcccacggccttgggcagccccgcccttgtggctctgcagggtacagcctctgtggctgctttccctggctggtgttgagtgcctgcagcttttccagatggcatggtgcaagctgtcggatctaccattctgaggtctggaggacggtggcccttttctcacagctccactaggcagtgccccagtgggtactctgtgtggggtgagggctccaacctcacatttcccctctgcactgccctagcagaggttctccatgaagggcctgcccctgcagcagacttctgcctggacaccctggcttttccatacatcctctgaaatctaggtggaggctgccaaacctcagctcttgccttctgcctacccacatacccaacaccatgtggaagcttccagggcttggggcttgcaccctctgaagcatcgacccttttagccctgtaccttggccccttttagccatggctgggacacagagcaccatggcacatgtcccagtgcttcacagagtagtggggcccttttccctcctagacccccaggcctgtgatggcagtgtctgggcaaaggtctttgaaatgtccctgaggtattaacatttggctcctctttacttacgcaaatgtctgcagccttcttgaattcctccccagaaaatgggtttttcttttctaccacatggcaggggtacaaattttccaaacttttactctctgcttcccttttaaatataagttccagtttcaggtcatttttctgtttgtgcaagtgagcataggcttttagaagcagccaagtcacctcttgaatgctttagtgcttagaaatttcttccaccaggtgccctaaatcatctctctcaagttcaaagttccacagatttctagagcagggtcacagtgctgtcagtctctcctaaagaatagcaagagtgacctttgcccccattcccaatggggtcctcgtctccatctgagaccacctcagcctggatttcactgtccatatcactatcagcatttgaatcatagccatgcaggaagtctctaggtagttccaaactttccctcatcttcctgtctttaagttctcccagctgttctagcctctgctcattacccagttctacagggcatgtctgtagtcactgttactacactttgtctactgattccctgatatcagctttgagtctctcctagtttggggctgtgttttcctgctccttcgtgtgtgttggaatcatttactggataccaggtggagtttgtagttgatgccgttgggtgataggtctgcttacacacctttgaggcctggcggcctttgttctgagtttgagaagtggcttagactctgtgggaccttccccaggcattgtcagggtaagcccagagtcaccccggggagggtgaagctggtcccctggctggtggggctcaggtgaccacagacctgtgtgcaggttcttggcatgtctggtgcacagttcaggagtgggctgggagctcatcctttccacctctcagctggacgtgctgggtccccgatggctgtggcctggaacctgctccacagtgaactgggcgggtaccagggtctgccggcctcttgcaccctccatccagctgtctggcctttgtgtgttgaggacaggagcccacaccaggcccatcctgggttgtggccacatccctccacggtgtctgtgcgtgccatgacgtggtctgtgcggtgctaggtcttgtctgatgctttgcttgagcaaaggacgctgggtgtctgccttcccttcactcactgctaagggtaatgtctgtcctccaggcctgtccacctgtctgctgtgagctcgtccactcagtttccagagcaattattgtcctgagcagagaggcctgtctggatgggcagtgtgctcctgcccttagggtagacgggccggctgagctcagccgacgtggggtcatgtcctgtttacacagggaaggtgaagaaggagctggaccctgacgacagccatttgaacttggatgagacgacgaagctcctgcaggacctgcacgaagcacaggcggagcgcggcggctctcggccgtcgtccaacctcagctccctgtccaacgcctccgagagggaccagcaccacctgggtgagatgcccccacccacgccgcatccccagagaccccagcacagtcagtgtgacgtctagacgaggtagtgggcagcattgtagttgtgggaaggctggaggctgcatgggcagcggtgctgttgtggaggtcggtttccacagatgtccttgggtcgcggcctcggtgcagagccggagcggagctgggatgctggcctggccgcacgctgggttacaggctttctgccagataccgtccccagttctgtccacccctgtgccctctgtggaccctggttccagtgtttctgctggggagagagcatggcttccttggccatgtgtcctggagtggttttggtgggtggggttttgttcccacttgtaaacactggatcactctgtcggcagagtgaatcttggcagttcttcagctgcagaggtttagctgcaaccatctgcaaaaaggccggtattttcgattccattgaccttgtgatcagggtgttaacagtgcatggagcaggctttggagggccgtaggtcaaagtctgaggcccccgatatcccagtatgactttgggaactgccctgaggtctgggctgtgtctgagggactcctggccaaggagcgttctctccttcagaagcagcatccgtgctgtgtgctgggtcagggcgacccctggctccagggtctctacacacagctctccttggcagggagtgagaggtgcccctgtgtcctgggagtccctgagccctggcggtaggtcaggaagcagaccttgggctccaggagccccacgtgtgctgcgggtctgtcctgtgtgttgaagtcctgtgttctgaaaattgcaggaagcccttctcgcctgagtgtcggggagcagccagacgtcacccacgacccctatgagtttcttcagtctccagagcctgcggcctctgccaagacctaactctagaccaccttcagctcttttattttatttttttagttttattttgcacgtgtagagtttttgtcatcagacaaggactttgatcctgtcccctttggcatgcgggaagcagccgcggggaggtaatgaattgtctgtggtatcatgtcagcagagtctccaagccccacgaaccctgaggagtggagtcatacgcgaaggccatatggccatcgtgtcagcagagagagtctctgtacacagccccgtgaaccctgaggagtggagtcatacacgaagggcgtgtggccatcgtgtcagcagagagagtctctgtacacagccccgtgaaccctgaggagtggagtcatacgcgaagggtgtgtggccaggctgcagagctgcgtgccgtttgtgtccgagcatcacgtgtggctccagcccttgtttctgccagtgtagacacctctgtctgccccactgtcctggggtcgctcttgggaggcacaggcatgggtgtgtctggcctcattctgtatcagtccagtgtgttcctgtcatagtttgtgtctcccaggcaggccatggtaggggcctcgcaggggccattggggagcacagggccaggctggggtgaggagagctcccctgttttctgtttaattgatgagcctgggaaaggagtgtgttctgcctgcccgttacagtggagcgttccgtgtccataaaacgttttctaactggg

SEQ ID NO: 11008 - DNA, 4865 bp, Homo sapiens
tatttactttttgttgaattttaagggacctcaagtgaaataataatcggtgaattcaggatcaacctttatgtccagagcgtttgttccgtcgtccatttcttgtctagagtagtggtatgagctgaaaacattgctaagtgatcaccacatattgttgatgtaagggctaccggttattacaagagatttttatgactcctgctgtgggggtgccctttctacccggctgagcttggtgggagccaaggctgagtcggatgtatctttatatccccagttctcggtggaacttaaaatgctgtgagacaccagacagacagatactgtgaacttggagctctctaatgaagggataccaaagtcttgtattcaatttttttttccttaaattgtcagccgaaaatgagagcacacctattcagcaactcctggaacacttcctccgccagcttcagagaaaagatccccatggattttttgcttttcctgtcacggatgcaattgctcctggatattcaatgataataaaacatcccatggattttggcaccatgaaagacaaaattgtagctaatgaatacaagtcagttacggaatttaaggcagatttcaagctgatgtgtgataatgcaatgacatacaataggccagataccgtgtactacaagttggcgaagaagatccttcacgcaggctttaagatgatgagcaaacaggcagctcttttgggcaatgaagatacagctgttgaggaacctgtccctgaagttgtaccagtacaagtagaaactgccaagaaatccaaaaagccgagtagagaagttatcagctgcatgtttgagcctgaagggaatgcctgcagcttgacggacagtaccgcagaggagcacgtgctggcgctggtggagcacgcagctgacgaagctcgggacaggatcaaccggttcctcccaggcggcaaggtagtgctctgtggccaccgagagagggtgccacgtggccccagactctctgtgtgcctctccttctgggttggtgctgtgtgatctagcacagccaccgggatccagaggtcagcgtggggccctgacgggaggtccggatcagacacacataaggctggtctcttcagtcggggtccaggtgcctctggcagggctgccgctggtgtttcatgcatcgtggaggccacgtggtcactgacctcatttccttgatggaggccctgctgcaggctaatcctttctcttggagtgaatgctgacttctgtgtctctgtcactgggtgttgacgtgaggcaccgcccttgttattccagtgggggtgctggtgttggatccgacagatggtccataataggccaccgactgtgttcacgtggctcctgccacagatggtctttgtggtggtggggcccactcagctgaccacgctctcctttctggcaggagacgttctagacccagtgtcttcagtggaaacagagcacaggctgtctgcagtctcaggcttcctagcagccctgataagagaagtagagcaatgcaggtgacattaatccttgcaggtttcatttcacctctatatccaacattttatctcaacatgtagtctgtagaaaacgttaatttgagctttatgggtttttttcatattaagtcttcaaaatgcacatgggatgggatgtaaagaacgctgaagtgggggcatttcagaggtgtctgctgctttttgcctgtgcctgctgggaagttgcagtgctctgtgtggcttgcgtgttgcgaggttgcggtctgcgtggctcacgtgttgggaggtcgtggtctgcgtggctcacgtgttgggaagttgcagtggtctgtatggcttgcgtgttgggaggttgcagtctgtgtggcccgtgtgttgggaggttgtggtctgcgtggcttgtgtgttgggaggttgtggtttttgtggcttgcgtgttggggggttgtggtctgtgtggctcacgtgttgggaggttgtggtctgcgtggctcacgtgttgggcagttgtctgcttggctcacgtgttgggaagttgtggtctgcgtggctcatgtgttgggaagttgtttatgtggcttgtgtgctggaggttgtggcctgcgtggctcacgtgttgggcggttgtctgcttggctcatgtgttgggaagttgtggtctgcgtggcttgtgtgttgggaagttgtttatgtggcttgtgtgctggaggttgtggtctacgtggcttgcactgtagttcttttggacagccttgttctgcagtctgtgtttcagccctggaattgccacattctccaagaagccctggtttcttgactagagagccttgtgtagaagccaggacctgggttctgggtgaagccctctgcagatagagctgggagatgcctgttgtgtgtgtctgcaccacatacatggacactgtgcagagggattctgttggcacctgtgtttacatgggttgaaaactgtttttacacggaaacttccagttccctcgtgccccgtgggttccgcccacttcttccctttcagttttgtatctgcgccgtgaggacttgtctcctaatcttcgtatcaactccgtgtcccattgagctgaccttccgcctctcccccagggccctggccatcctgtgggctctgagactttgcatggatccgcggtggggagctgcccccacacaaacgtccggctcttctcaggccaggtggctgccctgacatggcatgatgtccagcgcatggacgtcacccttgcactggagcccagccaaccgctgcatgacagccctcttcccccttgaaccccaagtctgcacacaccagtgcctcctcttcctggatcctcctgatggcctgtacacagaactggggtgtgggtggtgggtttttaaatgaaaaccagtccacacatgcttgagggctggagccgcctgccgtcagggcagtgccatgctgacctgctgaccgttccattttgtcaaggctcatgagcaattttaaatgtttactcgtgggtgaaggtttttgtttcagctgtaccccctatagcagggccatggggagcctaagaggttctccttggcacctgtgcgcgctctgctgttgccggtgagtctgaaattccagggaatgccgtgaggggccctctggcgtttgttcttggacaaatgtgctttcacccccattaagccctgcttgttggtcttcatttcatttgtgctgcgctgcccctcctgagggacagacgctcaggcagtgcttccttccagatgggctatctgaagaggaacggggacgggagcctgctctacagcgtggtcaacacggccgagccggacgctgatgaggaggagacccacccggtggacttgagctcgctctccagtaagctactcccaggcttcaccacgctgggcttcaaagacgagagaagaaacaaagtcacctttctctccagtgccactactgcgctttcgatgcagaataattcagtatttggcgacttgaagtcggacgagatggagctgctctactcagcctacggagatgagacaggcgtgcagtgtgcgctgagcctgcaggagtttgtgaaggatgctgggagctacagcaagaaagtggtggacgacctcctggaccagatcacaggcggagaccactctaggacgctcttccagctgaagcagagaagaaatgttcccatgaagcctccagatgaagccaaggttggggacaccctaggagacagcagcagctctgttctggagttcatgtcgatgaagtcctatcccgacgtttctgtggatatctccatgctcagctctctggggaaggtgaagaaggagctggaccctgacgacagccatttgaacttggatgagacgacgaagctcctgcaggacctgcacgaagcacaggcggagcgcggcggctctcggccgtcgtccaacctcagctccctgtccaacgcctccgagagggaccagcaccacctgggaagcccttctcgcctgagtgtcggggagcagccagacgtcacccacgacccctatgagtttcttcagtctccagagcctgcggcctctgccaagacctaactctagaccaccttcagctcttttattttatttttttagttttattttgcacgtgtagagtttttgtcatcagacaaggactttgatcctgtcccctttggcatgcgggaagcagccgcggggaggtaatgaattgtctgtggtatcatgtcagcagagtctccaagccccacgaaccctgaggagtggagtcatacgcgaaggccatatggccatcgtgtcagcagagagagtctctgtacacagccccgtgaaccctgaggagtggagtcatacacgaagggcgtgtggccatcgtgtcagcagagagagtctctgtacacagccccgtgaaccctgaggagtggagtcatacgcgaagggtgtgtggccaggctgcagagctgcgtgccgtttgtgtccgagcatcacgtgtggctccagcccttgtttctgccagtgtagacacctctgtctgccccactgtcctggggtcgctcttgggaggcacaggcatgggtgtgtctggcctcattctgtatcagtccagtgtgttcctgtcatagtttgtgtctcccaggcaggccatggtaggggcctcgcaggggccattggggagcacagggccaggctggggtgaggagagctcccctgttttctgtttaattgatgagcctgggaaaggagtgtgttctgcctgcccgttacagtggagcgttccgtgtccataaaacgttttctaactggg

SEQ ID NO: 11009 - DNA, 2761 bp, Homo sapiens
ccctcatcttcctgtctttaagttctcccagctgttctagcctctgctcattacccagttctacagggcatgtctgtagtcactgttactacactttgtctactgattccctgatatcagctttgagtctctcctagtttggggctgtgttttcctgctccttcgtgtgtgttggaatcatttactggataccaggtggagtttgtagttgatgccgttgggtgataggtctgcttacacacctttgaggcctggcggcctttgttctgagtttgagaagtggcttagactctgtgggaccttccccaggcattgtcagggtaagcccagagtcaccccggggagggtgaagctggtcccctggctggtggggctcaggtgaccacagacctgtgtgcaggttcttggcatgtctggtgcacagttcaggagtgggctgggagctcatcctttccacctctcagctggacgtgctgggtccccgatggctgtggcctggaacctgctccacagtgaactgggcgggtaccagggtctgccggcctcttgcaccctccatccagctgtctggcctttgtgtgttgaggacaggagcccacaccaggcccatcctgggttgtggccacatccctccacggtgtctgtgcgtgccatgacgtggtctgtgcggtgctaggtcttgtctgatgctttgcttgagcaaaggacgctgggtgtctgccttcccttcactcactgctaagggtaatgtctgtcctccaggcctgtccacctgtctgctgtgagctcgtccactcagtttccagagcaattattgtcctgagcagagaggcctgtctggatgggcagtgtgctcctgcccttagggtagacgggccggctgagctcagccgacgtggggtcatgtcctgtttacacagggaaggtgaagaaggagctggaccctgacgacagccatttgaacttggatgagacgacgaagctcctgcaggacctgcacgaagcacaggcggagcgcggcggctctcggccgtcgtccaacctcagctccctgtccaacgcctccgagagggaccagcaccacctgggtgagatgcccccacccacgccgcatccccagagaccccagcacagtcagtgtgacgtctagacgaggtagtgggcagcattgtagttgtgggaaggctggaggctgcatgggcagcggtgctgttgtggaggtcggtttccacagatgtccttgggtcgcggcctcggtgcagagccggagcggagctgggatgctggcctggccgcacgctgggttacaggctttctgccagataccgtccccagttctgtccacccctgtgccctctgtggaccctggttccagtgtttctgctggggagagagcatggcttccttggccatgtgtcctggagtggttttggtgggtggggttttgttcccacttgtaaacactggatcactctgtcggcagagtgaatcttggcagttcttcagctgcagaggtttagctgcaaccatctgcaaaaaggccggtattttcgattccattgaccttgtgatcagggtgttaacagtgcatggagcaggctttggagggccgtaggtcaaagtctgaggcccccgatatcccagtatgactttgggaactgccctgaggtctgggctgtgtctgagggactcctggccaaggagcgttctctccttcagaagcagcatccgtgctgtgtgctgggtcagggcgacccctggctccagggtctctacacacagctctccttggcagggagtgagaggtgcccctgtgtcctgggagtccctgagccctggcggtaggtcaggaagcagaccttgggctccaggagccccacgtgtgctgcgggtctgtcctgtgtgttgaagtcctgtgttctgaaaattgcaggaagcccttctcgcctgagtgtcggggagcagccagacgtcacccacgacccctatgagtttcttcagtctccagagcctgcggcctctgccaagacctaactctagaccaccttcagctcttttattttatttttttagttttattttgcacgtgtagagtttttgtcatcagacaaggactttgatcctgtcccctttggcatgcgggaagcagccgcggggaggtaatgaattgtctgtggtatcatgtcagcagagtctccaagccccacgaaccctgaggagtggagtcatacgcgaaggccatatggccatcgtgtcagcagagagagtctctgtacacagccccgtgaaccctgaggagtggagtcatacacgaagggcgtgtggccatcgtgtcagcagagagagtctctgtacacagccccgtgaaccctgaggagtggagtcatacgcgaagggtgtgtggccaggctgcagagctgcgtgccgtttgtgtccgagcatcacgtgtggctccagcccttgtttctgccagtgtagacacctctgtctgccccactgtcctggggtcgctcttgggaggcacaggcatgggtgtgtctggcctcattctgtatcagtccagtgtgttcctgtcatagtttgtgtctcccaggcaggccatggtaggggcctcgcaggggccattggggagcacagggccaggctggggtgaggagagctcccctgttttctgtttaattgatgagcctgggaaaggagtgtgttctgcctgcccgttacagtggagcgttccgtgtccataaaacgttttctaactggg

SEQ ID NO: 11010 - DNA, 1916 bp, Homo sapiens
ccctcatcttcctgtctttaagttctcccagctgttctagcctctgctcattacccagttctacagggcatgtctgtagtcactgttactacactttgtctactgattccctgatatcagctttgagtctctcctagtttggggctgtgttttcctgctccttcgtgtgtgttggaatcatttactggataccaggtggagtttgtagttgatgccgttgggtgataggtctgcttacacacctttgaggcctggcggcctttgttctgagtttgagaagtggcttagactctgtgggaccttccccaggcattgtcagggtaagcccagagtcaccccggggagggtgaagctggtcccctggctggtggggctcaggtgaccacagacctgtgtgcaggttcttggcatgtctggtgcacagttcaggagtgggctgggagctcatcctttccacctctcagctggacgtgctgggtccccgatggctgtggcctggaacctgctccacagtgaactgggcgggtaccagggtctgccggcctcttgcaccctccatccagctgtctggcctttgtgtgttgaggacaggagcccacaccaggcccatcctgggttgtggccacatccctccacggtgtctgtgcgtgccatgacgtggtctgtgcggtgctaggtcttgtctgatgctttgcttgagcaaaggacgctgggtgtctgccttcccttcactcactgctaagggtaatgtctgtcctccaggcctgtccacctgtctgctgtgagctcgtccactcagtttccagagcaattattgtcctgagcagagaggcctgtctggatgggcagtgtgctcctgcccttagggtagacgggccggctgagctcagccgacgtggggtcatgtcctgtttacacagggaaggtgaagaaggagctggaccctgacgacagccatttgaacttggatgagacgacgaagctcctgcaggacctgcacgaagcacaggcggagcgcggcggctctcggccgtcgtccaacctcagctccctgtccaacgcctccgagagggaccagcaccacctgggaagcccttctcgcctgagtgtcggggagcagccagacgtcacccacgacccctatgagtttcttcagtctccagagcctgcggcctctgccaagacctaactctagaccaccttcagctcttttattttatttttttagttttattttgcacgtgtagagtttttgtcatcagacaaggactttgatcctgtcccctttggcatgcgggaagcagccgcggggaggtaatgaattgtctgtggtatcatgtcagcagagtctccaagccccacgaaccctgaggagtggagtcatacgcgaaggccatatggccatcgtgtcagcagagagagtctctgtacacagccccgtgaaccctgaggagtggagtcatacacgaagggcgtgtggccatcgtgtcagcagagagagtctctgtacacagccccgtgaaccctgaggagtggagtcatacgcgaagggtgtgtggccaggctgcagagctgcgtgccgtttgtgtccgagcatcacgtgtggctccagcccttgtttctgccagtgtagacacctctgtctgccccactgtcctggggtcgctcttgggaggcacaggcatgggtgtgtctggcctcattctgtatcagtccagtgtgttcctgtcatagtttgtgtctcccaggcaggccatggtaggggcctcgcaggggccattggggagcacagggccaggctggggtgaggagagctcccctgttttctgtttaattgatgagcctgggaaaggagtgtgttctgcctgcccgttacagtggagcgttccgtgtccataaaacgttttctaactggg

SEQ ID NO: 11011 - DNA, 5140 bp, Homo sapiens
gcagcagctctgttctggagttcatgtcgatgaagtcctatcccgacgtttctgtggatatctccatgctcagctctctgggtgagttgtaacaggcactttcccacagcacctggtgaaggtgtgatagaggaagaaaacacacggcctccacctcctctcccttcctgactagacagggatgccaggaaaatcttttgttacggtatttggtctttgtcccaggtttttggaccatagctcctaaaatccttggaatctcctgagtgttgtgtcttttttaagctaatgagaagtggttgcagcccctgggtaacctcaggatggggtctggccgatccccagtggctgtggatttcatcagtgttgcctaccgcctccatgaaatcccaaaaggtggggttccctagggagcctcattgctggacgcctggaggctctgggaagaaggcagccccttcccacgggtcccctctgcatcgctcccacctggggcccatccgtaccctgggtgacaccccgcagaataaatgggtaaatgtcagcctagtgtgtggacagaagagtcaaactctgcagggtatttagagaggtttcttctgagtgaaatacgaagaccgtggctgtgacacagtcccaggaggtcccaagaacatttgccgaggaggactggtctgcagcttgttttgatatgttttagggagacagaggacatcagtcagtacatgtcagttgtaacagtggttcgtgttggaaaggcgggacaacttgaagcgaggaatgtcgggtcgttggtggattcagagatttcctgattggcatttggttgaaagggttaagctctgaagagctgaagtcagaaagaaatgtgcatggttaacataagcagttgtagaagccaaggttcttgtcacatagatgaattcagccttcaggtagcaggcttcaaaaagagtagagtagatggcaaacatcactcatgaggccctcaaaggtaccagattgttagttaaatctctgttgggtcaggaagagacttggaaggggcaggagattctctacagaatgtagatttttcccacaagatacagctttgcagggctatttcaaaatatgtcaaagggatatattttgagataaaatactcagtttctttcagggcctgccatctatcacgtgatgctgtactaaagtcggatcggaatttggtgtcttattaccacggagtctgctttgtcaaccttcagatttctgttttaaagttaatgctggtcagctgtgcctgaattccaaaagaggggataatgaggcaagtccagtcccgcttcacatcatggcctgacctcattttccaggttgactttggagtgcccttggccaagagtgggaatccgttcagtccatggggcttagaattttatttttcatttacagatgtttccctgacttctgtgagtcactctaggaaattcatagagctcaagtctggtcttctgggaaccccatttgatagctggttagtcggaagcacagaccacagcctggggctttcagttggcatcagccggtggggccatcctggagactgtgccctcacctgggaggctgccggtgcagcgcccccgagctgttctgacctccagcagcatttgtggtgcctggatccatgggtcccactgctttgcgtggtgacgttccacctgtctctgctggctctgttcaggcacttatggccgtgatttattataggggaagggtgccaacagcagcagagggacaagagtgacatccaaggaaacccagcgtgaggcccagatccactcccagcagaggcacatgggacacgcttaattcccaggagtgagctgtgacaacacacgtgaaatgcccaccagggaagcccgtcagaggcttggtgctcggggtcacagggcacccccttgccaggcaggtaccaaagtccagaccccggagggaaggtgaactttagcataaaccactctgctcctgttgttggagctgtgaacaatccctagcactgggggggaccccagatgccagccgtggctggccttgccttccaggggaccctggccccaggccgctgtgacagcacttttctgcacagcagctgtttttctcagcacttctaagattttgtccttattactacttctcagcagcttggtgctgatgggctttggtgctgatgtgctgtggtgtgttagtctgtcctcacactgttataaagaaccacctgagactggtcattggtgaaggaaagaggtttaattgactcacagttcctcaggctgtttgggaggcatggctgggaggcatcaggaaacttccaatcatggcggaagatgaaggagaaacatgcatgtcttcacatggcggagcaggagagaacgcaaagggggaagtgctttgaaacaaccagatctcatgagaagtcactcactatcatgagaacagagaacagcaagggggaaatccatccccatgatccaatcaccttccaccaggaccctcccctaacattgggaattacaattcaacatgagatttgggcaggaatacagagccaaactgtatcattctgcccctgactcctctcgaatcttttgtccttttcacatttcaaaacacaatcatgccttcctaacagtcccctaaagtcttaactcattccagcattaactcagaagtccacagtccaaagtcttatctgagacaaggcaagttacttctgcctgtgagcctgtaaaatccaaaacaagttagttaattccaagatacaaatcgggtacagacattgggtaaatagacctatcccaagagggagaaatcagccaaaacaaaggggcagcaggctacaaatctgaaacccagcagggcagtcattacatcttgaggccccgaaagaatcttctttgattccttgtctcacatccaggctacactgatgcaagggatgggctcccacggccttgggcagccccgcccttgtggctctgcagggtacagcctctgtggctgctttccctggctggtgttgagtgcctgcagcttttccagatggcatggtgcaagctgtcggatctaccattctgaggtctggaggacggtggcccttttctcacagctccactaggcagtgccccagtgggtactctgtgtggggtgagggctccaacctcacatttcccctctgcactgccctagcagaggttctccatgaagggcctgcccctgcagcagacttctgcctggacaccctggcttttccatacatcctctgaaatctaggtggaggctgccaaacctcagctcttgccttctgcctacccacatacccaacaccatgtggaagcttccagggcttggggcttgcaccctctgaagcatcgacccttttagccctgtaccttggccccttttagccatggctgggacacagagcaccatggcacatgtcccagtgcttcacagagtagtggggcccttttccctcctagacccccaggcctgtgatggcagtgtctgggcaaaggtctttgaaatgtccctgaggtattaacatttggctcctctttacttacgcaaatgtctgcagccttcttgaattcctccccagaaaatgggtttttcttttctaccacatggcaggggtacaaattttccaaacttttactctctgcttcccttttaaatataagttccagtttcaggtcatttttctgtttgtgcaagtgagcataggcttttagaagcagccaagtcacctcttgaatgctttagtgcttagaaatttcttccaccaggtgccctaaatcatctctctcaagttcaaagttccacagatttctagagcagggtcacagtgctgtcagtctctcctaaagaatagcaagagtgacctttgcccccattcccaatggggtcctcgtctccatctgagaccacctcagcctggatttcactgtccatatcactatcagcatttgaatcatagccatgcaggaagtctctaggtagttccaaactttccctcatcttcctgtctttaagttctcccagctgttctagcctctgctcattacccagttctacagggcatgtctgtagtcactgttactacactttgtctactgattccctgatatcagctttgagtctctcctagtttggggctgtgttttcctgctccttcgtgtgtgttggaatcatttactggataccaggtggagtttgtagttgatgccgttgggtgataggtctgcttacacacctttgaggcctggcggcctttgttctgagtttgagaagtggcttagactctgtgggaccttccccaggcattgtcagggtaagcccagagtcaccccggggagggtgaagctggtcccctggctggtggggctcaggtgaccacagacctgtgtgcaggttcttggcatgtctggtgcacagttcaggagtgggctgggagctcatcctttccacctctcagctggacgtgctgggtccccgatggctgtggcctggaacctgctccacagtgaactgggcgggtaccagggtctgccggcctcttgcaccctccatccagctgtctggcctttgtgtgttgaggacaggagcccacaccaggcccatcctgggttgtggccacatccctccacggtgtctgtgcgtgccatgacgtggtctgtgcggtgctaggtcttgtctgatgctttgcttgagcaaaggacgctgggtgtctgccttcccttcactcactgctaagggtaatgtctgtcctccaggcctgtccacctgtctgctgtgagctcgtccactcagtttccagagcaattattgtcctgagcagagaggcctgtctggatgggcagtgtgctcctgcccttagggtagacgggccggctgagctcagccgacgtggggtcatgtcctgtttacacagggaaggtgaagaaggagctggaccctgacgacagccatttgaacttggatgagacgacgaagctcctgcaggacctgcacgaagcacaggcggagcgcggcggctctcggccgtcgtccaacctcagctccctgtccaacgcctccgagagggaccagcaccacctgg

SEQ ID NO: 11012 - DNA, 689 bp, Homo sapiens
gcagcagctctgttctggagttcatgtcgatgaagtcctatcccgacgtttctgtggatatctccatgctcagctctctggtttctttcagggcctgccatctatcacgtgatgctgtactaaagtcggatcggaatttggtgtcttattaccacggagtctgctttgtcaaccttcagatttctgttttaaagttaatgctggtcagctgtgcctgaattccaaaagaggggataatgagatgtttccctgacttctgtgagtcactctaggaaattcatagagctcaagtctggtcttctgggaaccccatttgatagctggggaagggtgccaacagcagcagagggacaagagtgacatccaaggaaacccagcgtgaggcccagatccactcccagcagaggcacatgggacacgcttaattcccaggagtgagctgtgacaacacacgtgaaatgcccaccagggaagcccgtcagaggcttggtgctcggggtcacagggcacccccttgccagggaaggtgaagaaggagctggaccctgacgacagccatttgaacttggatgagacgacgaagctcctgcaggacctgcacgaagcacaggcggagcgcggcggctctcggccgtcgtccaacctcagctccctgtccaacgcctccgagagggaccagcaccacctgg

SEQ ID NO: 11013 - DNA, 9692 bp, Homo sapiens
tcagtatttggcgacttgaagtcggacgagatggagctgctctactcagcctacggagatgagacaggcgtgcagtgtgcgctgaggcaagtgtcggccccggggagcccttggctgctgtgcagcttgagctgtgccctggtgtgggacgtggagtcccacatgtgtgcgggtggggagagagccatcttgcagccgtccatatggcagcctgggtcttcccgttgctttcagtcatccacacaggtctgccacaggccagtcctgaaatctgggtaactcagtcagaaggtggtgatcagggcgtagcttgtgaaggggttgggggtgtgttgagcacactggatcgtattgaattgtgtttcctaagtgaccgtgctagctcaggctgcagtgacaaagcaccacagactggggtcttattcctgggggctggcatttgccatgaaggtgtgggcagggctggttcctcccgagccctctctcctgggcctgcaggtgccgtctttccgtcttttccctgtgccttcccggggccatcctgcgtgtgtctgtgtcctcggctctcctggagaccctaccgttctcaaggaccctggtcatattggatcagggccaccctaatggcctcatgtcactgcagttacctctaaaggccgttaaagtccccagctccaagtataatcacattccaaggcactggggtcgggatttcaacttacgaactctgagcgggagatacaattcaggccatggcaggctaaagtataatactaaaatcacaaatgtagcagcctgcttttccgtagaatgttgctgtgtgtattttttgttttctgtggcaaaataaaagtgggtcactcttgtaaaatttggcagtttttaatggagaaagcaacttaattttgctagcctttaagaaatggcatcttgacatatcaggtcttcattttattccaacaagaatgcagaatatgttttaaaaataaacaagaatccccttagtgcttcataaaataagtgaaaacctgaccctgatttttgtagcaaaaaatgaagtaaacgtggaaaatgaagaggaaattctagtaggagacgatggggtcataagtcagaaattaaagagttgtttgctccccaccctcccgccagccctcacctcacccctgctgtggggcctctgcccagcctgggccaaggccgtggctcccctggtgccatcctgtccgcagtcggctccctgtccacggcgtgtggctccttcaggacatcagtcacctgttgtccatgtggcacatcagtggactgtgcacaccccccgccttccccagctgtctgtccctagaacgcatcaggttccatgttgccgtgaagaaagatcattctgaccccgcctgccttgtggctgcaggggcaacactcagaagcacatctcctagggcctggcatgaggctacgtggtcccatgccagcctcagcgcacagacacccagatcctctgcccctgagtgctgcttccgtgcacgctgcgagtgccgagcttggcctgtcccgggctgtgggtgttttaacaaagacacggagtctccctgttgcctcctgtgaccgtggttcagcttctgaccagcagccatccttgttcctctctgtgaaggtctttggagtctggggagcccttctgaggcgcttgcttggtgctttgattctaagactatgcatttttgttcctggcctactttttagattgtattatattttattttttaagctgtttcatgtatatggccaagaatcaggatggtactaaaaggagtgccttggaagtgtcggcccacccctgccccacgcgcccattcctcaccggcaggcactgcccactggtgtgcttctgtccacacccacttgtgtttttaaacgcataacgagtggaaagataggagtattcttttacagatgataacatagcacacgtgtgtttctaggctgtgtgcatgtgtattcatgcttttctccctctccccactgagatctttttaacctttttgggtcatggaccactttgaaaatctaatgaaaactatcagccactccccacaaaatacccgctctgggagggtcacggggaccgaggagctgcgctggcacggcaggcttctgtgatcagggctgccgcgagggccaggcgacaagggctcctttcagcgtaccttctcccgcggcccctctagcctgcaggagtttgtgaaggatgctgggagctacagcaagaaagtggtggacgacctcctggaccagatcacaggcggagaccactctaggacgctcttccagctgaagcaggtgggctgcactcgcaccggggttggggggcaggtgcccttggggtgctgctggcgggaagagcctgcagcctgaccaggctttcggggacgaggagctgtcgcagggactctgctgccggctcctcgtcaggatctgcgtgcttctctgcacgggcaggtgtcccccggagaccgtgactgtgtgctcaccactcccagcgcactcgtaactctctatttccatcttcatctttcatctctgtcactttccttcatcctgaagagtttaaaaaaatatttcctgtagttcagatttactgacagtgatctctcagcattggcttctctgaaagtctttatttcatcttcatttttgaaattcattttccctgtgtatggaattttagatgaccttttttcccatctactgtaaaataggtttgacttgcattgttgctataaaaaagcatctgggccaagcatggtggctcacacttgtaatcccagcactttgggaggccgaggcgggcagatccaaggtcaggaggtcgagaccatcctggctaacacggtgaaaccccgtctctactaaaaaatagaaaaaattagctgggcgtggtggcaggtgcttgtagtcccagctactcgggaggctgaggcaggagaatggcatgaacccgggaggcagagcttgcagtgagccgagatcatgccactgcactccagcttgggccacagagccagaccccatctccaaaaaaaaaaaaaaagcgtctgaagtcattgtcatctttgtttcccacatgtgacgtgtcttttcggccagatctgacctgaagtctgcttttgtacagaccacaagccaggaatgtcttttacatctttaaaagggtgtttacagaaaagaaaaggaagaagaagatgcttcgggcagcgtgtggctcacagagcctcggctgctcactcccgggccctcggcaggacgggatctggccggtgctctaggagcttttgaacttttatctttctttatcagtgattttcagcattgtattttccaggtgccttggtgggcttttctttgtgttctacttagcatttgttgtttcttggatctgtctgtagttttcatcatatttggaagatttttagccattactcaaatgtcattttccaccactgcctcttcctcctcctgctggactgtggcactctgaggacagctcgtgttatctcacatggcaccgacactgtgctgccgcaccaggctgctgcagattagtttctgatgctgttggctaagttcactcacctgttctctggccacacctgaacctgttatcccagatcagttttcactgatgatgtcgtcccgcgctgctcatcacttgggctccatttgctgcttttgtgtatcttctctcatgttgtgtgtatgtttttccttacatccttgagccacgttcgtatttattgctgctgcttttgaagtcctcagtcactgagtctgtcgcctctgccgtttccggttctgtttctgtttgacactttgctgcacttggagctgtgggccattgtgcacgtgcctggtggacagtcctgaccctcgctgtctgataaaaaagcactggccacatggccgctgggaaatttgaatgtggccagtctgaatttagatgtgatgtgtgagctacaaactagatcttaaaaaactaatgcaaaaaacgtaaaaatatgagtaacgatttcttatggcccacatgttggaataaaaacatcttcaataaatttgtctaagtaaaatgcattagttaattgaatgttaagagtaattttaatgtggcagctagaattttaagagctgggtatggtggcatgcacctgtcatcagctccacaggaggctaaggtgggaggatcacttgaggccgggaggtcgaggctgcagtgcgattgcaccaccgcactctaggcaatagagcaagaccctgtctcaaaaaaaagataaaaaaacatttagaacgaggcgtgtgctcgcgttatgtctgctgggcaaggctgatctgggttctttctctctttcagagaatactgatgatcattttggcagttgttacttgtggataatggccggatcctaccaggcttgtctggggtgggtccagggcagccttattctagggttcgtgtagccttaatgctaaggagtggcccttcggggagccctgtcttttcagcgtggtctctgctgtgggtggagttcggatgagtctctgtccttcccaggctctgagaacgtttggctcatggctcccaaggaggggtcagtcccttgacctgacggtttcatctgtgcttgttacagatgaactggggtccacatgcctggtgcagtaaacccagacacccatgccgaggttttgtcatagaaaggacgtgtgtatttgcagggcgccaagcaaggtgggccaggaggctcatgtataaatcctggcctcccccactggctacaggcaaggcttgtaaagcgggggtagatctcaggaaagcagaactgaaaggcagagtcgtgcataaggacacagaggttacatgtcggcttggcctagaagggcggtatctgcaagcagggccttataggttataggtggattcaaaggttttctgatttgcagctggttaaggaggagaagctttgtttaaaaatttggggtgaagagaaaagaatgttagcttaggcttgtgggtgtggcttcctccaggcccgtcaggaagaaattcagaacaaagaacggggtcagagctcagtcttcagtttctccttatctgagcccttcatgccagtagattagtttgttggggaggtcctaggtggagggtccaggtttctgaaagacaactcagggatatacattaagatgttatctttactttctttctttttttttctttttgagacatagagtctcactctgtcacccaggctggagtgcagtggcgtgattgtggctcactgcaacctctgcctccctgattctagcgattctcctgcctcagcctcccgagtagctgggattacaggcatgcgccaccacacctggctaatttttgtatttttagtagaggcggagtttcgccatgttggccaggctggtctttaactcctgacctcaaatgatgcatccatctcagcctcccagagtggtaggatgttgtcttttctttctacagggaacagtgctgggaggttgtctttactttctacagggaacaaacatctgtctccaccttccttgactgttgttttaggatactgttaccttcttgcttatcaagtcgctgatttacttctcagagttatctaagtaactggaatttcccttgaaggaactcaagattttccttgatttccatgcttggagggctcgcaggcccctgaagagagggttgcagccaggcgggagtccccaagcagatttctgcagctctgaggagcagccccctctgcagagcctgccccaccagctcgtggttctgactctgagctctggtcaccctcccgtgtcgtggcctgcaggctccttccaggcaggaagctggcccccccaacacagcgttagaatcaggcattgctgtggggtagggaaagtgaccccctcacagcccggaaatgggaaggctctgtggtttcctctctgggttccagttagattcctttcgggaaagtgaacttggatatggagttgagtgaccccgagtgcacccccgcagtaaatgatgctcaggactaaagtgactgaaggcttttggggaaacagatgcgaacaaaacagcagtattcattttctaattaaaagcttgtgaaaatcgatgtcattgaatctgagaaacattatttcgaacaaagatcacacatgatagagtgcatatactacagcatcgctccaccggagcacaggacgggtgtgccacggaggccgacagttgtggaaggagacaatgcacggcccggcccacctgctgcaggcaccgccaggaggtgtctgcctccttcgctcctgcgcccacggcaggcccacctgccacaggcactgccaggaggtgtctgcctcctttgctcctgcacacacctgcccctgcaggactcgagctggtctcaggcaactggtcatattccaggtggaacccacgagacccttcttatcctaagcttcccataggatctaggcacatcttttttcttttgttttaagccacccaaggctgccgaaacagcatcggcgtcctctctctgtccgctccatctcgccctgtggagcgctgtccccggcacacaatcctggcgctgaggagggggctgggcgtggttgggtcagtgactggtgatgaagaaggtttggaggacccccagccttaatccattaagatggtgtgactggggagcagaattcgcagaagcgcacaagccatttttacgtgtgtgtaatgtcagcgaattgtccgtttctatgaaatcactctggaaaaactagtttctgtcctcatttacttttcagagaagaaatgttcccatgaagcctccagatgaagccaaggtaagtttttgaacatggaagggcaagccaaatattattctcacagggaaagttgtatccagcctttgaggtggggaggtctgtgtgtatgacggcgtttagaaatggagtccgtttctgatcagtaagatcaatagtgtttctcctcctcttttcatgacttgaggtgagtggtgtgaagccgcagtacattcttccaaatccagaaatgggtagtttcagagcagttggccccgctgggtgctgtccttgtgggacacccttgcaagggttgggcaggatgggccttctcaggacctgcttggtgagtagcaggtgttgtcccaagcacagtgggctctggggccagtgctggcagggcagtgctgtgagcccagactgctgcacctgccgattggcaggtgtgtgtctctgacagtcagcaggcatgggcttgggctttggtccagggtccctgggaacctggagagaccccttaacatctgtttgagggcagaggccgagctgcagggagctgatgagagagtatgtgttagggtggctgtagtctagccctgaggacacgccttgctgggaaaggaaagggaacgttgtgtgctctgtgaagtgcctgagaaatagtcctggaccctaaaattctgtgtgtcttcctgttgcataatgtccctccccaatttctttagccccaaaaagttaacaaaggattgttagtttgcgttgttggtctcagtaggtttttctttgacatggatttgcatatccattcatgagctccaacctgacagtcccttgaacagcagcctcagtgaacagggcttggtcttgtcacttactgaggggtgggttcacgtttagcaaataattagagtgatttcaatagcgagtgtgaagtaacatttcgtttttcgtttgatgtttgaattgctcttgatgtgtgtctgtctccacaggttggggacaccctaggagacagcagcagctctgttctggagttcatgtcgatgaagtcctatcccgacgtttctgtggatatctccatgctcagctctctgggtgagttgtaacaggcactttcccacagcacctggtgaaggtgtgatagaggaagaaaacacacggcctccacctcctctcccttcctgactagacagggatgccaggaaaatcttttgttacggtatttggtctttgtcccaggtttttggaccatagctcctaaaatccttggaatctcctgagtgttgtgtcttttttaagctaatgagaagtggttgcagcccctgggtaacctcaggatggggtctggccgatccccagtggctgtggatttcatcagtgttgcctaccgcctccatgaaatcccaaaaggtggggttccctagggagcctcattgctggacgcctggaggctctgggaagaaggcagccccttcccacgggtcccctctgcatcgctcccacctggggcccatccgtaccctgggtgacaccccgcagaataaatgggtaaatgtcagcctagtgtgtggacagaagagtcaaactctgcagggtatttagagaggtttcttctgagtgaaatacgaagaccgtggctgtgacacagtcccaggaggtcccaagaacatttgccgaggaggactggtctgcagcttgttttgatatgttttagggagacagaggacatcagtcagtacatgtcagttgtaacagtggttcgtgttggaaaggcgggacaacttgaagcgaggaatgtcgggtcgttggtggattcagagatttcctgattggcatttggttgaaagggttaagctctgaagagctgaagtcagaaagaaatgtgcatggttaacataagcagttgtagaagccaaggttcttgtcacatagatgaattcagccttcaggtagcaggcttcaaaaagagtagagtagatggcaaacatcactcatgaggccctcaaaggtaccagattgttagttaaatctctgttgggtcaggaagagacttggaaggggcaggagattctctacagaatgtagatttttcccacaagatacagctttgcagggctatttcaaaatatgtcaaagggatatattttgagataaaatactcagtttctttcagggcctgccatctatcacgtgatgctgtactaaagtcggatcggaatttggtgtcttattaccacggagtctgctttgtcaaccttcagatttctgttttaaagttaatgctggtcagctgtgcctgaattccaaaagaggggataatgaggcaagtccagtcccgcttcacatcatggcctgacctcattttccaggttgactttggagtgcccttggccaagagtgggaatccgttcagtccatggggcttagaattttatttttcatttacagatgtttccctgacttctgtgagtcactctaggaaattcatagagctcaagtctggtcttctgggaaccccatttgatagctggttagtcggaagcacagaccacagcctggggctttcagttggcatcagccggtggggccatcctggagactgtgccctcacctgggaggctgccggtgcagcgcccccgagctgttctgacctccagcagcatttgtggtgcctggatccatgggtcccactgctttgcgtggtgacgttccacctgtctctgctggctctgttcaggcacttatggccgtgatttattataggggaagggtgccaacagcagcagagggacaagagtgacatccaaggaaacccagcg

SEQ ID NO: 11014 - DNA, 546 bp, Homo sapiens
tcagtatttggcgacttgaagtcggacgagatggagctgctctactcagcctacggagatgagacaggcgtgcagtgtgcgctgagcctgcaggagtttgtgaaggatgctgggagctacagcaagaaagtggtggacgacctcctggaccagatcacaggcggagaccactctaggacgctcttccagctgaagcagagaagaaatgttcccatgaagcctccagatgaagccaaggttggggacaccctaggagacagcagcagctctgttctggagttcatgtcgatgaagtcctatcccgacgtttctgtggatatctccatgctcagctctctggggcctgccatctatcacgtgatgctgtactaaagtcggatcggaatttggtgtcttattaccacggagtctgctttgtcaaccttcagatttctgttttaaagttaatgctggtcagctgtgcctgaattccaaaagaggggataatgaggggaagggtgccaacagcagcagagggacaagagtgacatccaaggaaacccagcg

SEQ ID NO: 11015 - DNA, 14065 bp, Homo sapiens
tcacctttctctccagtgccactactgcgctttcgatgcagaataattcagtatttggcgacttgaagtcggacgagatggagctgctctactcagcctacggagatgagacaggcgtgcagtgtgcgctgaggcaagtgtcggccccggggagcccttggctgctgtgcagcttgagctgtgccctggtgtgggacgtggagtcccacatgtgtgcgggtggggagagagccatcttgcagccgtccatatggcagcctgggtcttcccgttgctttcagtcatccacacaggtctgccacaggccagtcctgaaatctgggtaactcagtcagaaggtggtgatcagggcgtagcttgtgaaggggttgggggtgtgttgagcacactggatcgtattgaattgtgtttcctaagtgaccgtgctagctcaggctgcagtgacaaagcaccacagactggggtcttattcctgggggctggcatttgccatgaaggtgtgggcagggctggttcctcccgagccctctctcctgggcctgcaggtgccgtctttccgtcttttccctgtgccttcccggggccatcctgcgtgtgtctgtgtcctcggctctcctggagaccctaccgttctcaaggaccctggtcatattggatcagggccaccctaatggcctcatgtcactgcagttacctctaaaggccgttaaagtccccagctccaagtataatcacattccaaggcactggggtcgggatttcaacttacgaactctgagcgggagatacaattcaggccatggcaggctaaagtataatactaaaatcacaaatgtagcagcctgcttttccgtagaatgttgctgtgtgtattttttgttttctgtggcaaaataaaagtgggtcactcttgtaaaatttggcagtttttaatggagaaagcaacttaattttgctagcctttaagaaatggcatcttgacatatcaggtcttcattttattccaacaagaatgcagaatatgttttaaaaataaacaagaatccccttagtgcttcataaaataagtgaaaacctgaccctgatttttgtagcaaaaaatgaagtaaacgtggaaaatgaagaggaaattctagtaggagacgatggggtcataagtcagaaattaaagagttgtttgctccccaccctcccgccagccctcacctcacccctgctgtggggcctctgcccagcctgggccaaggccgtggctcccctggtgccatcctgtccgcagtcggctccctgtccacggcgtgtggctccttcaggacatcagtcacctgttgtccatgtggcacatcagtggactgtgcacaccccccgccttccccagctgtctgtccctagaacgcatcaggttccatgttgccgtgaagaaagatcattctgaccccgcctgccttgtggctgcaggggcaacactcagaagcacatctcctagggcctggcatgaggctacgtggtcccatgccagcctcagcgcacagacacccagatcctctgcccctgagtgctgcttccgtgcacgctgcgagtgccgagcttggcctgtcccgggctgtgggtgttttaacaaagacacggagtctccctgttgcctcctgtgaccgtggttcagcttctgaccagcagccatccttgttcctctctgtgaaggtctttggagtctggggagcccttctgaggcgcttgcttggtgctttgattctaagactatgcatttttgttcctggcctactttttagattgtattatattttattttttaagctgtttcatgtatatggccaagaatcaggatggtactaaaaggagtgccttggaagtgtcggcccacccctgccccacgcgcccattcctcaccggcaggcactgcccactggtgtgcttctgtccacacccacttgtgtttttaaacgcataacgagtggaaagataggagtattcttttacagatgataacatagcacacgtgtgtttctaggctgtgtgcatgtgtattcatgcttttctccctctccccactgagatctttttaacctttttgggtcatggaccactttgaaaatctaatgaaaactatcagccactccccacaaaatacccgctctgggagggtcacggggaccgaggagctgcgctggcacggcaggcttctgtgatcagggctgccgcgagggccaggcgacaagggctcctttcagcgtaccttctcccgcggcccctctagcctgcaggagtttgtgaaggatgctgggagctacagcaagaaagtggtggacgacctcctggaccagatcacaggcggagaccactctaggacgctcttccagctgaagcaggtgggctgcactcgcaccggggttggggggcaggtgcccttggggtgctgctggcgggaagagcctgcagcctgaccaggctttcggggacgaggagctgtcgcagggactctgctgccggctcctcgtcaggatctgcgtgcttctctgcacgggcaggtgtcccccggagaccgtgactgtgtgctcaccactcccagcgcactcgtaactctctatttccatcttcatctttcatctctgtcactttccttcatcctgaagagtttaaaaaaatatttcctgtagttcagatttactgacagtgatctctcagcattggcttctctgaaagtctttatttcatcttcatttttgaaattcattttccctgtgtatggaattttagatgaccttttttcccatctactgtaaaataggtttgacttgcattgttgctataaaaaagcatctgggccaagcatggtggctcacacttgtaatcccagcactttgggaggccgaggcgggcagatccaaggtcaggaggtcgagaccatcctggctaacacggtgaaaccccgtctctactaaaaaatagaaaaaattagctgggcgtggtggcaggtgcttgtagtcccagctactcgggaggctgaggcaggagaatggcatgaacccgggaggcagagcttgcagtgagccgagatcatgccactgcactccagcttgggccacagagccagaccccatctccaaaaaaaaaaaaaaagcgtctgaagtcattgtcatctttgtttcccacatgtgacgtgtcttttcggccagatctgacctgaagtctgcttttgtacagaccacaagccaggaatgtcttttacatctttaaaagggtgtttacagaaaagaaaaggaagaagaagatgcttcgggcagcgtgtggctcacagagcctcggctgctcactcccgggccctcggcaggacgggatctggccggtgctctaggagcttttgaacttttatctttctttatcagtgattttcagcattgtattttccaggtgccttggtgggcttttctttgtgttctacttagcatttgttgtttcttggatctgtctgtagttttcatcatatttggaagatttttagccattactcaaatgtcattttccaccactgcctcttcctcctcctgctggactgtggcactctgaggacagctcgtgttatctcacatggcaccgacactgtgctgccgcaccaggctgctgcagattagtttctgatgctgttggctaagttcactcacctgttctctggccacacctgaacctgttatcccagatcagttttcactgatgatgtcgtcccgcgctgctcatcacttgggctccatttgctgcttttgtgtatcttctctcatgttgtgtgtatgtttttccttacatccttgagccacgttcgtatttattgctgctgcttttgaagtcctcagtcactgagtctgtcgcctctgccgtttccggttctgtttctgtttgacactttgctgcacttggagctgtgggccattgtgcacgtgcctggtggacagtcctgaccctcgctgtctgataaaaaagcactggccacatggccgctgggaaatttgaatgtggccagtctgaatttagatgtgatgtgtgagctacaaactagatcttaaaaaactaatgcaaaaaacgtaaaaatatgagtaacgatttcttatggcccacatgttggaataaaaacatcttcaataaatttgtctaagtaaaatgcattagttaattgaatgttaagagtaattttaatgtggcagctagaattttaagagctgggtatggtggcatgcacctgtcatcagctccacaggaggctaaggtgggaggatcacttgaggccgggaggtcgaggctgcagtgcgattgcaccaccgcactctaggcaatagagcaagaccctgtctcaaaaaaaagataaaaaaacatttagaacgaggcgtgtgctcgcgttatgtctgctgggcaaggctgatctgggttctttctctctttcagagaatactgatgatcattttggcagttgttacttgtggataatggccggatcctaccaggcttgtctggggtgggtccagggcagccttattctagggttcgtgtagccttaatgctaaggagtggcccttcggggagccctgtcttttcagcgtggtctctgctgtgggtggagttcggatgagtctctgtccttcccaggctctgagaacgtttggctcatggctcccaaggaggggtcagtcccttgacctgacggtttcatctgtgcttgttacagatgaactggggtccacatgcctggtgcagtaaacccagacacccatgccgaggttttgtcatagaaaggacgtgtgtatttgcagggcgccaagcaaggtgggccaggaggctcatgtataaatcctggcctcccccactggctacaggcaaggcttgtaaagcgggggtagatctcaggaaagcagaactgaaaggcagagtcgtgcataaggacacagaggttacatgtcggcttggcctagaagggcggtatctgcaagcagggccttataggttataggtggattcaaaggttttctgatttgcagctggttaaggaggagaagctttgtttaaaaatttggggtgaagagaaaagaatgttagcttaggcttgtgggtgtggcttcctccaggcccgtcaggaagaaattcagaacaaagaacggggtcagagctcagtcttcagtttctccttatctgagcccttcatgccagtagattagtttgttggggaggtcctaggtggagggtccaggtttctgaaagacaactcagggatatacattaagatgttatctttactttctttctttttttttctttttgagacatagagtctcactctgtcacccaggctggagtgcagtggcgtgattgtggctcactgcaacctctgcctccctgattctagcgattctcctgcctcagcctcccgagtagctgggattacaggcatgcgccaccacacctggctaatttttgtatttttagtagaggcggagtttcgccatgttggccaggctggtctttaactcctgacctcaaatgatgcatccatctcagcctcccagagtggtaggatgttgtcttttctttctacagggaacagtgctgggaggttgtctttactttctacagggaacaaacatctgtctccaccttccttgactgttgttttaggatactgttaccttcttgcttatcaagtcgctgatttacttctcagagttatctaagtaactggaatttcccttgaaggaactcaagattttccttgatttccatgcttggagggctcgcaggcccctgaagagagggttgcagccaggcgggagtccccaagcagatttctgcagctctgaggagcagccccctctgcagagcctgccccaccagctcgtggttctgactctgagctctggtcaccctcccgtgtcgtggcctgcaggctccttccaggcaggaagctggcccccccaacacagcgttagaatcaggcattgctgtggggtagggaaagtgaccccctcacagcccggaaatgggaaggctctgtggtttcctctctgggttccagttagattcctttcgggaaagtgaacttggatatggagttgagtgaccccgagtgcacccccgcagtaaatgatgctcaggactaaagtgactgaaggcttttggggaaacagatgcgaacaaaacagcagtattcattttctaattaaaagcttgtgaaaatcgatgtcattgaatctgagaaacattatttcgaacaaagatcacacatgatagagtgcatatactacagcatcgctccaccggagcacaggacgggtgtgccacggaggccgacagttgtggaaggagacaatgcacggcccggcccacctgctgcaggcaccgccaggaggtgtctgcctccttcgctcctgcgcccacggcaggcccacctgccacaggcactgccaggaggtgtctgcctcctttgctcctgcacacacctgcccctgcaggactcgagctggtctcaggcaactggtcatattccaggtggaacccacgagacccttcttatcctaagcttcccataggatctaggcacatcttttttcttttgttttaagccacccaaggctgccgaaacagcatcggcgtcctctctctgtccgctccatctcgccctgtggagcgctgtccccggcacacaatcctggcgctgaggagggggctgggcgtggttgggtcagtgactggtgatgaagaaggtttggaggacccccagccttaatccattaagatggtgtgactggggagcagaattcgcagaagcgcacaagccatttttacgtgtgtgtaatgtcagcgaattgtccgtttctatgaaatcactctggaaaaactagtttctgtcctcatttacttttcagagaagaaatgttcccatgaagcctccagatgaagccaaggtaagtttttgaacatggaagggcaagccaaatattattctcacagggaaagttgtatccagcctttgaggtggggaggtctgtgtgtatgacggcgtttagaaatggagtccgtttctgatcagtaagatcaatagtgtttctcctcctcttttcatgacttgaggtgagtggtgtgaagccgcagtacattcttccaaatccagaaatgggtagtttcagagcagttggccccgctgggtgctgtccttgtgggacacccttgcaagggttgggcaggatgggccttctcaggacctgcttggtgagtagcaggtgttgtcccaagcacagtgggctctggggccagtgctggcagggcagtgctgtgagcccagactgctgcacctgccgattggcaggtgtgtgtctctgacagtcagcaggcatgggcttgggctttggtccagggtccctgggaacctggagagaccccttaacatctgtttgagggcagaggccgagctgcagggagctgatgagagagtatgtgttagggtggctgtagtctagccctgaggacacgccttgctgggaaaggaaagggaacgttgtgtgctctgtgaagtgcctgagaaatagtcctggaccctaaaattctgtgtgtcttcctgttgcataatgtccctccccaatttctttagccccaaaaagttaacaaaggattgttagtttgcgttgttggtctcagtaggtttttctttgacatggatttgcatatccattcatgagctccaacctgacagtcccttgaacagcagcctcagtgaacagggcttggtcttgtcacttactgaggggtgggttcacgtttagcaaataattagagtgatttcaatagcgagtgtgaagtaacatttcgtttttcgtttgatgtttgaattgctcttgatgtgtgtctgtctccacaggttggggacaccctaggagacagcagcagctctgttctggagttcatgtcgatgaagtcctatcccgacgtttctgtggatatctccatgctcagctctctgggtgagttgtaacaggcactttcccacagcacctggtgaaggtgtgatagaggaagaaaacacacggcctccacctcctctcccttcctgactagacagggatgccaggaaaatcttttgttacggtatttggtctttgtcccaggtttttggaccatagctcctaaaatccttggaatctcctgagtgttgtgtcttttttaagctaatgagaagtggttgcagcccctgggtaacctcaggatggggtctggccgatccccagtggctgtggatttcatcagtgttgcctaccgcctccatgaaatcccaaaaggtggggttccctagggagcctcattgctggacgcctggaggctctgggaagaaggcagccccttcccacgggtcccctctgcatcgctcccacctggggcccatccgtaccctgggtgacaccccgcagaataaatgggtaaatgtcagcctagtgtgtggacagaagagtcaaactctgcagggtatttagagaggtttcttctgagtgaaatacgaagaccgtggctgtgacacagtcccaggaggtcccaagaacatttgccgaggaggactggtctgcagcttgttttgatatgttttagggagacagaggacatcagtcagtacatgtcagttgtaacagtggttcgtgttggaaaggcgggacaacttgaagcgaggaatgtcgggtcgttggtggattcagagatttcctgattggcatttggttgaaagggttaagctctgaagagctgaagtcagaaagaaatgtgcatggttaacataagcagttgtagaagccaaggttcttgtcacatagatgaattcagccttcaggtagcaggcttcaaaaagagtagagtagatggcaaacatcactcatgaggccctcaaaggtaccagattgttagttaaatctctgttgggtcaggaagagacttggaaggggcaggagattctctacagaatgtagatttttcccacaagatacagctttgcagggctatttcaaaatatgtcaaagggatatattttgagataaaatactcagtttctttcagggcctgccatctatcacgtgatgctgtactaaagtcggatcggaatttggtgtcttattaccacggagtctgctttgtcaaccttcagatttctgttttaaagttaatgctggtcagctgtgcctgaattccaaaagaggggataatgaggcaagtccagtcccgcttcacatcatggcctgacctcattttccaggttgactttggagtgcccttggccaagagtgggaatccgttcagtccatggggcttagaattttatttttcatttacagatgtttccctgacttctgtgagtcactctaggaaattcatagagctcaagtctggtcttctgggaaccccatttgatagctggttagtcggaagcacagaccacagcctggggctttcagttggcatcagccggtggggccatcctggagactgtgccctcacctgggaggctgccggtgcagcgcccccgagctgttctgacctccagcagcatttgtggtgcctggatccatgggtcccactgctttgcgtggtgacgttccacctgtctctgctggctctgttcaggcacttatggccgtgatttattataggggaagggtgccaacagcagcagagggacaagagtgacatccaaggaaacccagcgtgaggcccagatccactcccagcagaggcacatgggacacgcttaattcccaggagtgagctgtgacaacacacgtgaaatgcccaccagggaagcccgtcagaggcttggtgctcggggtcacagggcacccccttgccaggcaggtaccaaagtccagaccccggagggaaggtgaactttagcataaaccactctgctcctgttgttggagctgtgaacaatccctagcactgggggggaccccagatgccagccgtggctggccttgccttccaggggaccctggccccaggccgctgtgacagcacttttctgcacagcagctgtttttctcagcacttctaagattttgtccttattactacttctcagcagcttggtgctgatgggctttggtgctgatgtgctgtggtgtgttagtctgtcctcacactgttataaagaaccacctgagactggtcattggtgaaggaaagaggtttaattgactcacagttcctcaggctgtttgggaggcatggctgggaggcatcaggaaacttccaatcatggcggaagatgaaggagaaacatgcatgtcttcacatggcggagcaggagagaacgcaaagggggaagtgctttgaaacaaccagatctcatgagaagtcactcactatcatgagaacagagaacagcaagggggaaatccatccccatgatccaatcaccttccaccaggaccctcccctaacattgggaattacaattcaacatgagatttgggcaggaatacagagccaaactgtatcattctgcccctgactcctctcgaatcttttgtccttttcacatttcaaaacacaatcatgccttcctaacagtcccctaaagtcttaactcattccagcattaactcagaagtccacagtccaaagtcttatctgagacaaggcaagttacttctgcctgtgagcctgtaaaatccaaaacaagttagttaattccaagatacaaatcgggtacagacattgggtaaatagacctatcccaagagggagaaatcagccaaaacaaaggggcagcaggctacaaatctgaaacccagcagggcagtcattacatcttgaggccccgaaagaatcttctttgattccttgtctcacatccaggctacactgatgcaagggatgggctcccacggccttgggcagccccgcccttgtggctctgcagggtacagcctctgtggctgctttccctggctggtgttgagtgcctgcagcttttccagatggcatggtgcaagctgtcggatctaccattctgaggtctggaggacggtggcccttttctcacagctccactaggcagtgccccagtgggtactctgtgtggggtgagggctccaacctcacatttcccctctgcactgccctagcagaggttctccatgaagggcctgcccctgcagcagacttctgcctggacaccctggcttttccatacatcctctgaaatctaggtggaggctgccaaacctcagctcttgccttctgcctacccacatacccaacaccatgtggaagcttccagggcttggggcttgcaccctctgaagcatcgacccttttagccctgtaccttggccccttttagccatggctgggacacagagcaccatggcacatgtcccagtgcttcacagagtagtggggcccttttccctcctagacccccaggcctgtgatggcagtgtctgggcaaaggtctttgaaatgtccctgaggtattaacatttggctcctctttacttacgcaaatgtctgcagccttcttgaattcctccccagaaaatgggtttttcttttctaccacatggcaggggtacaaattttccaaacttttactctctgcttcccttttaaatataagttccagtttcaggtcatttttctgtttgtgcaagtgagcataggcttttagaagcagccaagtcacctcttgaatgctttagtgcttagaaatttcttccaccaggtgccctaaatcatctctctcaagttcaaagttccacagatttctagagcagggtcacagtgctgtcagtctctcctaaagaatagcaagagtgacctttgcccccattcccaatggggtcctcgtctccatctgagaccacctcagcctggatttcactgtccatatcactatcagcatttgaatcatagccatgcaggaagtctctaggtagttccaaactttccctcatcttcctgtctttaagttctcccagctgttctagcctctgctcattacccagttctacagggcatgtctgtagtcactgttactacactttgtctactgattccctgatatcagctttgagtctctcctagtttggggctgtgttttcctgctccttcgtgtgtgttggaatcatttactggataccaggtggagtttgtagttgatgccgttgggtgataggtctgcttacacacctttgaggcctggcggcctttgttctgagtttgagaagtggcttagactctgtgggaccttccccaggcattgtcagggtaagcccagagtcaccccggggagggtgaagctggtcccctggctggtggggctcaggtgaccacagacctgtgtgcaggttcttggcatgtctggtgcacagttcaggagtgggctgggagctcatcctttccacctctcagctggacgtgctgggtccccgatggctgtggcctggaacctgctccacagtgaactgggcgggtaccagggtctgccggcctcttgcaccctccatccagctgtctggcctttgtgtgttgaggacaggagcccacaccaggcccatcctgggttgtggccacatccctccacggtgtctgtgcgtgccatgacgtggtctgtgcggtgctaggtcttgtctgatgctttgcttgagcaaaggacgctgggtgtctgccttcccttcactcactgctaagggtaatgtctgtcctccaggcctgtccacctgtctgctgtgagctcgtccactcagtttccagagcaattattgtcctgagcagagaggcctgtctggatgggcagtgtgctcctgcccttagggtagacgggccggctgagctcagccgacgtggggtcatgtcctgtttacacagggaaggtgaagaaggagctggaccctgacgacagccatttgaacttggatgagacgacgaagctcctgcaggacctgcacgaagcacaggcggagcgcggcggctctcggccgtcgtccaacctcagctccctgtccaacgcctccgagagggaccagcaccacctgggtgagatgcccccacccacgccgcatccccagagaccccagcacagtcagtgtgacgtctagacgaggtagtgggcagcattgtagttgtgggaaggctggaggctgcatgggcagcggtgctgttgtggaggtcggtttccacagatgtccttgggtcgcggcctcggtgcagagccggagcggagctgggatgctggcctggccgcacgctgggttacaggctttctgccagataccgtccccagttctgtccacccctgtgccctctgtggaccctggttccagtgtttctgctggggagagagcatggcttccttggccatgtgtcctggagtggttttggtgggtggggttttgttcccacttgtaaacactggatcactctgtcggcagagtgaatcttggcagttcttcagctgcagaggtttagctgcaaccatctgcaaaaaggccggtattttcgattccattgaccttgtgatcagggtgttaacagtgcatggagcaggctttggagggccgtaggtcaaagtctgaggcccccgatatcccagtatgactttgggaactgccctgaggtctgggctgtgtctgagggactcctggccaaggagcgttctctccttcagaagcagcatccgtgctgtgtgctgggtcagggcgacccctggctccagggtctctacacacagctctccttggcagggagtgagaggtgcccctgtgtcctgggagtccctgagccctggcggtaggtcaggaagcagaccttgggctccaggagccccacgtgtgctgcgggtctgtcctgtgtgttgaagtcctgtgttctgaaaattgcaggaagcccttctcgcctgagtgtcggggagcagccagacgtcacccacgacccctatgagtttcttcagtctccagagcctgcggcctctgccaagacctaactctagaccaccttcagctcttttattttatttttttagttttat

SEQ ID NO: 11016 - DNA, 861 bp, Homo sapiens
tcacctttctctccagtgccactactgcgctttcgatgcagaataattcagtatttggcgacttgaagtcggacgagatggagctgctctactcagcctacggagatgagacaggcgtgcagtgtgcgctgagcctgcaggagtttgtgaaggatgctgggagctacagcaagaaagtggtggacgacctcctggaccagatcacaggcggagaccactctaggacgctcttccagctgaagcagagaagaaatgttcccatgaagcctccagatgaagccaaggttggggacaccctaggagacagcagcagctctgttctggagttcatgtcgatgaagtcctatcccgacgtttctgtggatatctccatgctcagctctctggtttctttcagggcctgccatctatcacgtgatgctgtactaaagtcggatcggaatttggtgtcttattaccacggagtctgctttgtcaaccttcagatttctgttttaaagttaatgctggtcagctgtgcctgaattccaaaagaggggataatgagggaaggtgaagaaggagctggaccctgacgacagccatttgaacttggatgagacgacgaagctcctgcaggacctgcacgaagcacaggcggagcgcggcggctctcggccgtcgtccaacctcagctccctgtccaacgcctccgagagggaccagcaccacctgggaagcccttctcgcctgagtgtcggggagcagccagacgtcacccacgacccctatgagtttcttcagtctccagagcctgcggcctctgccaagacctaactctagaccaccttcagctcttttattttatttttttagttttat

SEQ ID NO: 11017 - DNA, 7210 bp, Homo sapiens
gagaagtagagcaatgcaggtgacattaatccttgcaggtttcatttcacctctatatccaacattttatctcaacatgtagtctgtagaaaacgttaatttgagctttatgggtttttttcatattaagtcttcaaaatgcacatgggatgggatgtaaagaacgctgaagtgggggcatttcagaggtgtctgctgctttttgcctgtgcctgctgggaagttgcagtgctctgtgtggcttgcgtgttgcgaggttgcggtctgcgtggctcacgtgttgggaggtcgtggtctgcgtggctcacgtgttgggaagttgcagtggtctgtatggcttgcgtgttgggaggttgcagtctgtgtggcccgtgtgttgggaggttgtggtctgcgtggcttgtgtgttgggaggttgtggttcacgtggcttgcatgttgggaagttgctgtggtctgcgtggcttatgtgttgggaggttgtggtttgtgtggcttgtgtgttgggaggttgcagtctgcgtggctcgtgtgttgggaagttgctgtggtctctggcttatgtgttgggaagttgctgtggtttgcgtggctcgtgtgttgggaggttgcagtttgcgtggcttgcgtgttgggaagttgctgtggtctgtgtggcttatgtgttgggaggttgtgggtttgtgtggctcaagtgttgggaggttgtggtctgcgtggctcacgtgtggggcggttgcttggctcgcctgttgggagtttgtggtttgcatggcttgtgtgttggaaagttgctgtggtctgtgtggcttatctgttgggaggttgtggtttttgtggcttgcgtgttggggggttgtggtctgtgtggctcacgtgttgggaggttgtggtctgcgtggctcacgtgttgggcagttgtctgcttggctcacgtgttgggaagttgtggtctgcgtggctcatgtgttgggaagttgtttatgtggcttgtgtgctggaggttgtggcctgcgtggctcacgtgttgggcggttgtctgcttggctcatgtgttgggaagttgtggtctgcgtggcttgtgtgttgggaagttgtttatgtggcttgtgtgctggaggttgtggtctacgtggcttgcactgtagttcttttggacagccttgttctgcagtctgtgtttcagccctggaattgccacattctccaagaagccctggtttcttgactagagagccttgtgtagaagccaggacctgggttctgggtgaagccctctgcagatagagctgggagatgcctgttgtgtgtgtctgcaccacatacatggacactgtgcagagggattctgttggcacctgtgtttacatgggttgaaaactgtttttacacggaaacttccagttccctcgtgccccgtgggttccgcccacttcttccctttcagttttgtatctgcgccgtgaggacttgtctcctaatcttcgtatcaactccgtgtcccattgagctgaccttccgcctctcccccagggccctggccatcctgtgggctctgagactttgcatggatccgcggtggggagctgcccccacacaaacgtccggctcttctcaggccaggtggctgccctgacatggcatgatgtccagcgcatggacgtcacccttgcactggagcccagccaaccgctgcatgacagccctcttcccccttgaaccccaagtctgcacacaccagtgcctcctcttcctggatcctcctgatggcctgtacacagaactggggtgtgggtggtgggtttttaaatgaaaaccagtccacacatgcttgagggctggagccgcctgccgtcagggcagtgccatgctgacctgctgaccgttccattttgtcaaggctcatgagcaattttaaatgtttactcgtgggtgaaggtttttgtttcagctgtaccccctatagcagggccatggggagcctaagaggttctccttggcacctgtgcgcgctctgctgttgccggtgagtctgaaattccagggaatgccgtgaggggccctctggcgtttgttcttggacaaatgtgctttcacccccattaagccctgcttgttggtcttcatttcatttgtgctgcgctgcccctcctgagggacagacgctcaggcagtgcttccttccagatgggctatctgaagaggaacggggacgggagcctgctctacagcgtggtcaacacggccgagccggacgctgatggtgggtgcccgctcagggctggctttatgctctccgtacactgctttttgggcctccgttgatattctgtaatgaaaagctgagccatggccatggggcagcatgagaggctgcccggcttcccgaccttgctcgcaccccaacgtgacacgtgcgctgagtggaggtgtggacggccatctcgcggggcgggggtgctggtcagacctcggtcagggctccttgggagcagcgggactcgagccatgttcctgaaaagctgccgagaggcctttaaggccaaacctcactagcatcaggaagggttcacatcccgagctcagtcttcagcaaagaccagagtgctggcccaccctgctccttgaatctggaaagcagtcttagaagagctgttagatgatgacgtcaggacagtgttgaaggatggtgcacactaggcctgtccagcccgtcaggggcactttgttggcctggaagtaattaagaggcttgtcctttgaacgaaagtgtgatcacttgggtttgaaacgcactcgcgggctcgcgtgaggaacgtgcagcctggcacgggttgcctctagattcctgcttccctcgctctcaccctcatgcctgctggtggtctttcacccagctccaccatgccagcgtggttttctccagtgtgtgaaggatagaaacgggctgatctatataatcttcagcttattttcctaaagaggatggaccgttgatccatatttagcttatgagagtgttgagaccgaggcagcggttgggaactgaggaactcctgctctgatcccatgagtggtgtgtgggtggtgacttgagcatggcagacatgctgtcagatgcacgcgctccaggtacacgccaccgtttcgctgttagaacacgcaggacaagatttcttcttggagttgttgagtgatccatttgaaaatgttctcaaagtattgctggtgtggtggccaaagatgtggtattttttattgtgttgactttggggtgataaagaaatgaaattgaaatgcagttagttttgagaatggtagttggcttttgcaaatttgttttcaggtgatcattataaaatccccccacctgcaccaatcacatccactgtgatgtggagaaagggctcatggcactgcactggggcaccgcgttggggtcacacctgccactcacggcccgccatgtccgtgttgcagaggaggagacccacccggtggacttgagctcgctctccagtaagctactcccaggcttcaccacgctgggcttcaaagacgagagaagaaacaaaggtaaatccatagtcccgtcccaggagccagccggagcagggaaggtggcaggggtttagtggagtgatggcaaatgctgctgattcgtacttcagagtttcctcactgtacctggattcatgttttcacatgggtaagattgagatcagttacagtgacaggaatgaaactcgtgttggatggggacacacacagcgggcaccttggttgcatcactggacttcaccttggtcagtgttttggggtccttgtgtttctgtccctgtcgcattacagaacatcccttcaggggtcagaatgtgtggcccctgggccttgggtctggcctgtgtgttctctccatctgcactgctgcctcctggctgcgctgctgctgggacctcctgcatggccccaccctccacttctccacctctgctgggtccctcccatgcagacagctgcatggacactgctcctgccggccctttctgcctcagccactcacaccatctgctaatgggacagctcactcttccctccaaaccatggccttggctcaagagcttccttgtttctggaatgttctttcctccagctccaggtgttgaaattctgcctggtctgggtctcctgttgaaggacgccctccactgggaaggatcctcttgccttcaccacttgtcttcaccagcccctgctcccctcttcctcttggggctgttgtggttgttgatactttttttttgttgtgtttgacacacatcttcttctcaccctctaacacagttctcaaccacagcacttttgtccctggagatgttggcagtgtccagaggcgtgttgatggtcccactggggttgggggtgctgctggcaccagatggtagggagatgccaggggtgctgctccacaccctatgggacactgcacagtacacctggcctgtgtcccccacagcgagagctggccctgggcaggcgtggtccctgcggtgtgtgttggttgggatcctccacagtgacagacggtgcgctctgcccacgtttccacacagctcttttgcttgtggagctcacccctttgcagagagctcatttccctgcggtctttggcctgcagaagtaaaatgaggggtggtgaattacacccctgctggttacacatggaaaactcaggagtgagaattttgtggagagcaagagaggtgagactggggtgctggctgccagccaggcggtccctcagcccctggagaagcggggtggggcctgcacaccgagtccttccagtgagtccagtgatgctctctcctcttcctcccagtcacctttctctccagtgccactactgcgctttcgatgcagaataattcagtatttggcgacttgaagtcggacgagatggagctgctctactcagcctacggagatgagacaggcgtgcagtgtgcgctgaggcaagtgtcggccccggggagcccttggctgctgtgcagcttgagctgtgccctggtgtgggacgtggagtcccacatgtgtgcgggtggggagagagccatcttgcagccgtccatatggcagcctgggtcttcccgttgctttcagtcatccacacaggtctgccacaggccagtcctgaaatctgggtaactcagtcagaaggtggtgatcagggcgtagcttgtgaaggggttgggggtgtgttgagcacactggatcgtattgaattgtgtttcctaagtgaccgtgctagctcaggctgcagtgacaaagcaccacagactggggtcttattcctgggggctggcatttgccatgaaggtgtgggcagggctggttcctcccgagccctctctcctgggcctgcaggtgccgtctttccgtcttttccctgtgccttcccggggccatcctgcgtgtgtctgtgtcctcggctctcctggagaccctaccgttctcaaggaccctggtcatattggatcagggccaccctaatggcctcatgtcactgcagttacctctaaaggccgttaaagtccccagctccaagtataatcacattccaaggcactggggtcgggatttcaacttacgaactctgagcgggagatacaattcaggccatggcaggctaaagtataatactaaaatcacaaatgtagcagcctgcttttccgtagaatgttgctgtgtgtattttttgttttctgtggcaaaataaaagtgggtcactcttgtaaaatttggcagtttttaatggagaaagcaacttaattttgctagcctttaagaaatggcatcttgacatatcaggtcttcattttattccaacaagaatgcagaatatgttttaaaaataaacaagaatccccttagtgcttcataaaataagtgaaaacctgaccctgatttttgtagcaaaaaatgaagtaaacgtggaaaatgaagaggaaattctagtaggagacgatggggtcataagtcagaaattaaagagttgtttgctccccaccctcccgccagccctcacctcacccctgctgtggggcctctgcccagcctgggccaaggccgtggctcccctggtgccatcctgtccgcagtcggctccctgtccacggcgtgtggctccttcaggacatcagtcacctgttgtccatgtggcacatcagtggactgtgcacaccccccgccttccccagctgtctgtccctagaacgcatcaggttccatgttgccgtgaagaaagatcattctgaccccgcctgccttgtggctgcaggggcaacactcagaagcacatctcctagggcctggcatgaggctacgtggtcccatgccagcctcagcgcacagacacccagatcctctgcccctgagtgctgcttccgtgcacgctgcgagtgccgagcttggcctgtcccgggctgtgggtgttttaacaaagacacggagtctccctgttgcctcctgtgaccgtggttcagcttctgaccagcagccatccttgttcctctctgtgaaggtctttggagtctggggagcccttctgaggcgcttgcttggtgctttgattctaagactatgcatttttgttcctggcctactttttagattgtattatattttattttttaagctgtttcatgtatatggccaagaatcaggatggtactaaaaggagtgccttggaagtgtcggcccacccctgccccacgcgcccattcctcaccggcaggcactgcccactggtgtgcttctgtccacacccacttgtgtttttaaacgcataacgagtggaaagataggagtattcttttacagatgataacatagcacacgtgtgtttctaggctgtgtgcatgtgtattcatgcttttctccctctccccactgagatctttttaacctttttgggtcatggaccactttgaaaatctaatgaaaactatcagccactccccacaaaatacccgctctgggagggtcacggggaccgaggagctgcgctggcacggcaggcttctgtgatcagggctgccgcgagggccaggcgacaagggctcctttcagcgtaccttctcccgcggcccctctagcctgcaggagtttgtgaaggatgctgggagctacagcaagaaagtggtggacg

SEQ ID NO: 11018 - DNA, 396 bp, Homo sapiens
gagaagtagagcaatgcaggtgacattaatccttgcagatgggctatctgaagaggaacggggacgggagcctgctctacagcgtggtcaacacggccgagccggacgctgatgaggaggagacccacccggtggacttgagctcgctctccagtaagctactcccaggcttcaccacgctgggcttcaaagacgagagaagaaacaaagtcacctttctctccagtgccactactgcgctttcgatgcagaataattcagtatttggcgacttgaagtcggacgagatggagctgctctactcagcctacggagatgagacaggcgtgcagtgtgcgctgagcctgcaggagtttgtgaaggatgctgggagctacagcaagaaagtggtggacg

SEQ ID NO: 11019 - DNA, 7502 bp, Homo sapiens
gtttgtgaaggatgctgggagctacagcaagaaagtggtggacgacctcctggaccagatcacaggcggagaccactctaggacgctcttccagctgaagcaggtgggctgcactcgcaccggggttggggggcaggtgcccttggggtgctgctggcgggaagagcctgcagcctgaccaggctttcggggacgaggagctgtcgcagggactctgctgccggctcctcgtcaggatctgcgtgcttctctgcacgggcaggtgtcccccggagaccgtgactgtgtgctcaccactcccagcgcactcgtaactctctatttccatcttcatctttcatctctgtcactttccttcatcctgaagagtttaaaaaaatatttcctgtagttcagatttactgacagtgatctctcagcattggcttctctgaaagtctttatttcatcttcatttttgaaattcattttccctgtgtatggaattttagatgaccttttttcccatctactgtaaaataggtttgacttgcattgttgctataaaaaagcatctgggccaagcatggtggctcacacttgtaatcccagcactttgggaggccgaggcgggcagatccaaggtcaggaggtcgagaccatcctggctaacacggtgaaaccccgtctctactaaaaaatagaaaaaattagctgggcgtggtggcaggtgcttgtagtcccagctactcgggaggctgaggcaggagaatggcatgaacccgggaggcagagcttgcagtgagccgagatcatgccactgcactccagcttgggccacagagccagaccccatctccaaaaaaaaaaaaaaagcgtctgaagtcattgtcatctttgtttcccacatgtgacgtgtcttttcggccagatctgacctgaagtctgcttttgtacagaccacaagccaggaatgtcttttacatctttaaaagggtgtttacagaaaagaaaaggaagaagaagatgcttcgggcagcgtgtggctcacagagcctcggctgctcactcccgggccctcggcaggacgggatctggccggtgctctaggagcttttgaacttttatctttctttatcagtgattttcagcattgtattttccaggtgccttggtgggcttttctttgtgttctacttagcatttgttgtttcttggatctgtctgtagttttcatcatatttggaagatttttagccattactcaaatgtcattttccaccactgcctcttcctcctcctgctggactgtggcactctgaggacagctcgtgttatctcacatggcaccgacactgtgctgccgcaccaggctgctgcagattagtttctgatgctgttggctaagttcactcacctgttctctggccacacctgaacctgttatcccagatcagttttcactgatgatgtcgtcccgcgctgctcatcacttgggctccatttgctgcttttgtgtatcttctctcatgttgtgtgtatgtttttccttacatccttgagccacgttcgtatttattgctgctgcttttgaagtcctcagtcactgagtctgtcgcctctgccgtttccggttctgtttctgtttgacactttgctgcacttggagctgtgggccattgtgcacgtgcctggtggacagtcctgaccctcgctgtctgataaaaaagcactggccacatggccgctgggaaatttgaatgtggccagtctgaatttagatgtgatgtgtgagctacaaactagatcttaaaaaactaatgcaaaaaacgtaaaaatatgagtaacgatttcttatggcccacatgttggaataaaaacatcttcaataaatttgtctaagtaaaatgcattagttaattgaatgttaagagtaattttaatgtggcagctagaattttaagagctgggtatggtggcatgcacctgtcatcagctccacaggaggctaaggtgggaggatcacttgaggccgggaggtcgaggctgcagtgcgattgcaccaccgcactctaggcaatagagcaagaccctgtctcaaaaaaaagataaaaaaacatttagaacgaggcgtgtgctcgcgttatgtctgctgggcaaggctgatctgggttctttctctctttcagagaatactgatgatcattttggcagttgttacttgtggataatggccggatcctaccaggcttgtctggggtgggtccagggcagccttattctagggttcgtgtagccttaatgctaaggagtggcccttcggggagccctgtcttttcagcgtggtctctgctgtgggtggagttcggatgagtctctgtccttcccaggctctgagaacgtttggctcatggctcccaaggaggggtcagtcccttgacctgacggtttcatctgtgcttgttacagatgaactggggtccacatgcctggtgcagtaaacccagacacccatgccgaggttttgtcatagaaaggacgtgtgtatttgcagggcgccaagcaaggtgggccaggaggctcatgtataaatcctggcctcccccactggctacaggcaaggcttgtaaagcgggggtagatctcaggaaagcagaactgaaaggcagagtcgtgcataaggacacagaggttacatgtcggcttggcctagaagggcggtatctgcaagcagggccttataggttataggtggattcaaaggttttctgatttgcagctggttaaggaggagaagctttgtttaaaaatttggggtgaagagaaaagaatgttagcttaggcttgtgggtgtggcttcctccaggcccgtcaggaagaaattcagaacaaagaacggggtcagagctcagtcttcagtttctccttatctgagcccttcatgccagtagattagtttgttggggaggtcctaggtggagggtccaggtttctgaaagacaactcagggatatacattaagatgttatctttactttctttctttttttttctttttgagacatagagtctcactctgtcacccaggctggagtgcagtggcgtgattgtggctcactgcaacctctgcctccctgattctagcgattctcctgcctcagcctcccgagtagctgggattacaggcatgcgccaccacacctggctaatttttgtatttttagtagaggcggagtttcgccatgttggccaggctggtctttaactcctgacctcaaatgatgcatccatctcagcctcccagagtggtaggatgttgtcttttctttctacagggaacagtgctgggaggttgtctttactttctacagggaacaaacatctgtctccaccttccttgactgttgttttaggatactgttaccttcttgcttatcaagtcgctgatttacttctcagagttatctaagtaactggaatttcccttgaaggaactcaagattttccttgatttccatgcttggagggctcgcaggcccctgaagagagggttgcagccaggcgggagtccccaagcagatttctgcagctctgaggagcagccccctctgcagagcctgccccaccagctcgtggttctgactctgagctctggtcaccctcccgtgtcgtggcctgcaggctccttccaggcaggaagctggcccccccaacacagcgttagaatcaggcattgctgtggggtagggaaagtgaccccctcacagcccggaaatgggaaggctctgtggtttcctctctgggttccagttagattcctttcgggaaagtgaacttggatatggagttgagtgaccccgagtgcacccccgcagtaaatgatgctcaggactaaagtgactgaaggcttttggggaaacagatgcgaacaaaacagcagtattcattttctaattaaaagcttgtgaaaatcgatgtcattgaatctgagaaacattatttcgaacaaagatcacacatgatagagtgcatatactacagcatcgctccaccggagcacaggacgggtgtgccacggaggccgacagttgtggaaggagacaatgcacggcccggcccacctgctgcaggcaccgccaggaggtgtctgcctccttcgctcctgcgcccacggcaggcccacctgccacaggcactgccaggaggtgtctgcctcctttgctcctgcacacacctgcccctgcaggactcgagctggtctcaggcaactggtcatattccaggtggaacccacgagacccttcttatcctaagcttcccataggatctaggcacatcttttttcttttgttttaagccacccaaggctgccgaaacagcatcggcgtcctctctctgtccgctccatctcgccctgtggagcgctgtccccggcacacaatcctggcgctgaggagggggctgggcgtggttgggtcagtgactggtgatgaagaaggtttggaggacccccagccttaatccattaagatggtgtgactggggagcagaattcgcagaagcgcacaagccatttttacgtgtgtgtaatgtcagcgaattgtccgtttctatgaaatcactctggaaaaactagtttctgtcctcatttacttttcagagaagaaatgttcccatgaagcctccagatgaagccaaggtaagtttttgaacatggaagggcaagccaaatattattctcacagggaaagttgtatccagcctttgaggtggggaggtctgtgtgtatgacggcgtttagaaatggagtccgtttctgatcagtaagatcaatagtgtttctcctcctcttttcatgacttgaggtgagtggtgtgaagccgcagtacattcttccaaatccagaaatgggtagtttcagagcagttggccccgctgggtgctgtccttgtgggacacccttgcaagggttgggcaggatgggccttctcaggacctgcttggtgagtagcaggtgttgtcccaagcacagtgggctctggggccagtgctggcagggcagtgctgtgagcccagactgctgcacctgccgattggcaggtgtgtgtctctgacagtcagcaggcatgggcttgggctttggtccagggtccctgggaacctggagagaccccttaacatctgtttgagggcagaggccgagctgcagggagctgatgagagagtatgtgttagggtggctgtagtctagccctgaggacacgccttgctgggaaaggaaagggaacgttgtgtgctctgtgaagtgcctgagaaatagtcctggaccctaaaattctgtgtgtcttcctgttgcataatgtccctccccaatttctttagccccaaaaagttaacaaaggattgttagtttgcgttgttggtctcagtaggtttttctttgacatggatttgcatatccattcatgagctccaacctgacagtcccttgaacagcagcctcagtgaacagggcttggtcttgtcacttactgaggggtgggttcacgtttagcaaataattagagtgatttcaatagcgagtgtgaagtaacatttcgtttttcgtttgatgtttgaattgctcttgatgtgtgtctgtctccacaggttggggacaccctaggagacagcagcagctctgttctggagttcatgtcgatgaagtcctatcccgacgtttctgtggatatctccatgctcagctctctgggtgagttgtaacaggcactttcccacagcacctggtgaaggtgtgatagaggaagaaaacacacggcctccacctcctctcccttcctgactagacagggatgccaggaaaatcttttgttacggtatttggtctttgtcccaggtttttggaccatagctcctaaaatccttggaatctcctgagtgttgtgtcttttttaagctaatgagaagtggttgcagcccctgggtaacctcaggatggggtctggccgatccccagtggctgtggatttcatcagtgttgcctaccgcctccatgaaatcccaaaaggtggggttccctagggagcctcattgctggacgcctggaggctctgggaagaaggcagccccttcccacgggtcccctctgcatcgctcccacctggggcccatccgtaccctgggtgacaccccgcagaataaatgggtaaatgtcagcctagtgtgtggacagaagagtcaaactctgcagggtatttagagaggtttcttctgagtgaaatacgaagaccgtggctgtgacacagtcccaggaggtcccaagaacatttgccgaggaggactggtctgcagcttgttttgatatgttttagggagacagaggacatcagtcagtacatgtcagttgtaacagtggttcgtgttggaaaggcgggacaacttgaagcgaggaatgtcgggtcgttggtggattcagagatttcctgattggcatttggttgaaagggttaagctctgaagagctgaagtcagaaagaaatgtgcatggttaacataagcagttgtagaagccaaggttcttgtcacatagatgaattcagccttcaggtagcaggcttcaaaaagagtagagtagatggcaaacatcactcatgaggccctcaaaggtaccagattgttagttaaatctctgttgggtcaggaagagacttggaaggggcaggagattctctacagaatgtagatttttcccacaagatacagctttgcagggctatttcaaaatatgtcaaagggatatattttgagataaaatactcagtttctttcagggcctgccatctatcacgtgatgctgtactaaagtcggatcggaatttggtgtcttattaccacggagtctgctttgtcaaccttcagatttctgttttaaagttaatgctggtcagctgtgcctgaattccaaaagaggggataatgaggcaagtccagtcccgcttcacatcatggcctgacctcattttccaggttgactttggagtgcccttggccaagagtgggaatccgttcagtccatggggcttagaattttatttttcatttacagatgtttccctgacttctgtgagtcactctaggaaattcatagagctcaagtctggtcttctgggaaccccatttgatagctggttagtcggaagcacagaccacagcctggggctttcagttggcatcagccggtggggccatcctggagactgtgccctcacctgggaggctgccggtgcagcgcccccgagctgttctgacctccagcagcatttgtggtgcctggatccatgggtcccactgctttgcgtggtgacgttccacctgtctctgctggctctgttcaggcacttatggccgtgatttattataggggaagggtgccaacagcagcagagggacaagagtgacatccaaggaaacccagcgtgaggcccagatccactcccagcagaggcacatgggacacgcttaat

SEQ ID NO: 11020 - DNA, 580 bp, Homo sapiens
gtttgtgaaggatgctgggagctacagcaagaaagtggtggacgacctcctggaccagatcacaggcggagaccactctaggacgctcttccagctgaagcagagaagaaatgttcccatgaagcctccagatgaagccaaggttggggacaccctaggagacagcagcagctctgttctggagttcatgtcgatgaagtcctatcccgacgtttctgtggatatctccatgctcagctctctggggcctgccatctatcacgtgatgctgtactaaagtcggatcggaatttggtgtcttattaccacggagtctgctttgtcaaccttcagatttctgttttaaagttaatgctggtcagctgtgcctgaattccaaaagaggggataatgagatgtttccctgacttctgtgagtcactctaggaaattcatagagctcaagtctggtcttctgggaaccccatttgatagctggggaagggtgccaacagcagcagagggacaagagtgacatccaaggaaacccagcgtgaggcccagatccactcccagcagaggcacatgggacacgcttaat

SEQ ID NO: 11021 - DNA, 9453 bp, Homo sapiens
agtgagtgtggaggcgcggacgcgcggcggagctggaactgctgcagctgctgccgccgccggaggaaccttgatccccgtgctccggacaccccgggcctcgccatggtgagtgaggctggggggtcgccgaggctgcgggctctgaggcgggcttaacggggcaggacccctgagggggcgacagagcccagagtggggggcgtccgggcccggcgagagcctcgggacccttttctacccgcgttgtcgggggctgttgaacccagagcgggacgtctggatcaccagaggtttccagaagcgactttagcaccaaatgggatgtttaagtccacaaatgggtatctgagcccctaaaggggacatttgaaccccggatggaggatcgggaccctcagtgggacccctcaaaaggattttggacccaggatggggcgttgggtttcaggatggaggtgtttggaccccaggggacgaaataagaaagatgggctggggaggggagctattcgggccctgatgaaggcgtttggtcctgagaggatgcggggaacgggggacgaagggaggctgggctgctcctggatggggtggtggagggtagctgggcccgggcggggaggggcgacccctgggctcctgtggagcagaggagagggtcaaggatgggcggtcacttctacagatgagactcccgagggtgggggagggtgggggagggtggtctccagagcccagcactgcagaggaggaggagggtgaggtgcaagcttatgggaggaagagcctggggtgggtggcagcggagattagaagatactcttgaaggcttccgggacggagaaggatcagggtcgtggaggtggtgaaaagggatggtgagagtggggctcgccagtagtcgggggacagggacccttggggttaatttggaagtagctagaaaaggttccgaggttactagtgggttaagactgttgctctagaaagacagaatttttttaacggggtgggagtgttgtgtttgggtccaagagaagatggatttccaaggtgaggggtgggggaggacttgggcttgggtggttgggaggtgaggtggaaggagaaaatgaatggcagtcaggggggcctaggtttgggggtggatgtgggtagcaccctgccagtctccagggacaggccaggacaaagacggctcagtgtggatggggagtgggctgcagggcccggaggaagcttttctaccgtcctccttcctcaggaagaacgcggctgggtggaagacaccggggcagtgggagcaggtgggcggagctgttcgggcccctattgcgcactgaagcctcatgaaatggggatgggagatcaaagtttggggtgcctcgaatgagccagctttttcaagcctagaagcctcactctgtcgctgcccttttcaggccaagagcactgccttttcccagcaggagcgccggttttctcatgatccccagccccacgcaccatgctgcacctcgtcacttgtgccaaatgacagtgcagtacagtgtggcgtcagtgacaatcagatgcctattcccgtgccctcggggtgggggctgcagagcttgatcagagagtgcctctggggagaccccttgatcggcctgagggccacttgttccattcagggccctcgctgagcgtgtctgttaattcacagggctttgagagaaaaccagcagactagttctttcctactccctgccacccacaacacccacagccccaccaggctgagcctgggaaccgtgtgcagccatcctccctggcaaggctggggagaacaggcagccgctgctgtgtatcagatctcatacttgctgacacagacctgatggctcctcttgccgctaccccattttcccccagcagaacctggctaaaaggggccctgaagcactagcaggccccctacctccagaataggacccaagctttggccacaactagtttctctttctgtttgtaatcagcaaggtagaggtgggacaagtcactggtaactggccttggactttggcctgagctctgtggctcctccttggcccgggtgaggggccctggccttggtttctgatctcatctaacactgctctctggcattggctgggggctggggcaaggcagagaaatcacaccctcttccctcccccacctcatggttttttttcttgtccagccccttgctggagcctaagatgagggataaggaagcaggagaccagctgagttattttggaaacagtttttgttgaaagtttagtcttcaggtctagaaagggaagaaaccttgagcaaggatcaatgatatcttcttaggcggtcggttttctgggcggcaaccttgcttgagatctgtacctttccttgaccaagcagggaagtgggtctccaacatgggagggagagcatctgacaggccctccatgcagagccacgcctatttgcagcaaccctgtgacagaactgaacatggcagtgcctcatctgcatcttccagtcttttggtggagactggcaaacggtggccttcagagccgctcggggcagtctgcagcctgtcacagcctcctcgcccccacccccagccccttacagtgctgcccaaaggtccggggagctggacttcttgcagggcggaacagtgggctgggaaggccctgacctggctcgctttttccattctaggccaggggaaagaatgaaaagcagatgggatggcagccacctccccacactgctgccctcctctctgttctttccctgaccctccctgggcattgcctggtctcggtaaccagaagcccatcctcccttctcactttccctaagcctcttcctcaggtgtcaggacctaagggatggctccaggcttttttgtccatggtgggaggtggggggcaggtggatcaagaggctcatgggcctggggctaccaggttggcatttagaagcccaaccaccctgtcttttttgaaggcaatgcagaagaatcttcatttggcctccccacctcccctttacactttggacttttccagaatgtgcatgtgtgccgttttctcccttcctctttccccctccctaagccctctcccctctgtgatcatcattttgattacccctcccattctgcctatttggggcttgcaagttcttcttccgttaggttttttttttttttttctaacttttttagatcagtgattgttaatatttgggacggggatgggggtaggggaggcaggcagtggtttgttcctagcttctggaacctctccgtagaatactgcaaattcacataatagtctgcttctatttctgaggctctcagactcgagactagaacatgctatagacttggagcccctttccctgattgtgaaaggaaggggaacagacccaccatggtcccgggatggtggtgccttcttcacagcatcaacaaaaaccagggaaaatgtgtcttttggctgctaaagctaaatgttgggattcagcctccccaaccccccagccccgctcctgccccataggatcactatgcctggctgatgcccagcacaccagtgcaggagaagccagtccccgcatctcctccccacccccaaaccccgcatgcagcaagggctgcctgccacccactggccagtccccagagtgcccaagctggaaagggttaaaaactgcagtgcaagccagcttcagtcctctgctgctgcccgctgcagccctctccctgacgtttgtcccttctgcccaaaagaaacaaaacagaatggccctgtgccctcactgtgcgcagggggtggagcgcctgcctccagcctgaccagagttctttaggtgcttgagcaactcgggccgccggttaggagaatttttgccacttgggtggactctgcctgagccaaccgcctccaaataggtgacacagaaactagcagagatagccccagacatcgtccctctgccctacccaaggactggcctgcttcagtttggagccttctagagcttcttgatgaggcctccagggcaatcgttcccttcactcggcctctggggctctcactgatgagatgcaaacctgtgccaggcctcaccagcgctgctggtttggggctggggcaggcttttctcccgcccctgtggctcccacatgctgagttgagattggaagcccgtgggtctgggcagcttcatcgggccgtgcgtccagcaggcctgagtgtccagcccaccctggtacccagctttctgaatcaccagactttatcatcaggcgctggctctgcctcagaccctgactctggcatgctcctccctggcccggcgggaatggcacgtggagctggcctcactggggccgagggtctgggctgagtgaggaagatgcgtccgtgctgtccggcctggtgactgactttccccttcatgcttttacaggctgaccagctgactgaggagcagattgcaggtgagtctgctatccccctcatcttagctcaggaaagcctccacatccccagccaaatcttagccactgaggagtgacatctgatgggtgaacctgtgtatcccttgtgtcacctaacactatgccttgtgcctagaatgctgataaatgtgtgtaagagcacaccagtgccccaatgacacgaagccccatggccctgagacaggcctttaccagacaccaaaggctgtgttcctctcctgggcctgggtcatctaggggcttgatatcagtggctgcaggacgagcccaactctctctcccagcttcagccaggttggcttagaaggtgagctccctgcctccctgtggggcctgcagagctcctgtcccactttaggagccgcccaggagctggctcgtcactcccacctctgcgcttgcctgcgctttgcacttcctttcgcatgtgcctgcgcctgcctgttctgctggcggaagtgcctccccagtgctttgcatgggcagctccttcccgtcccttagctcagatgtcccctcggggaggccttccctgacccccatctcaagtacacagccttcctttactctccttcacatcactttattttcttcataacctttctcgctgtctgaaattattttcttatgtcttcacctgttgtatctcctgttactagatgtgagttccattgagtttgggacttggttttgttggtccctgctatagccttaatgcctgcctagaacgtagtaggtcctccgcaaacttttgctggctaaacaaacatctctctctcagcaagctagaagaaatccctggatcccatctaattcatttttctaacccctccaaaaccccagaagggtcagctacaggaactattgtgtaattacagatccgtgcctgcctacccgcccatactgagctgcccgaggacagagagcaactcttggtttatctccatagccaggggccagcacacagtagaccagagtagcgatccagagaatgggcctctgctccccaccagctacccagcccccagctctgctgtcaggttcaaccggctgtgtaacaagtactaaaggcccagcttctgcggtgggaggcaggaacggacttgccttctctcctttctcccctcaacccgcatcacagagtcacctttgcagcttcaaaattttggccctgggtggctatggagacccctgaggaaagccagaagatggcctggtttagtgatcatgagctcggggtgccccatgacccactcactacctgccctccccaagaacaacaaggcctcagcacagggaggtgccagcctccccaaagagactcttgccatgtccccagggcccagaggctcagggccacagcttcccagctgtgcatgtccctcccaatgcacctgccacccatctcccaactctggccttgtgcaacataaacggtctgcttttcaccctgtccccattagcaaactgtccaccgcctcaccccagcccacaccctctgggaataggctgccggacatctgtttttggagggcttgggggtagaggagcaccaggtgccaaaatgggcccagtgggagggcaagagccatgtgcttttctccctgcccctgatgcggccccagctgtggccttcccactcagcactgctagctcctcatcctcctggcttggcagccgtcccctcgctttccatccccccatcaaccccacgcactgtccgtcagccatgttctgctgccgaccacccccacgctcaccacacgcagtggctcagctcctttggaagctggtagcacccacggcaaggaacagggctgccagtcagaagggagtggatgcctgcatttcctcttcaggccggccagaggcattctgcagcctcccctcctcgtcccagccagccaaccctggctaacacactcagacaaagaatcctttcggctctcattcactccatgactttggttcatttcatcatttcaagggagaagtcaaagccagggaccaaacagaaatgtagaatcatctaaggacagctgtcagaccattttccccactgtcttcactggctggccagaaaaatagcttcacctagcacagtgttgatgttcaataactgttgaatgaaggttggaagggctttgccctgagcactgaggagagagagctggttgcgtgggacttgaagtctgtctcagtttctttaggtgggactgatgcccttggccttcctccagggaaggcatccagcatccagaggtaaggattctcctgtggaccttgtgacctctgactcctcccccttcttcccccagagttcaaggaggccttctccctctttgacaaggatggagatggcactatcaccaccaaggagttggggacagtgatgagatccctgggacagaaccccactgaagcagagctgcaggatatgatcaatgaggtggatgcagatggtgagccccacagagcgcgtgggcagccctgctcctggtcaccccgagtgactgcagggagcctctctcagggtgatggatgagcccgtgtctctcagggcccaggccaagagcattctccatcctttccccaccttccagggaacgggaccattgacttcccggagttcctgaccatgatggccagaaagatgaaggacacagacagtgaggaggagatccgagaggcgttccgtgtctttgacaaggtaagcagccctctccaggggcggctctgagactgacgccagccttcaggcagacaggcggaactggagccacggagctaccacttccaggaggtccgggtcccggtgccagcctcattgccaacctgctctgccacctcaggcagcctccctcactgtgctcactgctgagggatggtgatgacagccacccctctcactgcctctctccccaccgggagaagtgcccagtgaaaggctttatccccaacccccaggatgggaatggctacatcagcgccgcagagctgcgtcacgtaatgacgaacctgggggagaagctgaccgatgaggaggtggatgagatgatcagggaggctgacatcgatggagatggccaggtcaattatgaaggtgagtcaaggccaggcttgatctctggaacaagaagagaatcgcagcttcaggaacaagcccccagatccctcttgttggggagggccgctcgccacttagcctgcccgcctgacctcctctctctctgcttcactccacagagtttgtacagatgatgactgcaaagtgaaggccccccgggcagctggcgatgcccgttctcttgatctctctcttctcgcgcgcgcactctctcttcaacactcccctgcgtaccccggttctagcaaacaccaattgattgactgagaatctgataaagcaacaaaagatttgtcccaagctgcatgattgctctttctccttcttccctgagtctctctccatgcccctcatctcttccttttgccctcgcctcttccatccatgtcttccaaggcctgatgcattcataagttgaagccctccccagatccccttggggagcctctgccctcctccagcccggatggctctcctccattttggtttgtttcctcttgtttgtcatcttattttgggtgctggggtggctgccagccctgtcccgggacctgctgggagggacaagaggccctcccccaggcagaagagcatgccctttgccgttgcatgcaaccagccctgtgattccacgtgcagatcccagcagcctgttggggcaggggtgccaagagaggcattccagaaggactgagggggcgttgaggaattgtggcgttgactggatgtggcccaggagggggtcgagggggccaactcacagaaggggactgacagtgggcaacactcacatcccactggctgctgttctgaaaccatctgattggctttctgaggtttggctgggtggggactgctcatttggccactctgcaaattggacttgcccgcgttcctgaagcgctctcgagctgttctgtaaatacctggtgctaacatcccatgccgctccctcctcacgatgcacccaccgccctgagggcccgtcctaggaatggatgtggggatggtcgctttgtaatgtgctggttctctttttttttctttcccctctatggcccttaagactttcattttgttcagaaccatgctgggctagctaaagggtggggagagggaagatgggccccaccacgctctcaagagaacgcacctgcaataaaacagtcttgtcggccagctgcccaggggacggcagctacagcagcctctgcgtcctggtccgccagcacctcccgcttctccgtggtgacttggcgccgcttcctcacatctgtgctccgtgccctcttccctgcctcttccctcgcccacctgcctgcccccatactcccccagcggagagcatgatccgtgcccttgcttctgactttcgcctctgggacaagtaagtcaatgtgggcagttcagtcgtctgggttttttccccttttctgttcatttcatctggctccccccaccacctccccaccccaccccccaccccctgcttcccctcactgcccaggtcgatcaagtggcttttcctgggacctgcccagctttgagaatctcttctcatccaccctctggcacccagcctctgagggaaggagggatggggcatagtgggagacccagccaagagctgagggtaagggcaggtaggcgtgaggctgtggacattttcggaatgttttggttttgttttttttaaaccgggcaatattgtgttcagttcaagctgtgaagaaaaatatatatcaatgttttccaataaaatacagtgactacctga

SEQ ID NO: 11022 - DNA, 2184 bp, Homo sapiens
agtgagtgtggaggcgcggacgcgcggcggagctggaactgctgcagctgctgccgccgccggaggaaccttgatccccgtgctccggacaccccgggcctcgccatggctgaccagctgactgaggagcagattgcagagttcaaggaggccttctccctctttgacaaggatggagatggcactatcaccaccaaggagttggggacagtgatgagatccctgggacagaaccccactgaagcagagctgcaggatatgatcaatgaggtggatgcagatgggaacgggaccattgacttcccggagttcctgaccatgatggccagaaagatgaaggacacagacagtgaggaggagatccgagaggcgttccgtgtctttgacaaggatgggaatggctacatcagcgccgcagagctgcgtcacgtaatgacgaacctgggggagaagctgaccgatgaggaggtggatgagatgatcagggaggctgacatcgatggagatggccaggtcaattatgaagagtttgtacagatgatgactgcaaagtgaaggccccccgggcagctggcgatgcccgttctcttgatctctctcttctcgcgcgcgcactctctcttcaacactcccctgcgtaccccggttctagcaaacaccaattgattgactgagaatctgataaagcaacaaaagatttgtcccaagctgcatgattgctctttctccttcttccctgagtctctctccatgcccctcatctcttccttttgccctcgcctcttccatccatgtcttccaaggcctgatgcattcataagttgaagccctccccagatccccttggggagcctctgccctcctccagcccggatggctctcctccattttggtttgtttcctcttgtttgtcatcttattttgggtgctggggtggctgccagccctgtcccgggacctgctgggagggacaagaggccctcccccaggcagaagagcatgccctttgccgttgcatgcaaccagccctgtgattccacgtgcagatcccagcagcctgttggggcaggggtgccaagagaggcattccagaaggactgagggggcgttgaggaattgtggcgttgactggatgtggcccaggagggggtcgagggggccaactcacagaaggggactgacagtgggcaacactcacatcccactggctgctgttctgaaaccatctgattggctttctgaggtttggctgggtggggactgctcatttggccactctgcaaattggacttgcccgcgttcctgaagcgctctcgagctgttctgtaaatacctggtgctaacatcccatgccgctccctcctcacgatgcacccaccgccctgagggcccgtcctaggaatggatgtggggatggtcgctttgtaatgtgctggttctctttttttttctttcccctctatggcccttaagactttcattttgttcagaaccatgctgggctagctaaagggtggggagagggaagatgggccccaccacgctctcaagagaacgcacctgcaataaaacagtcttgtcggccagctgcccaggggacggcagctacagcagcctctgcgtcctggtccgccagcacctcccgcttctccgtggtgacttggcgccgcttcctcacatctgtgctccgtgccctcttccctgcctcttccctcgcccacctgcctgcccccatactcccccagcggagagcatgatccgtgcccttgcttctgactttcgcctctgggacaagtaagtcaatgtgggcagttcagtcgtctgggttttttccccttttctgttcatttcatctggctccccccaccacctccccaccccaccccccaccccctgcttcccctcactgcccaggtcgatcaagtggcttttcctgggacctgcccagctttgagaatctcttctcatccaccctctggcacccagcctctgagggaaggagggatggggcatagtgggagacccagccaagagctgagggtaagggcaggtaggcgtgaggctgtggacattttcggaatgttttggttttgttttttttaaaccgggcaatattgtgttcagttcaagctgtgaagaaaaatatatatcaatgttttccaataaaatacagtgactacctga

SEQ ID NO: 11023 - DNA, 8232 bp, Homo sapiens
gcggcgagggaaagtagtccggcgacgggagcgagcgcgcgcgcgcccggcggcaaacccaattcctgtgcagggtggggacgagagattcgcgggcccgtaggtgtggagcggggcgcggagggatccgtgggagccgcagtgcggcggcgcgcgggccgggtggggcggggccgagcgaggcggggcgcgcgcggcggccgttgagggaccgttggggcgggaggcggcggcggcggcggcgcgcgctgcgggcagtgagtgtggaggcgcggacgcgcggcggagctggaactgctgcagctgctgccgccgccggaggaaccttgatccccgtgctccggacaccccgggcctcgccatggtgagtgaggctggggggtcgccgaggctgcgggctctgaggcgggcttaacggggcaggacccctgagggggcgacagagcccagagtggggggcgtccgggcccggcgagagcctcgggacccttttctacccgcgttgtcgggggctgttgaacccagagcgggacgtctggatcaccagaggtttccagaagcgactttagcaccaaatgggatgtttaagtccacaaatgggtatctgagcccctaaaggggacatttgaaccccggatggaggatcgggaccctcagtgggacccctcaaaaggattttggacccaggatggggcgttgggtttcaggatggaggtgtttggaccccaggggacgaaataagaaagatgggctggggaggggagctattcgggccctgatgaaggcgtttggtcctgagaggatgcggggaacgggggacgaagggaggctgggctgctcctggatggggtggtggagggtagctgggcccgggcggggaggggcgacccctgggctcctgtggagcagaggagagggtcaaggatgggcggtcacttctacagatgagactcccgagggtgggggagggtgggggagggtggtctccagagcccagcactgcagaggaggaggagggtgaggtgcaagcttatgggaggaagagcctggggtgggtggcagcggagattagaagatactcttgaaggcttccgggacggagaaggatcagggtcgtggaggtggtgaaaagggatggtgagagtggggctcgccagtagtcgggggacagggacccttggggttaatttggaagtagctagaaaaggttccgaggttactagtgggttaagactgttgctctagaaagacagaatttttttaacggggtgggagtgttgtgtttgggtccaagagaagatggatttccaaggtgaggggtgggggaggacttgggcttgggtggttgggaggtgaggtggaaggagaaaatgaatggcagtcaggggggcctaggtttgggggtggatgtgggtagcaccctgccagtctccagggacaggccaggacaaagacggctcagtgtggatggggagtgggctgcagggcccggaggaagcttttctaccgtcctccttcctcaggaagaacgcggctgggtggaagacaccggggcagtgggagcaggtgggcggagctgttcgggcccctattgcgcactgaagcctcatgaaatggggatgggagatcaaagtttggggtgcctcgaatgagccagctttttcaagcctagaagcctcactctgtcgctgcccttttcaggccaagagcactgccttttcccagcaggagcgccggttttctcatgatccccagccccacgcaccatgctgcacctcgtcacttgtgccaaatgacagtgcagtacagtgtggcgtcagtgacaatcagatgcctattcccgtgccctcggggtgggggctgcagagcttgatcagagagtgcctctggggagaccccttgatcggcctgagggccacttgttccattcagggccctcgctgagcgtgtctgttaattcacagggctttgagagaaaaccagcagactagttctttcctactccctgccacccacaacacccacagccccaccaggctgagcctgggaaccgtgtgcagccatcctccctggcaaggctggggagaacaggcagccgctgctgtgtatcagatctcatacttgctgacacagacctgatggctcctcttgccgctaccccattttcccccagcagaacctggctaaaaggggccctgaagcactagcaggccccctacctccagaataggacccaagctttggccacaactagtttctctttctgtttgtaatcagcaaggtagaggtgggacaagtcactggtaactggccttggactttggcctgagctctgtggctcctccttggcccgggtgaggggccctggccttggtttctgatctcatctaacactgctctctggcattggctgggggctggggcaaggcagagaaatcacaccctcttccctcccccacctcatggttttttttcttgtccagccccttgctggagcctaagatgagggataaggaagcaggagaccagctgagttattttggaaacagtttttgttgaaagtttagtcttcaggtctagaaagggaagaaaccttgagcaaggatcaatgatatcttcttaggcggtcggttttctgggcggcaaccttgcttgagatctgtacctttccttgaccaagcagggaagtgggtctccaacatgggagggagagcatctgacaggccctccatgcagagccacgcctatttgcagcaaccctgtgacagaactgaacatggcagtgcctcatctgcatcttccagtcttttggtggagactggcaaacggtggccttcagagccgctcggggcagtctgcagcctgtcacagcctcctcgcccccacccccagccccttacagtgctgcccaaaggtccggggagctggacttcttgcagggcggaacagtgggctgggaaggccctgacctggctcgctttttccattctaggccaggggaaagaatgaaaagcagatgggatggcagccacctccccacactgctgccctcctctctgttctttccctgaccctccctgggcattgcctggtctcggtaaccagaagcccatcctcccttctcactttccctaagcctcttcctcaggtgtcaggacctaagggatggctccaggcttttttgtccatggtgggaggtggggggcaggtggatcaagaggctcatgggcctggggctaccaggttggcatttagaagcccaaccaccctgtcttttttgaaggcaatgcagaagaatcttcatttggcctccccacctcccctttacactttggacttttccagaatgtgcatgtgtgccgttttctcccttcctctttccccctccctaagccctctcccctctgtgatcatcattttgattacccctcccattctgcctatttggggcttgcaagttcttcttccgttaggttttttttttttttttctaacttttttagatcagtgattgttaatatttgggacggggatgggggtaggggaggcaggcagtggtttgttcctagcttctggaacctctccgtagaatactgcaaattcacataatagtctgcttctatttctgaggctctcagactcgagactagaacatgctatagacttggagcccctttccctgattgtgaaaggaaggggaacagacccaccatggtcccgggatggtggtgccttcttcacagcatcaacaaaaaccagggaaaatgtgtcttttggctgctaaagctaaatgttgggattcagcctccccaaccccccagccccgctcctgccccataggatcactatgcctggctgatgcccagcacaccagtgcaggagaagccagtccccgcatctcctccccacccccaaaccccgcatgcagcaagggctgcctgccacccactggccagtccccagagtgcccaagctggaaagggttaaaaactgcagtgcaagccagcttcagtcctctgctgctgcccgctgcagccctctccctgacgtttgtcccttctgcccaaaagaaacaaaacagaatggccctgtgccctcactgtgcgcagggggtggagcgcctgcctccagcctgaccagagttctttaggtgcttgagcaactcgggccgccggttaggagaatttttgccacttgggtggactctgcctgagccaaccgcctccaaataggtgacacagaaactagcagagatagccccagacatcgtccctctgccctacccaaggactggcctgcttcagtttggagccttctagagcttcttgatgaggcctccagggcaatcgttcccttcactcggcctctggggctctcactgatgagatgcaaacctgtgccaggcctcaccagcgctgctggtttggggctggggcaggcttttctcccgcccctgtggctcccacatgctgagttgagattggaagcccgtgggtctgggcagcttcatcgggccgtgcgtccagcaggcctgagtgtccagcccaccctggtacccagctttctgaatcaccagactttatcatcaggcgctggctctgcctcagaccctgactctggcatgctcctccctggcccggcgggaatggcacgtggagctggcctcactggggccgagggtctgggctgagtgaggaagatgcgtccgtgctgtccggcctggtgactgactttccccttcatgcttttacaggctgaccagctgactgaggagcagattgcaggtgagtctgctatccccctcatcttagctcaggaaagcctccacatccccagccaaatcttagccactgaggagtgacatctgatgggtgaacctgtgtatcccttgtgtcacctaacactatgccttgtgcctagaatgctgataaatgtgtgtaagagcacaccagtgccccaatgacacgaagccccatggccctgagacaggcctttaccagacaccaaaggctgtgttcctctcctgggcctgggtcatctaggggcttgatatcagtggctgcaggacgagcccaactctctctcccagcttcagccaggttggcttagaaggtgagctccctgcctccctgtggggcctgcagagctcctgtcccactttaggagccgcccaggagctggctcgtcactcccacctctgcgcttgcctgcgctttgcacttcctttcgcatgtgcctgcgcctgcctgttctgctggcggaagtgcctccccagtgctttgcatgggcagctccttcccgtcccttagctcagatgtcccctcggggaggccttccctgacccccatctcaagtacacagccttcctttactctccttcacatcactttattttcttcataacctttctcgctgtctgaaattattttcttatgtcttcacctgttgtatctcctgttactagatgtgagttccattgagtttgggacttggttttgttggtccctgctatagccttaatgcctgcctagaacgtagtaggtcctccgcaaacttttgctggctaaacaaacatctctctctcagcaagctagaagaaatccctggatcccatctaattcatttttctaacccctccaaaaccccagaagggtcagctacaggaactattgtgtaattacagatccgtgcctgcctacccgcccatactgagctgcccgaggacagagagcaactcttggtttatctccatagccaggggccagcacacagtagaccagagtagcgatccagagaatgggcctctgctccccaccagctacccagcccccagctctgctgtcaggttcaaccggctgtgtaacaagtactaaaggcccagcttctgcggtgggaggcaggaacggacttgccttctctcctttctcccctcaacccgcatcacagagtcacctttgcagcttcaaaattttggccctgggtggctatggagacccctgaggaaagccagaagatggcctggtttagtgatcatgagctcggggtgccccatgacccactcactacctgccctccccaagaacaacaaggcctcagcacagggaggtgccagcctccccaaagagactcttgccatgtccccagggcccagaggctcagggccacagcttcccagctgtgcatgtccctcccaatgcacctgccacccatctcccaactctggccttgtgcaacataaacggtctgcttttcaccctgtccccattagcaaactgtccaccgcctcaccccagcccacaccctctgggaataggctgccggacatctgtttttggagggcttgggggtagaggagcaccaggtgccaaaatgggcccagtgggagggcaagagccatgtgcttttctccctgcccctgatgcggccccagctgtggccttcccactcagcactgctagctcctcatcctcctggcttggcagccgtcccctcgctttccatccccccatcaaccccacgcactgtccgtcagccatgttctgctgccgaccacccccacgctcaccacacgcagtggctcagctcctttggaagctggtagcacccacggcaaggaacagggctgccagtcagaagggagtggatgcctgcatttcctcttcaggccggccagaggcattctgcagcctcccctcctcgtcccagccagccaaccctggctaacacactcagacaaagaatcctttcggctctcattcactccatgactttggttcatttcatcatttcaagggagaagtcaaagccagggaccaaacagaaatgtagaatcatctaaggacagctgtcagaccattttccccactgtcttcactggctggccagaaaaatagcttcacctagcacagtgttgatgttcaataactgttgaatgaaggttggaagggctttgccctgagcactgaggagagagagctggttgcgtgggacttgaagtctgtctcagtttctttaggtgggactgatgcccttggccttcctccagggaaggcatccagcatccagaggtaaggattctcctgtggaccttgtgacctctgactcctcccccttcttcccccagagttcaaggaggccttctccctctttgacaaggatggagatggcactatcaccaccaaggagttggggacagtgatgagatccctgggacagaaccccactgaagcagagctgcaggatatgatcaatgaggtggatgcagatggtgagccccacagagcgcgtgggcagccctgctcctggtcaccccgagtgactgcagggagcctctctcagggtgatggatgagcccgtgtctctcagggcccaggccaagagcattctccatcctttccccaccttccagggaacgggaccattgacttcccggagttcctgaccatgatggccagaaagatgaaggacacagacagtgaggaggagatccgagaggcgttccgtgtctttgacaaggtaagcagccctctccaggggcggctctgagactgacgccagccttcaggcagacaggcggaactggagccacggagctaccacttccaggaggtccgggtcccggtgccagcctcattgccaacctgctctgccacctcaggcagcctccctcactgtgctcactgctgagggatggtgatgacagccacccctctcactgcctctctccccaccgggagaagtgcccagtgaaaggctttatccccaacccccaggatgggaatggctacatcagcgccgcagagctgcgtcacgtaatgacgaacctgggggagaagctgaccgatgaggaggtggatgagatgatcagggaggctgacatcgatggagatggccaggtcaattatgaaggtgagtcaaggccaggcttgatctctggaacaagaagagaatcgcagcttcaggaacaagcccccagatccctcttgttggggagggccgctcgccacttagcctgcccgcctgacctcctctctctctgcttcactccacagagtttgtacagatgatgactgcaaagtgaaggccccccgggcagctggcgatgcccgttctcttgatctctctcttctcgcgcgcgcactctctcttcaacactcccctgcgtaccccggttctagcaaacaccaattgattgactgagaatctgataaagcaacaaaagatttgtcccaa

SEQ ID NO: 11024 - DNA, 702 bp, Homo sapiens
gcggcgagggaaagtagtccggcgacgggagcgagcgcgcgcgcgcccggcggcaaacccaattcctgtgcagggtggggacgagagattcgcgggcccgtaggctgaccagctgactgaggagcagattgcagagttcaaggaggccttctccctctttgacaaggatggagatggcactatcaccaccaaggagttggggacagtgatgagatccctgggacagaaccccactgaagcagagctgcaggatatgatcaatgaggtggatgcagatgggaacgggaccattgacttcccggagttcctgaccatgatggccagaaagatgaaggacacagacagtgaggaggagatccgagaggcgttccgtgtctttgacaaggatgggaatggctacatcagcgccgcagagctgcgtcacgtaatgacgaacctgggggagaagctgaccgatgaggaggtggatgagatgatcagggaggctgacatcgatggagatggccaggtcaattatgaagagtttgtacagatgatgactgcaaagtgaaggccccccgggcagctggcgatgcccgttctcttgatctctctcttctcgcgcgcgcactctctcttcaacactcccctgcgtaccccggttctagcaaacaccaattgattgactgagaatctgataaagcaacaaaagatttgtcccaa

SEQ ID NO: 11025 - DNA, 7967 bp, Homo sapiens
gcggcggcgcgcgctgcgggcagtgagtgtggaggcgcggacgcgcggcggagctggaactgctgcagctgctgccgccgccggaggaaccttgatccccgtgctccggacaccccgggcctcgccatggtgagtgaggctggggggtcgccgaggctgcgggctctgaggcgggcttaacggggcaggacccctgagggggcgacagagcccagagtggggggcgtccgggcccggcgagagcctcgggacccttttctacccgcgttgtcgggggctgttgaacccagagcgggacgtctggatcaccagaggtttccagaagcgactttagcaccaaatgggatgtttaagtccacaaatgggtatctgagcccctaaaggggacatttgaaccccggatggaggatcgggaccctcagtgggacccctcaaaaggattttggacccaggatggggcgttgggtttcaggatggaggtgtttggaccccaggggacgaaataagaaagatgggctggggaggggagctattcgggccctgatgaaggcgtttggtcctgagaggatgcggggaacgggggacgaagggaggctgggctgctcctggatggggtggtggagggtagctgggcccgggcggggaggggcgacccctgggctcctgtggagcagaggagagggtcaaggatgggcggtcacttctacagatgagactcccgagggtgggggagggtgggggagggtggtctccagagcccagcactgcagaggaggaggagggtgaggtgcaagcttatgggaggaagagcctggggtgggtggcagcggagattagaagatactcttgaaggcttccgggacggagaaggatcagggtcgtggaggtggtgaaaagggatggtgagagtggggctcgccagtagtcgggggacagggacccttggggttaatttggaagtagctagaaaaggttccgaggttactagtgggttaagactgttgctctagaaagacagaatttttttaacggggtgggagtgttgtgtttgggtccaagagaagatggatttccaaggtgaggggtgggggaggacttgggcttgggtggttgggaggtgaggtggaaggagaaaatgaatggcagtcaggggggcctaggtttgggggtggatgtgggtagcaccctgccagtctccagggacaggccaggacaaagacggctcagtgtggatggggagtgggctgcagggcccggaggaagcttttctaccgtcctccttcctcaggaagaacgcggctgggtggaagacaccggggcagtgggagcaggtgggcggagctgttcgggcccctattgcgcactgaagcctcatgaaatggggatgggagatcaaagtttggggtgcctcgaatgagccagctttttcaagcctagaagcctcactctgtcgctgcccttttcaggccaagagcactgccttttcccagcaggagcgccggttttctcatgatccccagccccacgcaccatgctgcacctcgtcacttgtgccaaatgacagtgcagtacagtgtggcgtcagtgacaatcagatgcctattcccgtgccctcggggtgggggctgcagagcttgatcagagagtgcctctggggagaccccttgatcggcctgagggccacttgttccattcagggccctcgctgagcgtgtctgttaattcacagggctttgagagaaaaccagcagactagttctttcctactccctgccacccacaacacccacagccccaccaggctgagcctgggaaccgtgtgcagccatcctccctggcaaggctggggagaacaggcagccgctgctgtgtatcagatctcatacttgctgacacagacctgatggctcctcttgccgctaccccattttcccccagcagaacctggctaaaaggggccctgaagcactagcaggccccctacctccagaataggacccaagctttggccacaactagtttctctttctgtttgtaatcagcaaggtagaggtgggacaagtcactggtaactggccttggactttggcctgagctctgtggctcctccttggcccgggtgaggggccctggccttggtttctgatctcatctaacactgctctctggcattggctgggggctggggcaaggcagagaaatcacaccctcttccctcccccacctcatggttttttttcttgtccagccccttgctggagcctaagatgagggataaggaagcaggagaccagctgagttattttggaaacagtttttgttgaaagtttagtcttcaggtctagaaagggaagaaaccttgagcaaggatcaatgatatcttcttaggcggtcggttttctgggcggcaaccttgcttgagatctgtacctttccttgaccaagcagggaagtgggtctccaacatgggagggagagcatctgacaggccctccatgcagagccacgcctatttgcagcaaccctgtgacagaactgaacatggcagtgcctcatctgcatcttccagtcttttggtggagactggcaaacggtggccttcagagccgctcggggcagtctgcagcctgtcacagcctcctcgcccccacccccagccccttacagtgctgcccaaaggtccggggagctggacttcttgcagggcggaacagtgggctgggaaggccctgacctggctcgctttttccattctaggccaggggaaagaatgaaaagcagatgggatggcagccacctccccacactgctgccctcctctctgttctttccctgaccctccctgggcattgcctggtctcggtaaccagaagcccatcctcccttctcactttccctaagcctcttcctcaggtgtcaggacctaagggatggctccaggcttttttgtccatggtgggaggtggggggcaggtggatcaagaggctcatgggcctggggctaccaggttggcatttagaagcccaaccaccctgtcttttttgaaggcaatgcagaagaatcttcatttggcctccccacctcccctttacactttggacttttccagaatgtgcatgtgtgccgttttctcccttcctctttccccctccctaagccctctcccctctgtgatcatcattttgattacccctcccattctgcctatttggggcttgcaagttcttcttccgttaggttttttttttttttttctaacttttttagatcagtgattgttaatatttgggacggggatgggggtaggggaggcaggcagtggtttgttcctagcttctggaacctctccgtagaatactgcaaattcacataatagtctgcttctatttctgaggctctcagactcgagactagaacatgctatagacttggagcccctttccctgattgtgaaaggaaggggaacagacccaccatggtcccgggatggtggtgccttcttcacagcatcaacaaaaaccagggaaaatgtgtcttttggctgctaaagctaaatgttgggattcagcctccccaaccccccagccccgctcctgccccataggatcactatgcctggctgatgcccagcacaccagtgcaggagaagccagtccccgcatctcctccccacccccaaaccccgcatgcagcaagggctgcctgccacccactggccagtccccagagtgcccaagctggaaagggttaaaaactgcagtgcaagccagcttcagtcctctgctgctgcccgctgcagccctctccctgacgtttgtcccttctgcccaaaagaaacaaaacagaatggccctgtgccctcactgtgcgcagggggtggagcgcctgcctccagcctgaccagagttctttaggtgcttgagcaactcgggccgccggttaggagaatttttgccacttgggtggactctgcctgagccaaccgcctccaaataggtgacacagaaactagcagagatagccccagacatcgtccctctgccctacccaaggactggcctgcttcagtttggagccttctagagcttcttgatgaggcctccagggcaatcgttcccttcactcggcctctggggctctcactgatgagatgcaaacctgtgccaggcctcaccagcgctgctggtttggggctggggcaggcttttctcccgcccctgtggctcccacatgctgagttgagattggaagcccgtgggtctgggcagcttcatcgggccgtgcgtccagcaggcctgagtgtccagcccaccctggtacccagctttctgaatcaccagactttatcatcaggcgctggctctgcctcagaccctgactctggcatgctcctccctggcccggcgggaatggcacgtggagctggcctcactggggccgagggtctgggctgagtgaggaagatgcgtccgtgctgtccggcctggtgactgactttccccttcatgcttttacaggctgaccagctgactgaggagcagattgcaggtgagtctgctatccccctcatcttagctcaggaaagcctccacatccccagccaaatcttagccactgaggagtgacatctgatgggtgaacctgtgtatcccttgtgtcacctaacactatgccttgtgcctagaatgctgataaatgtgtgtaagagcacaccagtgccccaatgacacgaagccccatggccctgagacaggcctttaccagacaccaaaggctgtgttcctctcctgggcctgggtcatctaggggcttgatatcagtggctgcaggacgagcccaactctctctcccagcttcagccaggttggcttagaaggtgagctccctgcctccctgtggggcctgcagagctcctgtcccactttaggagccgcccaggagctggctcgtcactcccacctctgcgcttgcctgcgctttgcacttcctttcgcatgtgcctgcgcctgcctgttctgctggcggaagtgcctccccagtgctttgcatgggcagctccttcccgtcccttagctcagatgtcccctcggggaggccttccctgacccccatctcaagtacacagccttcctttactctccttcacatcactttattttcttcataacctttctcgctgtctgaaattattttcttatgtcttcacctgttgtatctcctgttactagatgtgagttccattgagtttgggacttggttttgttggtccctgctatagccttaatgcctgcctagaacgtagtaggtcctccgcaaacttttgctggctaaacaaacatctctctctcagcaagctagaagaaatccctggatcccatctaattcatttttctaacccctccaaaaccccagaagggtcagctacaggaactattgtgtaattacagatccgtgcctgcctacccgcccatactgagctgcccgaggacagagagcaactcttggtttatctccatagccaggggccagcacacagtagaccagagtagcgatccagagaatgggcctctgctccccaccagctacccagcccccagctctgctgtcaggttcaaccggctgtgtaacaagtactaaaggcccagcttctgcggtgggaggcaggaacggacttgccttctctcctttctcccctcaacccgcatcacagagtcacctttgcagcttcaaaattttggccctgggtggctatggagacccctgaggaaagccagaagatggcctggtttagtgatcatgagctcggggtgccccatgacccactcactacctgccctccccaagaacaacaaggcctcagcacagggaggtgccagcctccccaaagagactcttgccatgtccccagggcccagaggctcagggccacagcttcccagctgtgcatgtccctcccaatgcacctgccacccatctcccaactctggccttgtgcaacataaacggtctgcttttcaccctgtccccattagcaaactgtccaccgcctcaccccagcccacaccctctgggaataggctgccggacatctgtttttggagggcttgggggtagaggagcaccaggtgccaaaatgggcccagtgggagggcaagagccatgtgcttttctccctgcccctgatgcggccccagctgtggccttcccactcagcactgctagctcctcatcctcctggcttggcagccgtcccctcgctttccatccccccatcaaccccacgcactgtccgtcagccatgttctgctgccgaccacccccacgctcaccacacgcagtggctcagctcctttggaagctggtagcacccacggcaaggaacagggctgccagtcagaagggagtggatgcctgcatttcctcttcaggccggccagaggcattctgcagcctcccctcctcgtcccagccagccaaccctggctaacacactcagacaaagaatcctttcggctctcattcactccatgactttggttcatttcatcatttcaagggagaagtcaaagccagggaccaaacagaaatgtagaatcatctaaggacagctgtcagaccattttccccactgtcttcactggctggccagaaaaatagcttcacctagcacagtgttgatgttcaataactgttgaatgaaggttggaagggctttgccctgagcactgaggagagagagctggttgcgtgggacttgaagtctgtctcagtttctttaggtgggactgatgcccttggccttcctccagggaaggcatccagcatccagaggtaaggattctcctgtggaccttgtgacctctgactcctcccccttcttcccccagagttcaaggaggccttctccctctttgacaaggatggagatggcactatcaccaccaaggagttggggacagtgatgagatccctgggacagaaccccactgaagcagagctgcaggatatgatcaatgaggtggatgcagatggtgagccccacagagcgcgtgggcagccctgctcctggtcaccccgagtgactgcagggagcctctctcagggtgatggatgagcccgtgtctctcagggcccaggccaagagcattctccatcctttccccaccttccagggaacgggaccattgacttcccggagttcctgaccatgatggccagaaagatgaaggacacagacagtgaggaggagatccgagaggcgttccgtgtctttgacaaggtaagcagccctctccaggggcggctctgagactgacgccagccttcaggcagacaggcggaactggagccacggagctaccacttccaggaggtccgggtcccggtgccagcctcattgccaacctgctctgccacctcaggcagcctccctcactgtgctcactgctgagggatggtgatgacagccacccctctcactgcctctctccccaccgggagaagtgcccagtgaaaggctttatccccaacccccaggatgggaatggctacatcagcgccgcagagctgcgtcacgtaatgacgaacctgggggagaagctgaccgatgaggaggtggatgagatgatcagggaggctgacatcgatggagatggccaggtcaattatgaaggtgagtcaaggccaggcttgatctctggaacaagaagagaatcgcagcttcaggaacaagcccccagatccctcttgttggggagggccgctcgccacttagcctgcccgcctgacctcctctctctctgcttcactccacagagtttgtacagatgatgactgcaaagtgaaggccccccgggcagctggcgatgcccgttctcttgatctctctcttctcgcgcgcgcactctctcttcaacactcccctgcgtaccccggttctagcaaacaccaattgattgactgagaa

SEQ ID NO: 11026 - DNA, 696 bp, Homo sapiens
gcggcggcgcgcgctgcgggcagtgagtgtggaggcgcggacgcgcggcggagctggaactgctgcagctgctgccgccgccggaggaaccttgatccccgtgctccggacaccccgggcctcgccatggctgaccagctgactgaggagcagattgcagttcaaggaggccttctccctctttgacaaggatggagatggcactatcaccaccaaggagttggggacagtgatgagatccctgggacagaaccccactgaagcagagctgcaggatatgatcaatgaggtggatgcagatgggaacgggaccattgacttcccggagttcctgaccatgatggccagaaagatgaaggacacagacagtgaggaggagatccgagaggcgttccgtgtctttgacaaggatgggaatggctacatcagcgccgcagagctgcgtcacgtaatgacgaacctgggggagaagctgaccgatgaggaggtggatgagatgatcagggaggctgacatcgatggagatggccaggtcaattatgaagagtttgtacagatgatgactgcaaagtgaaggccccccgggcagctggcgatgcccgttctcttgatctctctcttctcgcgcgcgcactctctcttcaacactcccctgcgtaccccggttctagcaaacaccaattgattgactgagaa

SEQ ID NO: 11027 - DNA, 4051 bp, Homo sapiens
gcctgcctccagcctgaccagagttctttaggtgcttgagcaactcgggccgccggttaggagaatttttgccacttgggtggactctgcctgagccaaccgcctccaaataggtgacacagaaactagcagagatagccccagacatcgtccctctgccctacccaaggactggcctgcttcagtttggagccttctagagcttcttgatgaggcctccagggcaatcgttcccttcactcggcctctggggctctcactgatgagatgcaaacctgtgccaggcctcaccagcgctgctggtttggggctggggcaggcttttctcccgcccctgtggctcccacatgctgagttgagattggaagcccgtgggtctgggcagcttcatcgggccgtgcgtccagcaggcctgagtgtccagcccaccctggtacccagctttctgaatcaccagactttatcatcaggcgctggctctgcctcagaccctgactctggcatgctcctccctggcccggcgggaatggcacgtggagctggcctcactggggccgagggtctgggctgagtgaggaagatgcgtccgtgctgtccggcctggtgactgactttccccttcatgcttttacaggctgaccagctgactgaggagcagattgcaggtgagtctgctatccccctcatcttagctcaggaaagcctccacatccccagccaaatcttagccactgaggagtgacatctgatgggtgaacctgtgtatcccttgtgtcacctaacactatgccttgtgcctagaatgctgataaatgtgtgtaagagcacaccagtgccccaatgacacgaagccccatggccctgagacaggcctttaccagacaccaaaggctgtgttcctctcctgggcctgggtcatctaggggcttgatatcagtggctgcaggacgagcccaactctctctcccagcttcagccaggttggcttagaaggtgagctccctgcctccctgtggggcctgcagagctcctgtcccactttaggagccgcccaggagctggctcgtcactcccacctctgcgcttgcctgcgctttgcacttcctttcgcatgtgcctgcgcctgcctgttctgctggcggaagtgcctccccagtgctttgcatgggcagctccttcccgtcccttagctcagatgtcccctcggggaggccttccctgacccccatctcaagtacacagccttcctttactctccttcacatcactttattttcttcataacctttctcgctgtctgaaattattttcttatgtcttcacctgttgtatctcctgttactagatgtgagttccattgagtttgggacttggttttgttggtccctgctatagccttaatgcctgcctagaacgtagtaggtcctccgcaaacttttgctggctaaacaaacatctctctctcagcaagctagaagaaatccctggatcccatctaattcatttttctaacccctccaaaaccccagaagggtcagctacaggaactattgtgtaattacagatccgtgcctgcctacccgcccatactgagctgcccgaggacagagagcaactcttggtttatctccatagccaggggccagcacacagtagaccagagtagcgatccagagaatgggcctctgctccccaccagctacccagcccccagctctgctgtcaggttcaaccggctgtgtaacaagtactaaaggcccagcttctgcggtgggaggcaggaacggacttgccttctctcctttctcccctcaacccgcatcacagagtcacctttgcagcttcaaaattttggccctgggtggctatggagacccctgaggaaagccagaagatggcctggtttagtgatcatgagctcggggtgccccatgacccactcactacctgccctccccaagaacaacaaggcctcagcacagggaggtgccagcctccccaaagagactcttgccatgtccccagggcccagaggctcagggccacagcttcccagctgtgcatgtccctcccaatgcacctgccacccatctcccaactctggccttgtgcaacataaacggtctgcttttcaccctgtccccattagcaaactgtccaccgcctcaccccagcccacaccctctgggaataggctgccggacatctgtttttggagggcttgggggtagaggagcaccaggtgccaaaatgggcccagtgggagggcaagagccatgtgcttttctccctgcccctgatgcggccccagctgtggccttcccactcagcactgctagctcctcatcctcctggcttggcagccgtcccctcgctttccatccccccatcaaccccacgcactgtccgtcagccatgttctgctgccgaccacccccacgctcaccacacgcagtggctcagctcctttggaagctggtagcacccacggcaaggaacagggctgccagtcagaagggagtggatgcctgcatttcctcttcaggccggccagaggcattctgcagcctcccctcctcgtcccagccagccaaccctggctaacacactcagacaaagaatcctttcggctctcattcactccatgactttggttcatttcatcatttcaagggagaagtcaaagccagggaccaaacagaaatgtagaatcatctaaggacagctgtcagaccattttccccactgtcttcactggctggccagaaaaatagcttcacctagcacagtgttgatgttcaataactgttgaatgaaggttggaagggctttgccctgagcactgaggagagagagctggttgcgtgggacttgaagtctgtctcagtttctttaggtgggactgatgcccttggccttcctccagggaaggcatccagcatccagaggtaaggattctcctgtggaccttgtgacctctgactcctcccccttcttcccccagagttcaaggaggccttctccctctttgacaaggatggagatggcactatcaccaccaaggagttggggacagtgatgagatccctgggacagaaccccactgaagcagagctgcaggatatgatcaatgaggtggatgcagatggtgagccccacagagcgcgtgggcagccctgctcctggtcaccccgagtgactgcagggagcctctctcagggtgatggatgagcccgtgtctctcagggcccaggccaagagcattctccatcctttccccaccttccagggaacgggaccattgacttcccggagttcctgaccatgatggccagaaagatgaaggacacagacagtgaggaggagatccgagaggcgttccgtgtctttgacaaggtaagcagccctctccaggggcggctctgagactgacgccagccttcaggcagacaggcggaactggagccacggagctaccacttccaggaggtccgggtcccggtgccagcctcattgccaacctgctctgccacctcaggcagcctccctcactgtgctcactgctgagggatggtgatgacagccacccctctcactgcctctctccccaccgggagaagtgcccagtgaaaggctttatccccaacccccaggatgggaatggctacatcagcgccgcagagctgcgtcacgtaatgacgaacctgggggagaagctgaccgatgaggaggtggatgagatgatcagggaggctgacatcgatggagatggccaggtcaattatgaaggtgagtcaaggccaggcttgatctctggaacaagaagagaatcgcagcttcaggaacaagcccccagatccctcttgttggggagggccgctcgccacttagcctgcccgcctgacctcctctctctctgcttcactccacagagtttgtacagatgatgactgcaaagtgaaggccccccgggcagctggcgatgcccgttctcttgatctctctcttctcgcgcgcgcactctctcttcaacactcccctgcgtaccccg

SEQ ID NO: 11028 - DNA, 650 bp, Homo sapiens
gcctgcctccagcctgaccagagttctttaggtgcttgagcaactcgggccgccggttaggagaatttttgccacttgggtggactctgcctgagccaaccgcctccaaataggctgaccagctgactgaggagcagattgcagagttcaaggaggccttctccctctttgacaaggatggagatggcactatcaccaccaaggagttggggacagtgatgagatccctgggacagaaccccactgaagcagagctgcaggatatgatcaatgaggtggatgcagatgggaacgggaccattgacttcccggagttcctgaccatgatggccagaaagatgaaggacacagacagtgaggaggagatccgagaggcgttccgtgtctttgacaaggatgggaatggctacatcagcgccgcagagctgcgtcacgtaatgacgaacctgggggagaagctgaccgatgaggaggtggatgagatgatcagggaggctgacatcgatggagatggccaggtcaattatgaagagtttgtacagatgatgactgcaaagtgaaggccccccgggcagctggcgatgcccgttctcttgatctctctcttctcgcgcgcgcactctctcttcaacactcccctgcgtaccccg

SEQ ID NO: 11029 - DNA, 2820 bp, Homo sapiens
aatagcttcacctagcacagtgttgatgttcaataactgttgaatgaaggttggaagggctttgccctgagcactgaggagagagagctggttgcgtgggacttgaagtctgtctcagtttctttaggtgggactgatgcccttggccttcctccagggaaggcatccagcatccagaggtaaggattctcctgtggaccttgtgacctctgactcctcccccttcttcccccagagttcaaggaggccttctccctctttgacaaggatggagatggcactatcaccaccaaggagttggggacagtgatgagatccctgggacagaaccccactgaagcagagctgcaggatatgatcaatgaggtggatgcagatggtgagccccacagagcgcgtgggcagccctgctcctggtcaccccgagtgactgcagggagcctctctcagggtgatggatgagcccgtgtctctcagggcccaggccaagagcattctccatcctttccccaccttccagggaacgggaccattgacttcccggagttcctgaccatgatggccagaaagatgaaggacacagacagtgaggaggagatccgagaggcgttccgtgtctttgacaaggtaagcagccctctccaggggcggctctgagactgacgccagccttcaggcagacaggcggaactggagccacggagctaccacttccaggaggtccgggtcccggtgccagcctcattgccaacctgctctgccacctcaggcagcctccctcactgtgctcactgctgagggatggtgatgacagccacccctctcactgcctctctccccaccgggagaagtgcccagtgaaaggctttatccccaacccccaggatgggaatggctacatcagcgccgcagagctgcgtcacgtaatgacgaacctgggggagaagctgaccgatgaggaggtggatgagatgatcagggaggctgacatcgatggagatggccaggtcaattatgaaggtgagtcaaggccaggcttgatctctggaacaagaagagaatcgcagcttcaggaacaagcccccagatccctcttgttggggagggccgctcgccacttagcctgcccgcctgacctcctctctctctgcttcactccacagagtttgtacagatgatgactgcaaagtgaaggccccccgggcagctggcgatgcccgttctcttgatctctctcttctcgcgcgcgcactctctcttcaacactcccctgcgtaccccggttctagcaaacaccaattgattgactgagaatctgataaagcaacaaaagatttgtcccaagctgcatgattgctctttctccttcttccctgagtctctctccatgcccctcatctcttccttttgccctcgcctcttccatccatgtcttccaaggcctgatgcattcataagttgaagccctccccagatccccttggggagcctctgccctcctccagcccggatggctctcctccattttggtttgtttcctcttgtttgtcatcttattttgggtgctggggtggctgccagccctgtcccgggacctgctgggagggacaagaggccctcccccaggcagaagagcatgccctttgccgttgcatgcaaccagccctgtgattccacgtgcagatcccagcagcctgttggggcaggggtgccaagagaggcattccagaaggactgagggggcgttgaggaattgtggcgttgactggatgtggcccaggagggggtcgagggggccaactcacagaaggggactgacagtgggcaacactcacatcccactggctgctgttctgaaaccatctgattggctttctgaggtttggctgggtggggactgctcatttggccactctgcaaattggacttgcccgcgttcctgaagcgctctcgagctgttctgtaaatacctggtgctaacatcccatgccgctccctcctcacgatgcacccaccgccctgagggcccgtcctaggaatggatgtggggatggtcgctttgtaatgtgctggttctctttttttttctttcccctctatggcccttaagactttcattttgttcagaaccatgctgggctagctaaagggtggggagagggaagatgggccccaccacgctctcaagagaacgcacctgcaataaaacagtcttgtcggccagctgcccaggggacggcagctacagcagcctctgcgtcctggtccgccagcacctcccgcttctccgtggtgacttggcgccgcttcctcacatctgtgctccgtgccctcttccctgcctcttccctcgcccacctgcctgcccccatactcccccagcggagagcatgatccgtgcccttgcttctgactttcgcctctgggacaagtaagtcaatgtgggcagttcagtcgtctgggttttttccccttttctgttcatttcatctggctccccccaccacctccccaccccaccccccaccccctgcttcccctcactgcccaggtcgatcaagtggcttttcctgggacctgcccagctttgagaatctcttctcatccaccctctggcacccagcctctgagggaaggagggatggggcatagtgggagacccagccaagagctgagggtaagggcaggtaggcgtgaggctgtggacattttcggaatgttttggttttgttttttttaaaccgggcaatattgtgttcagttcaagctgtgaagaaaaatatatatcaatgttttccaataaaatacagtgactacctg

SEQ ID NO: 11030 - DNA, 2536 bp, Homo sapiens
aatagcttcacctagcacagtgttgatgttcaataactgttgaatgaaggttggaagggctttgccctgagcactgaggagagagagctggttgcgtgggacttgaagtctgtctcagtttctttaggtgggactgatgcccttggccttcctccagggaaggcatccagcatccagaggtaaggattctcctgtggaccttgtgacctctgactcctcccccttcttcccccagagttcaaggaggccttctccctctttgacaaggatggagatggcactatcaccaccaaggagttggggacagtgatgagatccctgggacagaaccccactgaagcagagctgcaggatatgatcaatgaggtggatgcagatgggaacgggaccattgacttcccggagttcctgaccatgatggccagaaagatgaaggacacagacagtgaggaggagatccgagaggcgttccgtgtctttgacaaggtaagcagccctctccaggggcggctctgagactgacgccagccttcaggcagacaggcggaactggagccacggagctaccacttccaggaggtccgggtcccggtgccagcctcattgccaacctgctctgccacctcaggcagcctccctcactgtgctcactgctgagggatggtgatgacagccacccctctcactgcctctctccccaccgggagaagtgcccagtgaaaggctttatccccaacccccaggatgggaatggctacatcagcgccgcagagctgcgtcacgtaatgacgaacctgggggagaagctgaccgatgaggaggtggatgagatgatcagggaggctgacatcgatggagatggccaggtcaattatgaagagtttgtacagatgatgactgcaaagtgaaggccccccgggcagctggcgatgcccgttctcttgatctctctcttctcgcgcgcgcactctctcttcaacactcccctgcgtaccccggttctagcaaacaccaattgattgactgagaatctgataaagcaacaaaagatttgtcccaagctgcatgattgctctttctccttcttccctgagtctctctccatgcccctcatctcttccttttgccctcgcctcttccatccatgtcttccaaggcctgatgcattcataagttgaagccctccccagatccccttggggagcctctgccctcctccagcccggatggctctcctccattttggtttgtttcctcttgtttgtcatcttattttgggtgctggggtggctgccagccctgtcccgggacctgctgggagggacaagaggccctcccccaggcagaagagcatgccctttgccgttgcatgcaaccagccctgtgattccacgtgcagatcccagcagcctgttggggcaggggtgccaagagaggcattccagaaggactgagggggcgttgaggaattgtggcgttgactggatgtggcccaggagggggtcgagggggccaactcacagaaggggactgacagtgggcaacactcacatcccactggctgctgttctgaaaccatctgattggctttctgaggtttggctgggtggggactgctcatttggccactctgcaaattggacttgcccgcgttcctgaagcgctctcgagctgttctgtaaatacctggtgctaacatcccatgccgctccctcctcacgatgcacccaccgccctgagggcccgtcctaggaatggatgtggggatggtcgctttgtaatgtgctggttctctttttttttctttcccctctatggcccttaagactttcattttgttcagaaccatgctgggctagctaaagggtggggagagggaagatgggccccaccacgctctcaagagaacgcacctgcaataaaacagtcttgtcggccagctgcccaggggacggcagctacagcagcctctgcgtcctggtccgccagcacctcccgcttctccgtggtgacttggcgccgcttcctcacatctgtgctccgtgccctcttccctgcctcttccctcgcccacctgcctgcccccatactcccccagcggagagcatgatccgtgcccttgcttctgactttcgcctctgggacaagtaagtcaatgtgggcagttcagtcgtctgggttttttccccttttctgttcatttcatctggctccccccaccacctccccaccccaccccccaccccctgcttcccctcactgcccaggtcgatcaagtggcttttcctgggacctgcccagctttgagaatctcttctcatccaccctctggcacccagcctctgagggaaggagggatggggcatagtgggagacccagccaagagctgagggtaagggcaggtaggcgtgaggctgtggacattttcggaatgttttggttttgttttttttaaaccgggcaatattgtgttcagttcaagctgtgaagaaaaatatatatcaatgttttccaataaaatacagtgactacctg

SEQ ID NO: 11031 - DNA, 7817 bp, Homo sapiens
aactgctgcagctgctgccgccgccggaggaaccttgatccccgtgctccggacaccccgggcctcgccatggtgagtgaggctggggggtcgccgaggctgcgggctctgaggcgggcttaacggggcaggacccctgagggggcgacagagcccagagtggggggcgtccgggcccggcgagagcctcgggacccttttctacccgcgttgtcgggggctgttgaacccagagcgggacgtctggatcaccagaggtttccagaagcgactttagcaccaaatgggatgtttaagtccacaaatgggtatctgagcccctaaaggggacatttgaaccccggatggaggatcgggaccctcagtgggacccctcaaaaggattttggacccaggatggggcgttgggtttcaggatggaggtgtttggaccccaggggacgaaataagaaagatgggctggggaggggagctattcgggccctgatgaaggcgtttggtcctgagaggatgcggggaacgggggacgaagggaggctgggctgctcctggatggggtggtggagggtagctgggcccgggcggggaggggcgacccctgggctcctgtggagcagaggagagggtcaaggatgggcggtcacttctacagatgagactcccgagggtgggggagggtgggggagggtggtctccagagcccagcactgcagaggaggaggagggtgaggtgcaagcttatgggaggaagagcctggggtgggtggcagcggagattagaagatactcttgaaggcttccgggacggagaaggatcagggtcgtggaggtggtgaaaagggatggtgagagtggggctcgccagtagtcgggggacagggacccttggggttaatttggaagtagctagaaaaggttccgaggttactagtgggttaagactgttgctctagaaagacagaatttttttaacggggtgggagtgttgtgtttgggtccaagagaagatggatttccaaggtgaggggtgggggaggacttgggcttgggtggttgggaggtgaggtggaaggagaaaatgaatggcagtcaggggggcctaggtttgggggtggatgtgggtagcaccctgccagtctccagggacaggccaggacaaagacggctcagtgtggatggggagtgggctgcagggcccggaggaagcttttctaccgtcctccttcctcaggaagaacgcggctgggtggaagacaccggggcagtgggagcaggtgggcggagctgttcgggcccctattgcgcactgaagcctcatgaaatggggatgggagatcaaagtttggggtgcctcgaatgagccagctttttcaagcctagaagcctcactctgtcgctgcccttttcaggccaagagcactgccttttcccagcaggagcgccggttttctcatgatccccagccccacgcaccatgctgcacctcgtcacttgtgccaaatgacagtgcagtacagtgtggcgtcagtgacaatcagatgcctattcccgtgccctcggggtgggggctgcagagcttgatcagagagtgcctctggggagaccccttgatcggcctgagggccacttgttccattcagggccctcgctgagcgtgtctgttaattcacagggctttgagagaaaaccagcagactagttctttcctactccctgccacccacaacacccacagccccaccaggctgagcctgggaaccgtgtgcagccatcctccctggcaaggctggggagaacaggcagccgctgctgtgtatcagatctcatacttgctgacacagacctgatggctcctcttgccgctaccccattttcccccagcagaacctggctaaaaggggccctgaagcactagcaggccccctacctccagaataggacccaagctttggccacaactagtttctctttctgtttgtaatcagcaaggtagaggtgggacaagtcactggtaactggccttggactttggcctgagctctgtggctcctccttggcccgggtgaggggccctggccttggtttctgatctcatctaacactgctctctggcattggctgggggctggggcaaggcagagaaatcacaccctcttccctcccccacctcatggttttttttcttgtccagccccttgctggagcctaagatgagggataaggaagcaggagaccagctgagttattttggaaacagtttttgttgaaagtttagtcttcaggtctagaaagggaagaaaccttgagcaaggatcaatgatatcttcttaggcggtcggttttctgggcggcaaccttgcttgagatctgtacctttccttgaccaagcagggaagtgggtctccaacatgggagggagagcatctgacaggccctccatgcagagccacgcctatttgcagcaaccctgtgacagaactgaacatggcagtgcctcatctgcatcttccagtcttttggtggagactggcaaacggtggccttcagagccgctcggggcagtctgcagcctgtcacagcctcctcgcccccacccccagccccttacagtgctgcccaaaggtccggggagctggacttcttgcagggcggaacagtgggctgggaaggccctgacctggctcgctttttccattctaggccaggggaaagaatgaaaagcagatgggatggcagccacctccccacactgctgccctcctctctgttctttccctgaccctccctgggcattgcctggtctcggtaaccagaagcccatcctcccttctcactttccctaagcctcttcctcaggtgtcaggacctaagggatggctccaggcttttttgtccatggtgggaggtggggggcaggtggatcaagaggctcatgggcctggggctaccaggttggcatttagaagcccaaccaccctgtcttttttgaaggcaatgcagaagaatcttcatttggcctccccacctcccctttacactttggacttttccagaatgtgcatgtgtgccgttttctcccttcctctttccccctccctaagccctctcccctctgtgatcatcattttgattacccctcccattctgcctatttggggcttgcaagttcttcttccgttaggttttttttttttttttctaacttttttagatcagtgattgttaatatttgggacggggatgggggtaggggaggcaggcagtggtttgttcctagcttctggaacctctccgtagaatactgcaaattcacataatagtctgcttctatttctgaggctctcagactcgagactagaacatgctatagacttggagcccctttccctgattgtgaaaggaaggggaacagacccaccatggtcccgggatggtggtgccttcttcacagcatcaacaaaaaccagggaaaatgtgtcttttggctgctaaagctaaatgttgggattcagcctccccaaccccccagccccgctcctgccccataggatcactatgcctggctgatgcccagcacaccagtgcaggagaagccagtccccgcatctcctccccacccccaaaccccgcatgcagcaagggctgcctgccacccactggccagtccccagagtgcccaagctggaaagggttaaaaactgcagtgcaagccagcttcagtcctctgctgctgcccgctgcagccctctccctgacgtttgtcccttctgcccaaaagaaacaaaacagaatggccctgtgccctcactgtgcgcagggggtggagcgcctgcctccagcctgaccagagttctttaggtgcttgagcaactcgggccgccggttaggagaatttttgccacttgggtggactctgcctgagccaaccgcctccaaataggtgacacagaaactagcagagatagccccagacatcgtccctctgccctacccaaggactggcctgcttcagtttggagccttctagagcttcttgatgaggcctccagggcaatcgttcccttcactcggcctctggggctctcactgatgagatgcaaacctgtgccaggcctcaccagcgctgctggtttggggctggggcaggcttttctcccgcccctgtggctcccacatgctgagttgagattggaagcccgtgggtctgggcagcttcatcgggccgtgcgtccagcaggcctgagtgtccagcccaccctggtacccagctttctgaatcaccagactttatcatcaggcgctggctctgcctcagaccctgactctggcatgctcctccctggcccggcgggaatggcacgtggagctggcctcactggggccgagggtctgggctgagtgaggaagatgcgtccgtgctgtccggcctggtgactgactttccccttcatgcttttacaggctgaccagctgactgaggagcagattgcaggtgagtctgctatccccctcatcttagctcaggaaagcctccacatccccagccaaatcttagccactgaggagtgacatctgatgggtgaacctgtgtatcccttgtgtcacctaacactatgccttgtgcctagaatgctgataaatgtgtgtaagagcacaccagtgccccaatgacacgaagccccatggccctgagacaggcctttaccagacaccaaaggctgtgttcctctcctgggcctgggtcatctaggggcttgatatcagtggctgcaggacgagcccaactctctctcccagcttcagccaggttggcttagaaggtgagctccctgcctccctgtggggcctgcagagctcctgtcccactttaggagccgcccaggagctggctcgtcactcccacctctgcgcttgcctgcgctttgcacttcctttcgcatgtgcctgcgcctgcctgttctgctggcggaagtgcctccccagtgctttgcatgggcagctccttcccgtcccttagctcagatgtcccctcggggaggccttccctgacccccatctcaagtacacagccttcctttactctccttcacatcactttattttcttcataacctttctcgctgtctgaaattattttcttatgtcttcacctgttgtatctcctgttactagatgtgagttccattgagtttgggacttggttttgttggtccctgctatagccttaatgcctgcctagaacgtagtaggtcctccgcaaacttttgctggctaaacaaacatctctctctcagcaagctagaagaaatccctggatcccatctaattcatttttctaacccctccaaaaccccagaagggtcagctacaggaactattgtgtaattacagatccgtgcctgcctacccgcccatactgagctgcccgaggacagagagcaactcttggtttatctccatagccaggggccagcacacagtagaccagagtagcgatccagagaatgggcctctgctccccaccagctacccagcccccagctctgctgtcaggttcaaccggctgtgtaacaagtactaaaggcccagcttctgcggtgggaggcaggaacggacttgccttctctcctttctcccctcaacccgcatcacagagtcacctttgcagcttcaaaattttggccctgggtggctatggagacccctgaggaaagccagaagatggcctggtttagtgatcatgagctcggggtgccccatgacccactcactacctgccctccccaagaacaacaaggcctcagcacagggaggtgccagcctccccaaagagactcttgccatgtccccagggcccagaggctcagggccacagcttcccagctgtgcatgtccctcccaatgcacctgccacccatctcccaactctggccttgtgcaacataaacggtctgcttttcaccctgtccccattagcaaactgtccaccgcctcaccccagcccacaccctctgggaataggctgccggacatctgtttttggagggcttgggggtagaggagcaccaggtgccaaaatgggcccagtgggagggcaagagccatgtgcttttctccctgcccctgatgcggccccagctgtggccttcccactcagcactgctagctcctcatcctcctggcttggcagccgtcccctcgctttccatccccccatcaaccccacgcactgtccgtcagccatgttctgctgccgaccacccccacgctcaccacacgcagtggctcagctcctttggaagctggtagcacccacggcaaggaacagggctgccagtcagaagggagtggatgcctgcatttcctcttcaggccggccagaggcattctgcagcctcccctcctcgtcccagccagccaaccctggctaacacactcagacaaagaatcctttcggctctcattcactccatgactttggttcatttcatcatttcaagggagaagtcaaagccagggaccaaacagaaatgtagaatcatctaaggacagctgtcagaccattttccccactgtcttcactggctggccagaaaaatagcttcacctagcacagtgttgatgttcaataactgttgaatgaaggttggaagggctttgccctgagcactgaggagagagagctggttgcgtgggacttgaagtctgtctcagtttctttaggtgggactgatgcccttggccttcctccagggaaggcatccagcatccagaggtaaggattctcctgtggaccttgtgacctctgactcctcccccttcttcccccagagttcaaggaggccttctccctctttgacaaggatggagatggcactatcaccaccaaggagttggggacagtgatgagatccctgggacagaaccccactgaagcagagctgcaggatatgatcaatgaggtggatgcagatggtgagccccacagagcgcgtgggcagccctgctcctggtcaccccgagtgactgcagggagcctctctcagggtgatggatgagcccgtgtctctcagggcccaggccaagagcattctccatcctttccccaccttccagggaacgggaccattgacttcccggagttcctgaccatgatggccagaaagatgaaggacacagacagtgaggaggagatccgagaggcgttccgtgtctttgacaaggtaagcagccctctccaggggcggctctgagactgacgccagccttcaggcagacaggcggaactggagccacggagctaccacttccaggaggtccgggtcccggtgccagcctcattgccaacctgctctgccacctcaggcagcctccctcactgtgctcactgctgagggatggtgatgacagccacccctctcactgcctctctccccaccgggagaagtgcccagtgaaaggctttatccccaacccccaggatgggaatggctacatcagcgccgcagagctgcgtcacgtaatgacgaacctgggggagaagctgaccgatgaggaggtggatgagatgatcagggaggctgacatcgatggagatggccaggtcaattatgaaggtgagtcaaggccaggcttgatctctggaacaagaagagaatcgcagcttcaggaacaagcccccagatccctcttgttggggagggccgctcgccacttagcctgcccgcctgacctcctctctctctgcttcactccacagagtttgtacagatgatgactgcaaagtgaaggccccccgggcagctggcgatgcccgt

SEQ ID NO: 11032 - DNA, 540 bp, Homo sapiens
aactgctgcagctgctgccgccgccggaggaaccttgatccccgtgctccggacaccccgggcctcgccatggctgaccagctgactgaggagcagattgcaggaggccttctccctctttgacaaggatggagatggcactatcaccaccaaggagttggggacagtgatgagatccctgggacagaaccccactgaagcagagctgcaggatatgatcaatgaggtggatgcagatgggaacgggaccattgacttcccggagttcctgaccatgatggccagaaagatgaaggacacagacagtgaggaggagatccgagaggcgttccgtgtctttgacaaggatgggaatggctacatcagcgccgcagagctgcgtcacgtaatgacgaacctgggggagaagctgaccgatgaggaggtggatgagatgatcagggaggctgacatcgatggagatggccaggtcaattatgaagagtttgtacagatgatgactgcaaagtgaaggccccccgggcagctggcgatgcccgt

SEQ ID NO: 11033 - DNA, 7890 bp, Homo sapiens
gcggacgcgcggcggagctggaactgctgcagctgctgccgccgccggaggaaccttgatccccgtgctccggacaccccgggcctcgccatggtgagtgaggctggggggtcgccgaggctgcgggctctgaggcgggcttaacggggcaggacccctgagggggcgacagagcccagagtggggggcgtccgggcccggcgagagcctcgggacccttttctacccgcgttgtcgggggctgttgaacccagagcgggacgtctggatcaccagaggtttccagaagcgactttagcaccaaatgggatgtttaagtccacaaatgggtatctgagcccctaaaggggacatttgaaccccggatggaggatcgggaccctcagtgggacccctcaaaaggattttggacccaggatggggcgttgggtttcaggatggaggtgtttggaccccaggggacgaaataagaaagatgggctggggaggggagctattcgggccctgatgaaggcgtttggtcctgagaggatgcggggaacgggggacgaagggaggctgggctgctcctggatggggtggtggagggtagctgggcccgggcggggaggggcgacccctgggctcctgtggagcagaggagagggtcaaggatgggcggtcacttctacagatgagactcccgagggtgggggagggtgggggagggtggtctccagagcccagcactgcagaggaggaggagggtgaggtgcaagcttatgggaggaagagcctggggtgggtggcagcggagattagaagatactcttgaaggcttccgggacggagaaggatcagggtcgtggaggtggtgaaaagggatggtgagagtggggctcgccagtagtcgggggacagggacccttggggttaatttggaagtagctagaaaaggttccgaggttactagtgggttaagactgttgctctagaaagacagaatttttttaacggggtgggagtgttgtgtttgggtccaagagaagatggatttccaaggtgaggggtgggggaggacttgggcttgggtggttgggaggtgaggtggaaggagaaaatgaatggcagtcaggggggcctaggtttgggggtggatgtgggtagcaccctgccagtctccagggacaggccaggacaaagacggctcagtgtggatggggagtgggctgcagggcccggaggaagcttttctaccgtcctccttcctcaggaagaacgcggctgggtggaagacaccggggcagtgggagcaggtgggcggagctgttcgggcccctattgcgcactgaagcctcatgaaatggggatgggagatcaaagtttggggtgcctcgaatgagccagctttttcaagcctagaagcctcactctgtcgctgcccttttcaggccaagagcactgccttttcccagcaggagcgccggttttctcatgatccccagccccacgcaccatgctgcacctcgtcacttgtgccaaatgacagtgcagtacagtgtggcgtcagtgacaatcagatgcctattcccgtgccctcggggtgggggctgcagagcttgatcagagagtgcctctggggagaccccttgatcggcctgagggccacttgttccattcagggccctcgctgagcgtgtctgttaattcacagggctttgagagaaaaccagcagactagttctttcctactccctgccacccacaacacccacagccccaccaggctgagcctgggaaccgtgtgcagccatcctccctggcaaggctggggagaacaggcagccgctgctgtgtatcagatctcatacttgctgacacagacctgatggctcctcttgccgctaccccattttcccccagcagaacctggctaaaaggggccctgaagcactagcaggccccctacctccagaataggacccaagctttggccacaactagtttctctttctgtttgtaatcagcaaggtagaggtgggacaagtcactggtaactggccttggactttggcctgagctctgtggctcctccttggcccgggtgaggggccctggccttggtttctgatctcatctaacactgctctctggcattggctgggggctggggcaaggcagagaaatcacaccctcttccctcccccacctcatggttttttttcttgtccagccccttgctggagcctaagatgagggataaggaagcaggagaccagctgagttattttggaaacagtttttgttgaaagtttagtcttcaggtctagaaagggaagaaaccttgagcaaggatcaatgatatcttcttaggcggtcggttttctgggcggcaaccttgcttgagatctgtacctttccttgaccaagcagggaagtgggtctccaacatgggagggagagcatctgacaggccctccatgcagagccacgcctatttgcagcaaccctgtgacagaactgaacatggcagtgcctcatctgcatcttccagtcttttggtggagactggcaaacggtggccttcagagccgctcggggcagtctgcagcctgtcacagcctcctcgcccccacccccagccccttacagtgctgcccaaaggtccggggagctggacttcttgcagggcggaacagtgggctgggaaggccctgacctggctcgctttttccattctaggccaggggaaagaatgaaaagcagatgggatggcagccacctccccacactgctgccctcctctctgttctttccctgaccctccctgggcattgcctggtctcggtaaccagaagcccatcctcccttctcactttccctaagcctcttcctcaggtgtcaggacctaagggatggctccaggcttttttgtccatggtgggaggtggggggcaggtggatcaagaggctcatgggcctggggctaccaggttggcatttagaagcccaaccaccctgtcttttttgaaggcaatgcagaagaatcttcatttggcctccccacctcccctttacactttggacttttccagaatgtgcatgtgtgccgttttctcccttcctctttccccctccctaagccctctcccctctgtgatcatcattttgattacccctcccattctgcctatttggggcttgcaagttcttcttccgttaggttttttttttttttttctaacttttttagatcagtgattgttaatatttgggacggggatgggggtaggggaggcaggcagtggtttgttcctagcttctggaacctctccgtagaatactgcaaattcacataatagtctgcttctatttctgaggctctcagactcgagactagaacatgctatagacttggagcccctttccctgattgtgaaaggaaggggaacagacccaccatggtcccgggatggtggtgccttcttcacagcatcaacaaaaaccagggaaaatgtgtcttttggctgctaaagctaaatgttgggattcagcctccccaaccccccagccccgctcctgccccataggatcactatgcctggctgatgcccagcacaccagtgcaggagaagccagtccccgcatctcctccccacccccaaaccccgcatgcagcaagggctgcctgccacccactggccagtccccagagtgcccaagctggaaagggttaaaaactgcagtgcaagccagcttcagtcctctgctgctgcccgctgcagccctctccctgacgtttgtcccttctgcccaaaagaaacaaaacagaatggccctgtgccctcactgtgcgcagggggtggagcgcctgcctccagcctgaccagagttctttaggtgcttgagcaactcgggccgccggttaggagaatttttgccacttgggtggactctgcctgagccaaccgcctccaaataggtgacacagaaactagcagagatagccccagacatcgtccctctgccctacccaaggactggcctgcttcagtttggagccttctagagcttcttgatgaggcctccagggcaatcgttcccttcactcggcctctggggctctcactgatgagatgcaaacctgtgccaggcctcaccagcgctgctggtttggggctggggcaggcttttctcccgcccctgtggctcccacatgctgagttgagattggaagcccgtgggtctgggcagcttcatcgggccgtgcgtccagcaggcctgagtgtccagcccaccctggtacccagctttctgaatcaccagactttatcatcaggcgctggctctgcctcagaccctgactctggcatgctcctccctggcccggcgggaatggcacgtggagctggcctcactggggccgagggtctgggctgagtgaggaagatgcgtccgtgctgtccggcctggtgactgactttccccttcatgcttttacaggctgaccagctgactgaggagcagattgcaggtgagtctgctatccccctcatcttagctcaggaaagcctccacatccccagccaaatcttagccactgaggagtgacatctgatgggtgaacctgtgtatcccttgtgtcacctaacactatgccttgtgcctagaatgctgataaatgtgtgtaagagcacaccagtgccccaatgacacgaagccccatggccctgagacaggcctttaccagacaccaaaggctgtgttcctctcctgggcctgggtcatctaggggcttgatatcagtggctgcaggacgagcccaactctctctcccagcttcagccaggttggcttagaaggtgagctccctgcctccctgtggggcctgcagagctcctgtcccactttaggagccgcccaggagctggctcgtcactcccacctctgcgcttgcctgcgctttgcacttcctttcgcatgtgcctgcgcctgcctgttctgctggcggaagtgcctccccagtgctttgcatgggcagctccttcccgtcccttagctcagatgtcccctcggggaggccttccctgacccccatctcaagtacacagccttcctttactctccttcacatcactttattttcttcataacctttctcgctgtctgaaattattttcttatgtcttcacctgttgtatctcctgttactagatgtgagttccattgagtttgggacttggttttgttggtccctgctatagccttaatgcctgcctagaacgtagtaggtcctccgcaaacttttgctggctaaacaaacatctctctctcagcaagctagaagaaatccctggatcccatctaattcatttttctaacccctccaaaaccccagaagggtcagctacaggaactattgtgtaattacagatccgtgcctgcctacccgcccatactgagctgcccgaggacagagagcaactcttggtttatctccatagccaggggccagcacacagtagaccagagtagcgatccagagaatgggcctctgctccccaccagctacccagcccccagctctgctgtcaggttcaaccggctgtgtaacaagtactaaaggcccagcttctgcggtgggaggcaggaacggacttgccttctctcctttctcccctcaacccgcatcacagagtcacctttgcagcttcaaaattttggccctgggtggctatggagacccctgaggaaagccagaagatggcctggtttagtgatcatgagctcggggtgccccatgacccactcactacctgccctccccaagaacaacaaggcctcagcacagggaggtgccagcctccccaaagagactcttgccatgtccccagggcccagaggctcagggccacagcttcccagctgtgcatgtccctcccaatgcacctgccacccatctcccaactctggccttgtgcaacataaacggtctgcttttcaccctgtccccattagcaaactgtccaccgcctcaccccagcccacaccctctgggaataggctgccggacatctgtttttggagggcttgggggtagaggagcaccaggtgccaaaatgggcccagtgggagggcaagagccatgtgcttttctccctgcccctgatgcggccccagctgtggccttcccactcagcactgctagctcctcatcctcctggcttggcagccgtcccctcgctttccatccccccatcaaccccacgcactgtccgtcagccatgttctgctgccgaccacccccacgctcaccacacgcagtggctcagctcctttggaagctggtagcacccacggcaaggaacagggctgccagtcagaagggagtggatgcctgcatttcctcttcaggccggccagaggcattctgcagcctcccctcctcgtcccagccagccaaccctggctaacacactcagacaaagaatcctttcggctctcattcactccatgactttggttcatttcatcatttcaagggagaagtcaaagccagggaccaaacagaaatgtagaatcatctaaggacagctgtcagaccattttccccactgtcttcactggctggccagaaaaatagcttcacctagcacagtgttgatgttcaataactgttgaatgaaggttggaagggctttgccctgagcactgaggagagagagctggttgcgtgggacttgaagtctgtctcagtttctttaggtgggactgatgcccttggccttcctccagggaaggcatccagcatccagaggtaaggattctcctgtggaccttgtgacctctgactcctcccccttcttcccccagagttcaaggaggccttctccctctttgacaaggatggagatggcactatcaccaccaaggagttggggacagtgatgagatccctgggacagaaccccactgaagcagagctgcaggatatgatcaatgaggtggatgcagatggtgagccccacagagcgcgtgggcagccctgctcctggtcaccccgagtgactgcagggagcctctctcagggtgatggatgagcccgtgtctctcagggcccaggccaagagcattctccatcctttccccaccttccagggaacgggaccattgacttcccggagttcctgaccatgatggccagaaagatgaaggacacagacagtgaggaggagatccgagaggcgttccgtgtctttgacaaggtaagcagccctctccaggggcggctctgagactgacgccagccttcaggcagacaggcggaactggagccacggagctaccacttccaggaggtccgggtcccggtgccagcctcattgccaacctgctctgccacctcaggcagcctccctcactgtgctcactgctgagggatggtgatgacagccacccctctcactgcctctctccccaccgggagaagtgcccagtgaaaggctttatccccaacccccaggatgggaatggctacatcagcgccgcagagctgcgtcacgtaatgacgaacctgggggagaagctgaccgatgaggaggtggatgagatgatcagggaggctgacatcgatggagatggccaggtcaattatgaaggtgagtcaaggccaggcttgatctctggaacaagaagagaatcgcagcttcaggaacaagcccccagatccctcttgttggggagggccgctcgccacttagcctgcccgcctgacctcctctctctctgcttcactccacagagtttgtacagatgatgactgcaaagtgaaggccccccgggcagctggcgatgcccgttctcttgatctctctcttctcgcgcgcgcactctctcttcaacactcccctg

SEQ ID NO: 11034 - DNA, 2960 bp, Homo sapiens
gcggacgcgcggcggagctggaactgctgcagctgctgccgccgccggaggaaccttgatccccgtgctccggacaccccgggcctcgccatggctgaccagctgactgaggagcagattgcaggtgagtctgctatccccctcatcttagctcaggaaagcctccacatccccagccaaatcttagccactgaggagtgacatctgatgggtgaacctgtgtatcccttgtgtcacctaacactatgccttgtgcctagaatgctgataaatgtgtgtaagagcacaccagtgccccaatgacacgaagccccatggccctgagacaggcctttaccagacaccaaaggctgtgttcctctcctgggcctgggtcatctaggggcttgatatcagtggctgcaggacgagcccaactctctctcccagcttcagccaggttggcttagaaggtgagctccctgcctccctgtggggcctgcagagctcctgtcccactttaggagccgcccaggagctggctcgtcactcccacctctgcgcttgcctgcgctttgcacttcctttcgcatgtgcctgcgcctgcctgttctgctggcggaagtgcctccccagtgctttgcatgggcagctccttcccgtcccttagctcagatgtcccctcggggaggccttccctgacccccatctcaagtacacagccttcctttactctccttcacatcactttattttcttcataacctttctcgctgtctgaaattattttcttatgtcttcacctgttgtatctcctgttactagatgtgagttccattgagtttgggacttggttttgttggtccctgctatagccttaatgcctgcctagaacgtagtaggtcctccgcaaacttttgctggctaaacaaacatctctctctcagcaagctagaagaaatccctggatcccatctaattcatttttctaacccctccaaaaccccagaagggtcagctacaggaactattgtgtaattacagatccgtgcctgcctacccgcccatactgagctgcccgaggacagagagcaactcttggtttatctccatagccaggggccagcacacagtagaccagagtagcgatccagagaatgggcctctgctccccaccagctacccagcccccagctctgctgtcaggttcaaccggctgtgtaacaagtactaaaggcccagcttctgcggtgggaggcaggaacggacttgccttctctcctttctcccctcaacccgcatcacagagtcacctttgcagcttcaaaattttggccctgggtggctatggagacccctgaggaaagccagaagatggcctggtttagtgatcatgagctcggggtgccccatgacccactcactacctgccctccccaagaacaacaaggcctcagcacagggaggtgccagcctccccaaagagactcttgccatgtccccagggcccagaggctcagggccacagcttcccagctgtgcatgtccctcccaatgcacctgccacccatctcccaactctggccttgtgcaacataaacggtctgcttttcaccctgtccccattagcaaactgtccaccgcctcaccccagcccacaccctctgggaataggctgccggacatctgtttttggagggcttgggggtagaggagcaccaggtgccaaaatgggcccagtgggagggcaagagccatgtgcttttctccctgcccctgatgcggccccagctgtggccttcccactcagcactgctagctcctcatcctcctggcttggcagccgtcccctcgctttccatccccccatcaaccccacgcactgtccgtcagccatgttctgctgccgaccacccccacgctcaccacacgcagtggctcagctcctttggaagctggtagcacccacggcaaggaacagggctgccagtcagaagggagtggatgcctgcatttcctcttcaggccggccagaggcattctgcagcctcccctcctcgtcccagccagccaaccctggctaacacactcagacaaagaatcctttcggctctcattcactccatgactttggttcatttcatcatttcaagggagaagtcaaagccagggaccaaacagaaatgtagaatcatctaaggacagctgtcagaccattttccccactgtcttcactggctggccagaaaaatagcttcacctagcacagtgttgatgttcaataactgttgaatgaaggttggaagggctttgccctgagcactgaggagagagagctggttgcgtgggacttgaagtctgtctcagtttctttaggtgggactgatgcccttggccttcctccagggaaggcatccagcatccagaggtaaggattctcctgtggaccttgtgacctctgactcctcccccttcttcccccagagttcaaggaggccttctccctctttgacaaggatggagatggcactatcaccaccaaggagttggggacagtgatgagatccctgggacagaaccccactgaagcagagctgcaggatatgatcaatgaggtggatgcagatgggaacgggaccattgacttcccggagttcctgaccatgatggccagaaagatgaaggacacagacagtgaggaggagatccgagaggcgttccgtgtctttgacaaggatgggaatggctacatcagcgccgcagagctgcgtcacgtaatgacgaacctgggggagaagctgaccgatgaggaggtggatgagatgatcagggaggctgacatcgatggagatggccaggtcaattatgaagagtttgtacagatgatgactgcaaagtgaaggccccccgggcagctggcgatgcccgttctcttgatctctctcttctcgcgcgcgcactctctcttcaacactcccctg

SEQ ID NO: 11035 - DNA, 7699 bp, Homo sapiens
actgcagaggaggaggagggtgaggtgcaagcttatgggaggaagagcctggggtgggtggcagcggagattagaagatactcttgaaggcttccgggacggagaaggatcagggtcgtggaggtggtgaaaagggatggtgagagtggggctcgccagtagtcgggggacagggacccttggggttaatttggaagtagctagaaaaggttccgaggttactagtgggttaagactgttgctctagaaagacagaatttttttaacggggtgggagtgttgtgtttgggtccaagagaagatggatttccaaggtgaggggtgggggaggacttgggcttgggtggttgggaggtgaggtggaaggagaaaatgaatggcagtcaggggggcctaggtttgggggtggatgtgggtagcaccctgccagtctccagggacaggccaggacaaagacggctcagtgtggatggggagtgggctgcagggcccggaggaagcttttctaccgtcctccttcctcaggaagaacgcggctgggtggaagacaccggggcagtgggagcaggtgggcggagctgttcgggcccctattgcgcactgaagcctcatgaaatggggatgggagatcaaagtttggggtgcctcgaatgagccagctttttcaagcctagaagcctcactctgtcgctgcccttttcaggccaagagcactgccttttcccagcaggagcgccggttttctcatgatccccagccccacgcaccatgctgcacctcgtcacttgtgccaaatgacagtgcagtacagtgtggcgtcagtgacaatcagatgcctattcccgtgccctcggggtgggggctgcagagcttgatcagagagtgcctctggggagaccccttgatcggcctgagggccacttgttccattcagggccctcgctgagcgtgtctgttaattcacagggctttgagagaaaaccagcagactagttctttcctactccctgccacccacaacacccacagccccaccaggctgagcctgggaaccgtgtgcagccatcctccctggcaaggctggggagaacaggcagccgctgctgtgtatcagatctcatacttgctgacacagacctgatggctcctcttgccgctaccccattttcccccagcagaacctggctaaaaggggccctgaagcactagcaggccccctacctccagaataggacccaagctttggccacaactagtttctctttctgtttgtaatcagcaaggtagaggtgggacaagtcactggtaactggccttggactttggcctgagctctgtggctcctccttggcccgggtgaggggccctggccttggtttctgatctcatctaacactgctctctggcattggctgggggctggggcaaggcagagaaatcacaccctcttccctcccccacctcatggttttttttcttgtccagccccttgctggagcctaagatgagggataaggaagcaggagaccagctgagttattttggaaacagtttttgttgaaagtttagtcttcaggtctagaaagggaagaaaccttgagcaaggatcaatgatatcttcttaggcggtcggttttctgggcggcaaccttgcttgagatctgtacctttccttgaccaagcagggaagtgggtctccaacatgggagggagagcatctgacaggccctccatgcagagccacgcctatttgcagcaaccctgtgacagaactgaacatggcagtgcctcatctgcatcttccagtcttttggtggagactggcaaacggtggccttcagagccgctcggggcagtctgcagcctgtcacagcctcctcgcccccacccccagccccttacagtgctgcccaaaggtccggggagctggacttcttgcagggcggaacagtgggctgggaaggccctgacctggctcgctttttccattctaggccaggggaaagaatgaaaagcagatgggatggcagccacctccccacactgctgccctcctctctgttctttccctgaccctccctgggcattgcctggtctcggtaaccagaagcccatcctcccttctcactttccctaagcctcttcctcaggtgtcaggacctaagggatggctccaggcttttttgtccatggtgggaggtggggggcaggtggatcaagaggctcatgggcctggggctaccaggttggcatttagaagcccaaccaccctgtcttttttgaaggcaatgcagaagaatcttcatttggcctccccacctcccctttacactttggacttttccagaatgtgcatgtgtgccgttttctcccttcctctttccccctccctaagccctctcccctctgtgatcatcattttgattacccctcccattctgcctatttggggcttgcaagttcttcttccgttaggttttttttttttttttctaacttttttagatcagtgattgttaatatttgggacggggatgggggtaggggaggcaggcagtggtttgttcctagcttctggaacctctccgtagaatactgcaaattcacataatagtctgcttctatttctgaggctctcagactcgagactagaacatgctatagacttggagcccctttccctgattgtgaaaggaaggggaacagacccaccatggtcccgggatggtggtgccttcttcacagcatcaacaaaaaccagggaaaatgtgtcttttggctgctaaagctaaatgttgggattcagcctccccaaccccccagccccgctcctgccccataggatcactatgcctggctgatgcccagcacaccagtgcaggagaagccagtccccgcatctcctccccacccccaaaccccgcatgcagcaagggctgcctgccacccactggccagtccccagagtgcccaagctggaaagggttaaaaactgcagtgcaagccagcttcagtcctctgctgctgcccgctgcagccctctccctgacgtttgtcccttctgcccaaaagaaacaaaacagaatggccctgtgccctcactgtgcgcagggggtggagcgcctgcctccagcctgaccagagttctttaggtgcttgagcaactcgggccgccggttaggagaatttttgccacttgggtggactctgcctgagccaaccgcctccaaataggtgacacagaaactagcagagatagccccagacatcgtccctctgccctacccaaggactggcctgcttcagtttggagccttctagagcttcttgatgaggcctccagggcaatcgttcccttcactcggcctctggggctctcactgatgagatgcaaacctgtgccaggcctcaccagcgctgctggtttggggctggggcaggcttttctcccgcccctgtggctcccacatgctgagttgagattggaagcccgtgggtctgggcagcttcatcgggccgtgcgtccagcaggcctgagtgtccagcccaccctggtacccagctttctgaatcaccagactttatcatcaggcgctggctctgcctcagaccctgactctggcatgctcctccctggcccggcgggaatggcacgtggagctggcctcactggggccgagggtctgggctgagtgaggaagatgcgtccgtgctgtccggcctggtgactgactttccccttcatgcttttacaggctgaccagctgactgaggagcagattgcaggtgagtctgctatccccctcatcttagctcaggaaagcctccacatccccagccaaatcttagccactgaggagtgacatctgatgggtgaacctgtgtatcccttgtgtcacctaacactatgccttgtgcctagaatgctgataaatgtgtgtaagagcacaccagtgccccaatgacacgaagccccatggccctgagacaggcctttaccagacaccaaaggctgtgttcctctcctgggcctgggtcatctaggggcttgatatcagtggctgcaggacgagcccaactctctctcccagcttcagccaggttggcttagaaggtgagctccctgcctccctgtggggcctgcagagctcctgtcccactttaggagccgcccaggagctggctcgtcactcccacctctgcgcttgcctgcgctttgcacttcctttcgcatgtgcctgcgcctgcctgttctgctggcggaagtgcctccccagtgctttgcatgggcagctccttcccgtcccttagctcagatgtcccctcggggaggccttccctgacccccatctcaagtacacagccttcctttactctccttcacatcactttattttcttcataacctttctcgctgtctgaaattattttcttatgtcttcacctgttgtatctcctgttactagatgtgagttccattgagtttgggacttggttttgttggtccctgctatagccttaatgcctgcctagaacgtagtaggtcctccgcaaacttttgctggctaaacaaacatctctctctcagcaagctagaagaaatccctggatcccatctaattcatttttctaacccctccaaaaccccagaagggtcagctacaggaactattgtgtaattacagatccgtgcctgcctacccgcccatactgagctgcccgaggacagagagcaactcttggtttatctccatagccaggggccagcacacagtagaccagagtagcgatccagagaatgggcctctgctccccaccagctacccagcccccagctctgctgtcaggttcaaccggctgtgtaacaagtactaaaggcccagcttctgcggtgggaggcaggaacggacttgccttctctcctttctcccctcaacccgcatcacagagtcacctttgcagcttcaaaattttggccctgggtggctatggagacccctgaggaaagccagaagatggcctggtttagtgatcatgagctcggggtgccccatgacccactcactacctgccctccccaagaacaacaaggcctcagcacagggaggtgccagcctccccaaagagactcttgccatgtccccagggcccagaggctcagggccacagcttcccagctgtgcatgtccctcccaatgcacctgccacccatctcccaactctggccttgtgcaacataaacggtctgcttttcaccctgtccccattagcaaactgtccaccgcctcaccccagcccacaccctctgggaataggctgccggacatctgtttttggagggcttgggggtagaggagcaccaggtgccaaaatgggcccagtgggagggcaagagccatgtgcttttctccctgcccctgatgcggccccagctgtggccttcccactcagcactgctagctcctcatcctcctggcttggcagccgtcccctcgctttccatccccccatcaaccccacgcactgtccgtcagccatgttctgctgccgaccacccccacgctcaccacacgcagtggctcagctcctttggaagctggtagcacccacggcaaggaacagggctgccagtcagaagggagtggatgcctgcatttcctcttcaggccggccagaggcattctgcagcctcccctcctcgtcccagccagccaaccctggctaacacactcagacaaagaatcctttcggctctcattcactccatgactttggttcatttcatcatttcaagggagaagtcaaagccagggaccaaacagaaatgtagaatcatctaaggacagctgtcagaccattttccccactgtcttcactggctggccagaaaaatagcttcacctagcacagtgttgatgttcaataactgttgaatgaaggttggaagggctttgccctgagcactgaggagagagagctggttgcgtgggacttgaagtctgtctcagtttctttaggtgggactgatgcccttggccttcctccagggaaggcatccagcatccagaggtaaggattctcctgtggaccttgtgacctctgactcctcccccttcttcccccagagttcaaggaggccttctccctctttgacaaggatggagatggcactatcaccaccaaggagttggggacagtgatgagatccctgggacagaaccccactgaagcagagctgcaggatatgatcaatgaggtggatgcagatggtgagccccacagagcgcgtgggcagccctgctcctggtcaccccgagtgactgcagggagcctctctcagggtgatggatgagcccgtgtctctcagggcccaggccaagagcattctccatcctttccccaccttccagggaacgggaccattgacttcccggagttcctgaccatgatggccagaaagatgaaggacacagacagtgaggaggagatccgagaggcgttccgtgtctttgacaaggtaagcagccctctccaggggcggctctgagactgacgccagccttcaggcagacaggcggaactggagccacggagctaccacttccaggaggtccgggtcccggtgccagcctcattgccaacctgctctgccacctcaggcagcctccctcactgtgctcactgctgagggatggtgatgacagccacccctctcactgcctctctccccaccgggagaagtgcccagtgaaaggctttatccccaacccccaggatgggaatggctacatcagcgccgcagagctgcgtcacgtaatgacgaacctgggggagaagctgaccgatgaggaggtggatgagatgatcagggaggctgacatcgatggagatggccaggtcaattatgaaggtgagtcaaggccaggcttgatctctggaacaagaagagaatcgcagcttcaggaacaagcccccagatccctcttgttggggagggccgctcgccacttagcctgcccgcctgacctcctctctctctgcttcactccacagagtttgtacagatgatgactgcaaagtgaaggccccccgggcagctggcgatgcccgttctcttgatctctctcttctcgcgcgcgcactctctcttcaacactcccctgcgtaccccggttctagcaaacaccaattgattgactgagaatctgataaagcaacaaaagatttgtcccaagctgcatgattgctctttctccttcttccctgagtctctctccatgcccctcatctcttccttttgccctcgcctcttccatccatgtcttccaaggcctgatgcattcataagttgaagccctccccagatccccttggggagcctctgccctcctccagcccggatggctctcctccattttggtttgtttcctcttgtttgtcatcttattttgggtgctggggtggctgccagccctgtcccgggacctgctgggagggacaagaggccctcccccaggcagaagagcatgccctttgccgttgcatgcaaccagccctgtgattccacgtgcagatcccagcagcctgttggggcaggggtgccaagagaggcattccagaaggactgagggggcgttgaggaattgtggcgttgactggatgtggcccaggagggggtcgagggggccaactcacagaa

SEQ ID NO: 11036 - DNA, 1203 bp, Homo sapiens
actgcagaggaggaggagggtgaggtgcaagcttatgggaggaagagcctggggtgggtggcagcggagattagaagatactcttgaaggcttccgggacggagaaggatcagggtcgtggaggtggtgaaaagggatggctgaccagctgactgaggagcagattgcagagttcaaggaggccttctccctctttgacaaggatggagatggcactatcaccaccaaggagttggggacagtgatgagatccctgggacagaaccccactgaagcagagctgcaggatatgatcaatgaggtggatgcagatgggaacgggaccattgacttcccggagttcctgaccatgatggccagaaagatgaaggacacagacagtgaggaggagatccgagaggcgttccgtgtctttgacaaggatgggaatggctacatcagcgccgcagagctgcgtcacgtaatgacgaacctgggggagaagctgaccgatgaggaggtggatgagatgatcagggaggctgacatcgatggagatggccaggtcaattatgaagagtttgtacagatgatgactgcaaagtgaaggccccccgggcagctggcgatgcccgttctcttgatctctctcttctcgcgcgcgcactctctcttcaacactcccctgcgtaccccggttctagcaaacaccaattgattgactgagaatctgataaagcaacaaaagatttgtcccaagctgcatgattgctctttctccttcttccctgagtctctctccatgcccctcatctcttccttttgccctcgcctcttccatccatgtcttccaaggcctgatgcattcataagttgaagccctccccagatccccttggggagcctctgccctcctccagcccggatggctctcctccattttggtttgtttcctcttgtttgtcatcttattttgggtgctggggtggctgccagccctgtcccgggacctgctgggagggacaagaggccctcccccaggcagaagagcatgccctttgccgttgcatgcaaccagccctgtgattccacgtgcagatcccagcagcctgttggggcaggggtgccaagagaggcattccagaaggactgagggggcgttgaggaattgtggcgttgactggatgtggcccaggagggggtcgagggggccaactcacagaa

SEQ ID NO: 11037 - DNA, 8044 bp, Homo sapiens
gttgagggaccgttggggcgggaggcggcggcggcggcggcgcgcgctgcgggcagtgagtgtggaggcgcggacgcgcggcggagctggaactgctgcagctgctgccgccgccggaggaaccttgatccccgtgctccggacaccccgggcctcgccatggtgagtgaggctggggggtcgccgaggctgcgggctctgaggcgggcttaacggggcaggacccctgagggggcgacagagcccagagtggggggcgtccgggcccggcgagagcctcgggacccttttctacccgcgttgtcgggggctgttgaacccagagcgggacgtctggatcaccagaggtttccagaagcgactttagcaccaaatgggatgtttaagtccacaaatgggtatctgagcccctaaaggggacatttgaaccccggatggaggatcgggaccctcagtgggacccctcaaaaggattttggacccaggatggggcgttgggtttcaggatggaggtgtttggaccccaggggacgaaataagaaagatgggctggggaggggagctattcgggccctgatgaaggcgtttggtcctgagaggatgcggggaacgggggacgaagggaggctgggctgctcctggatggggtggtggagggtagctgggcccgggcggggaggggcgacccctgggctcctgtggagcagaggagagggtcaaggatgggcggtcacttctacagatgagactcccgagggtgggggagggtgggggagggtggtctccagagcccagcactgcagaggaggaggagggtgaggtgcaagcttatgggaggaagagcctggggtgggtggcagcggagattagaagatactcttgaaggcttccgggacggagaaggatcagggtcgtggaggtggtgaaaagggatggtgagagtggggctcgccagtagtcgggggacagggacccttggggttaatttggaagtagctagaaaaggttccgaggttactagtgggttaagactgttgctctagaaagacagaatttttttaacggggtgggagtgttgtgtttgggtccaagagaagatggatttccaaggtgaggggtgggggaggacttgggcttgggtggttgggaggtgaggtggaaggagaaaatgaatggcagtcaggggggcctaggtttgggggtggatgtgggtagcaccctgccagtctccagggacaggccaggacaaagacggctcagtgtggatggggagtgggctgcagggcccggaggaagcttttctaccgtcctccttcctcaggaagaacgcggctgggtggaagacaccggggcagtgggagcaggtgggcggagctgttcgggcccctattgcgcactgaagcctcatgaaatggggatgggagatcaaagtttggggtgcctcgaatgagccagctttttcaagcctagaagcctcactctgtcgctgcccttttcaggccaagagcactgccttttcccagcaggagcgccggttttctcatgatccccagccccacgcaccatgctgcacctcgtcacttgtgccaaatgacagtgcagtacagtgtggcgtcagtgacaatcagatgcctattcccgtgccctcggggtgggggctgcagagcttgatcagagagtgcctctggggagaccccttgatcggcctgagggccacttgttccattcagggccctcgctgagcgtgtctgttaattcacagggctttgagagaaaaccagcagactagttctttcctactccctgccacccacaacacccacagccccaccaggctgagcctgggaaccgtgtgcagccatcctccctggcaaggctggggagaacaggcagccgctgctgtgtatcagatctcatacttgctgacacagacctgatggctcctcttgccgctaccccattttcccccagcagaacctggctaaaaggggccctgaagcactagcaggccccctacctccagaataggacccaagctttggccacaactagtttctctttctgtttgtaatcagcaaggtagaggtgggacaagtcactggtaactggccttggactttggcctgagctctgtggctcctccttggcccgggtgaggggccctggccttggtttctgatctcatctaacactgctctctggcattggctgggggctggggcaaggcagagaaatcacaccctcttccctcccccacctcatggttttttttcttgtccagccccttgctggagcctaagatgagggataaggaagcaggagaccagctgagttattttggaaacagtttttgttgaaagtttagtcttcaggtctagaaagggaagaaaccttgagcaaggatcaatgatatcttcttaggcggtcggttttctgggcggcaaccttgcttgagatctgtacctttccttgaccaagcagggaagtgggtctccaacatgggagggagagcatctgacaggccctccatgcagagccacgcctatttgcagcaaccctgtgacagaactgaacatggcagtgcctcatctgcatcttccagtcttttggtggagactggcaaacggtggccttcagagccgctcggggcagtctgcagcctgtcacagcctcctcgcccccacccccagccccttacagtgctgcccaaaggtccggggagctggacttcttgcagggcggaacagtgggctgggaaggccctgacctggctcgctttttccattctaggccaggggaaagaatgaaaagcagatgggatggcagccacctccccacactgctgccctcctctctgttctttccctgaccctccctgggcattgcctggtctcggtaaccagaagcccatcctcccttctcactttccctaagcctcttcctcaggtgtcaggacctaagggatggctccaggcttttttgtccatggtgggaggtggggggcaggtggatcaagaggctcatgggcctggggctaccaggttggcatttagaagcccaaccaccctgtcttttttgaaggcaatgcagaagaatcttcatttggcctccccacctcccctttacactttggacttttccagaatgtgcatgtgtgccgttttctcccttcctctttccccctccctaagccctctcccctctgtgatcatcattttgattacccctcccattctgcctatttggggcttgcaagttcttcttccgttaggttttttttttttttttctaacttttttagatcagtgattgttaatatttgggacggggatgggggtaggggaggcaggcagtggtttgttcctagcttctggaacctctccgtagaatactgcaaattcacataatagtctgcttctatttctgaggctctcagactcgagactagaacatgctatagacttggagcccctttccctgattgtgaaaggaaggggaacagacccaccatggtcccgggatggtggtgccttcttcacagcatcaacaaaaaccagggaaaatgtgtcttttggctgctaaagctaaatgttgggattcagcctccccaaccccccagccccgctcctgccccataggatcactatgcctggctgatgcccagcacaccagtgcaggagaagccagtccccgcatctcctccccacccccaaaccccgcatgcagcaagggctgcctgccacccactggccagtccccagagtgcccaagctggaaagggttaaaaactgcagtgcaagccagcttcagtcctctgctgctgcccgctgcagccctctccctgacgtttgtcccttctgcccaaaagaaacaaaacagaatggccctgtgccctcactgtgcgcagggggtggagcgcctgcctccagcctgaccagagttctttaggtgcttgagcaactcgggccgccggttaggagaatttttgccacttgggtggactctgcctgagccaaccgcctccaaataggtgacacagaaactagcagagatagccccagacatcgtccctctgccctacccaaggactggcctgcttcagtttggagccttctagagcttcttgatgaggcctccagggcaatcgttcccttcactcggcctctggggctctcactgatgagatgcaaacctgtgccaggcctcaccagcgctgctggtttggggctggggcaggcttttctcccgcccctgtggctcccacatgctgagttgagattggaagcccgtgggtctgggcagcttcatcgggccgtgcgtccagcaggcctgagtgtccagcccaccctggtacccagctttctgaatcaccagactttatcatcaggcgctggctctgcctcagaccctgactctggcatgctcctccctggcccggcgggaatggcacgtggagctggcctcactggggccgagggtctgggctgagtgaggaagatgcgtccgtgctgtccggcctggtgactgactttccccttcatgcttttacaggctgaccagctgactgaggagcagattgcaggtgagtctgctatccccctcatcttagctcaggaaagcctccacatccccagccaaatcttagccactgaggagtgacatctgatgggtgaacctgtgtatcccttgtgtcacctaacactatgccttgtgcctagaatgctgataaatgtgtgtaagagcacaccagtgccccaatgacacgaagccccatggccctgagacaggcctttaccagacaccaaaggctgtgttcctctcctgggcctgggtcatctaggggcttgatatcagtggctgcaggacgagcccaactctctctcccagcttcagccaggttggcttagaaggtgagctccctgcctccctgtggggcctgcagagctcctgtcccactttaggagccgcccaggagctggctcgtcactcccacctctgcgcttgcctgcgctttgcacttcctttcgcatgtgcctgcgcctgcctgttctgctggcggaagtgcctccccagtgctttgcatgggcagctccttcccgtcccttagctcagatgtcccctcggggaggccttccctgacccccatctcaagtacacagccttcctttactctccttcacatcactttattttcttcataacctttctcgctgtctgaaattattttcttatgtcttcacctgttgtatctcctgttactagatgtgagttccattgagtttgggacttggttttgttggtccctgctatagccttaatgcctgcctagaacgtagtaggtcctccgcaaacttttgctggctaaacaaacatctctctctcagcaagctagaagaaatccctggatcccatctaattcatttttctaacccctccaaaaccccagaagggtcagctacaggaactattgtgtaattacagatccgtgcctgcctacccgcccatactgagctgcccgaggacagagagcaactcttggtttatctccatagccaggggccagcacacagtagaccagagtagcgatccagagaatgggcctctgctccccaccagctacccagcccccagctctgctgtcaggttcaaccggctgtgtaacaagtactaaaggcccagcttctgcggtgggaggcaggaacggacttgccttctctcctttctcccctcaacccgcatcacagagtcacctttgcagcttcaaaattttggccctgggtggctatggagacccctgaggaaagccagaagatggcctggtttagtgatcatgagctcggggtgccccatgacccactcactacctgccctccccaagaacaacaaggcctcagcacagggaggtgccagcctccccaaagagactcttgccatgtccccagggcccagaggctcagggccacagcttcccagctgtgcatgtccctcccaatgcacctgccacccatctcccaactctggccttgtgcaacataaacggtctgcttttcaccctgtccccattagcaaactgtccaccgcctcaccccagcccacaccctctgggaataggctgccggacatctgtttttggagggcttgggggtagaggagcaccaggtgccaaaatgggcccagtgggagggcaagagccatgtgcttttctccctgcccctgatgcggccccagctgtggccttcccactcagcactgctagctcctcatcctcctggcttggcagccgtcccctcgctttccatccccccatcaaccccacgcactgtccgtcagccatgttctgctgccgaccacccccacgctcaccacacgcagtggctcagctcctttggaagctggtagcacccacggcaaggaacagggctgccagtcagaagggagtggatgcctgcatttcctcttcaggccggccagaggcattctgcagcctcccctcctcgtcccagccagccaaccctggctaacacactcagacaaagaatcctttcggctctcattcactccatgactttggttcatttcatcatttcaagggagaagtcaaagccagggaccaaacagaaatgtagaatcatctaaggacagctgtcagaccattttccccactgtcttcactggctggccagaaaaatagcttcacctagcacagtgttgatgttcaataactgttgaatgaaggttggaagggctttgccctgagcactgaggagagagagctggttgcgtgggacttgaagtctgtctcagtttctttaggtgggactgatgcccttggccttcctccagggaaggcatccagcatccagaggtaaggattctcctgtggaccttgtgacctctgactcctcccccttcttcccccagagttcaaggaggccttctccctctttgacaaggatggagatggcactatcaccaccaaggagttggggacagtgatgagatccctgggacagaaccccactgaagcagagctgcaggatatgatcaatgaggtggatgcagatggtgagccccacagagcgcgtgggcagccctgctcctggtcaccccgagtgactgcagggagcctctctcagggtgatggatgagcccgtgtctctcagggcccaggccaagagcattctccatcctttccccaccttccagggaacgggaccattgacttcccggagttcctgaccatgatggccagaaagatgaaggacacagacagtgaggaggagatccgagaggcgttccgtgtctttgacaaggtaagcagccctctccaggggcggctctgagactgacgccagccttcaggcagacaggcggaactggagccacggagctaccacttccaggaggtccgggtcccggtgccagcctcattgccaacctgctctgccacctcaggcagcctccctcactgtgctcactgctgagggatggtgatgacagccacccctctcactgcctctctccccaccgggagaagtgcccagtgaaaggctttatccccaacccccaggatgggaatggctacatcagcgccgcagagctgcgtcacgtaatgacgaacctgggggagaagctgaccgatgaggaggtggatgagatgatcagggaggctgacatcgatggagatggccaggtcaattatgaaggtgagtcaaggccaggcttgatctctggaacaagaagagaatcgcagcttcaggaacaagcccccagatccctcttgttggggagggccgctcgccacttagcctgcccgcctgacctcctctctctctgcttcactccacagagtttgtacagatgatgactgcaaagtgaaggccccccgggcagctggcgatgcccgttctcttgatctctctcttctcgcgcgcgcactctctcttcaacactcccctgcgtaccccggttctagcaaacaccaattgattgactgagaatctgataaagcaacaaaagatttgtcccaagctgcatgattgct

SEQ ID NO: 11038 - DNA, 577 bp, Homo sapiens
gttgagggaccgttggggcgggaggcggcggcggcggcggcgcgcgctgcgggcagtgagtgtggaggcgcggacgcgcggcggagctggaactgctgcagctgctgccgccgccggaggaaccttgatccccgtgctccggacaccccgggcctcgccatggctgaccagctgactgaggagcagattgcagagttcaaggaggccttctccctctttgacaaggatggagatggcactatcaccaccaaggagttggggacagtgatgagatccctgggacagaaccccactgaagcagagctgcaggatatgatcaatgaggtggatgagatgatcagggaggctgacatcgatggagatggccaggtcaattatgaagagtttgtacagatgatgactgcaaagtgaaggccccccgggcagctggcgatgcccgttctcttgatctctctcttctcgcgcgcgcactctctcttcaacactcccctgcgtaccccggttctagcaaacaccaattgattgactgagaatctgataaagcaacaaaagatttgtcccaagctgcatgattgct

SEQ ID NO: 11039 - DNA, 7939 bp, Homo sapiens
actgctgcagctgctgccgccgccggaggaaccttgatccccgtgctccggacaccccgggcctcgccatggtgagtgaggctggggggtcgccgaggctgcgggctctgaggcgggcttaacggggcaggacccctgagggggcgacagagcccagagtggggggcgtccgggcccggcgagagcctcgggacccttttctacccgcgttgtcgggggctgttgaacccagagcgggacgtctggatcaccagaggtttccagaagcgactttagcaccaaatgggatgtttaagtccacaaatgggtatctgagcccctaaaggggacatttgaaccccggatggaggatcgggaccctcagtgggacccctcaaaaggattttggacccaggatggggcgttgggtttcaggatggaggtgtttggaccccaggggacgaaataagaaagatgggctggggaggggagctattcgggccctgatgaaggcgtttggtcctgagaggatgcggggaacgggggacgaagggaggctgggctgctcctggatggggtggtggagggtagctgggcccgggcggggaggggcgacccctgggctcctgtggagcagaggagagggtcaaggatgggcggtcacttctacagatgagactcccgagggtgggggagggtgggggagggtggtctccagagcccagcactgcagaggaggaggagggtgaggtgcaagcttatgggaggaagagcctggggtgggtggcagcggagattagaagatactcttgaaggcttccgggacggagaaggatcagggtcgtggaggtggtgaaaagggatggtgagagtggggctcgccagtagtcgggggacagggacccttggggttaatttggaagtagctagaaaaggttccgaggttactagtgggttaagactgttgctctagaaagacagaatttttttaacggggtgggagtgttgtgtttgggtccaagagaagatggatttccaaggtgaggggtgggggaggacttgggcttgggtggttgggaggtgaggtggaaggagaaaatgaatggcagtcaggggggcctaggtttgggggtggatgtgggtagcaccctgccagtctccagggacaggccaggacaaagacggctcagtgtggatggggagtgggctgcagggcccggaggaagcttttctaccgtcctccttcctcaggaagaacgcggctgggtggaagacaccggggcagtgggagcaggtgggcggagctgttcgggcccctattgcgcactgaagcctcatgaaatggggatgggagatcaaagtttggggtgcctcgaatgagccagctttttcaagcctagaagcctcactctgtcgctgcccttttcaggccaagagcactgccttttcccagcaggagcgccggttttctcatgatccccagccccacgcaccatgctgcacctcgtcacttgtgccaaatgacagtgcagtacagtgtggcgtcagtgacaatcagatgcctattcccgtgccctcggggtgggggctgcagagcttgatcagagagtgcctctggggagaccccttgatcggcctgagggccacttgttccattcagggccctcgctgagcgtgtctgttaattcacagggctttgagagaaaaccagcagactagttctttcctactccctgccacccacaacacccacagccccaccaggctgagcctgggaaccgtgtgcagccatcctccctggcaaggctggggagaacaggcagccgctgctgtgtatcagatctcatacttgctgacacagacctgatggctcctcttgccgctaccccattttcccccagcagaacctggctaaaaggggccctgaagcactagcaggccccctacctccagaataggacccaagctttggccacaactagtttctctttctgtttgtaatcagcaaggtagaggtgggacaagtcactggtaactggccttggactttggcctgagctctgtggctcctccttggcccgggtgaggggccctggccttggtttctgatctcatctaacactgctctctggcattggctgggggctggggcaaggcagagaaatcacaccctcttccctcccccacctcatggttttttttcttgtccagccccttgctggagcctaagatgagggataaggaagcaggagaccagctgagttattttggaaacagtttttgttgaaagtttagtcttcaggtctagaaagggaagaaaccttgagcaaggatcaatgatatcttcttaggcggtcggttttctgggcggcaaccttgcttgagatctgtacctttccttgaccaagcagggaagtgggtctccaacatgggagggagagcatctgacaggccctccatgcagagccacgcctatttgcagcaaccctgtgacagaactgaacatggcagtgcctcatctgcatcttccagtcttttggtggagactggcaaacggtggccttcagagccgctcggggcagtctgcagcctgtcacagcctcctcgcccccacccccagccccttacagtgctgcccaaaggtccggggagctggacttcttgcagggcggaacagtgggctgggaaggccctgacctggctcgctttttccattctaggccaggggaaagaatgaaaagcagatgggatggcagccacctccccacactgctgccctcctctctgttctttccctgaccctccctgggcattgcctggtctcggtaaccagaagcccatcctcccttctcactttccctaagcctcttcctcaggtgtcaggacctaagggatggctccaggcttttttgtccatggtgggaggtggggggcaggtggatcaagaggctcatgggcctggggctaccaggttggcatttagaagcccaaccaccctgtcttttttgaaggcaatgcagaagaatcttcatttggcctccccacctcccctttacactttggacttttccagaatgtgcatgtgtgccgttttctcccttcctctttccccctccctaagccctctcccctctgtgatcatcattttgattacccctcccattctgcctatttggggcttgcaagttcttcttccgttaggttttttttttttttttctaacttttttagatcagtgattgttaatatttgggacggggatgggggtaggggaggcaggcagtggtttgttcctagcttctggaacctctccgtagaatactgcaaattcacataatagtctgcttctatttctgaggctctcagactcgagactagaacatgctatagacttggagcccctttccctgattgtgaaaggaaggggaacagacccaccatggtcccgggatggtggtgccttcttcacagcatcaacaaaaaccagggaaaatgtgtcttttggctgctaaagctaaatgttgggattcagcctccccaaccccccagccccgctcctgccccataggatcactatgcctggctgatgcccagcacaccagtgcaggagaagccagtccccgcatctcctccccacccccaaaccccgcatgcagcaagggctgcctgccacccactggccagtccccagagtgcccaagctggaaagggttaaaaactgcagtgcaagccagcttcagtcctctgctgctgcccgctgcagccctctccctgacgtttgtcccttctgcccaaaagaaacaaaacagaatggccctgtgccctcactgtgcgcagggggtggagcgcctgcctccagcctgaccagagttctttaggtgcttgagcaactcgggccgccggttaggagaatttttgccacttgggtggactctgcctgagccaaccgcctccaaataggtgacacagaaactagcagagatagccccagacatcgtccctctgccctacccaaggactggcctgcttcagtttggagccttctagagcttcttgatgaggcctccagggcaatcgttcccttcactcggcctctggggctctcactgatgagatgcaaacctgtgccaggcctcaccagcgctgctggtttggggctggggcaggcttttctcccgcccctgtggctcccacatgctgagttgagattggaagcccgtgggtctgggcagcttcatcgggccgtgcgtccagcaggcctgagtgtccagcccaccctggtacccagctttctgaatcaccagactttatcatcaggcgctggctctgcctcagaccctgactctggcatgctcctccctggcccggcgggaatggcacgtggagctggcctcactggggccgagggtctgggctgagtgaggaagatgcgtccgtgctgtccggcctggtgactgactttccccttcatgcttttacaggctgaccagctgactgaggagcagattgcaggtgagtctgctatccccctcatcttagctcaggaaagcctccacatccccagccaaatcttagccactgaggagtgacatctgatgggtgaacctgtgtatcccttgtgtcacctaacactatgccttgtgcctagaatgctgataaatgtgtgtaagagcacaccagtgccccaatgacacgaagccccatggccctgagacaggcctttaccagacaccaaaggctgtgttcctctcctgggcctgggtcatctaggggcttgatatcagtggctgcaggacgagcccaactctctctcccagcttcagccaggttggcttagaaggtgagctccctgcctccctgtggggcctgcagagctcctgtcccactttaggagccgcccaggagctggctcgtcactcccacctctgcgcttgcctgcgctttgcacttcctttcgcatgtgcctgcgcctgcctgttctgctggcggaagtgcctccccagtgctttgcatgggcagctccttcccgtcccttagctcagatgtcccctcggggaggccttccctgacccccatctcaagtacacagccttcctttactctccttcacatcactttattttcttcataacctttctcgctgtctgaaattattttcttatgtcttcacctgttgtatctcctgttactagatgtgagttccattgagtttgggacttggttttgttggtccctgctatagccttaatgcctgcctagaacgtagtaggtcctccgcaaacttttgctggctaaacaaacatctctctctcagcaagctagaagaaatccctggatcccatctaattcatttttctaacccctccaaaaccccagaagggtcagctacaggaactattgtgtaattacagatccgtgcctgcctacccgcccatactgagctgcccgaggacagagagcaactcttggtttatctccatagccaggggccagcacacagtagaccagagtagcgatccagagaatgggcctctgctccccaccagctacccagcccccagctctgctgtcaggttcaaccggctgtgtaacaagtactaaaggcccagcttctgcggtgggaggcaggaacggacttgccttctctcctttctcccctcaacccgcatcacagagtcacctttgcagcttcaaaattttggccctgggtggctatggagacccctgaggaaagccagaagatggcctggtttagtgatcatgagctcggggtgccccatgacccactcactacctgccctccccaagaacaacaaggcctcagcacagggaggtgccagcctccccaaagagactcttgccatgtccccagggcccagaggctcagggccacagcttcccagctgtgcatgtccctcccaatgcacctgccacccatctcccaactctggccttgtgcaacataaacggtctgcttttcaccctgtccccattagcaaactgtccaccgcctcaccccagcccacaccctctgggaataggctgccggacatctgtttttggagggcttgggggtagaggagcaccaggtgccaaaatgggcccagtgggagggcaagagccatgtgcttttctccctgcccctgatgcggccccagctgtggccttcccactcagcactgctagctcctcatcctcctggcttggcagccgtcccctcgctttccatccccccatcaaccccacgcactgtccgtcagccatgttctgctgccgaccacccccacgctcaccacacgcagtggctcagctcctttggaagctggtagcacccacggcaaggaacagggctgccagtcagaagggagtggatgcctgcatttcctcttcaggccggccagaggcattctgcagcctcccctcctcgtcccagccagccaaccctggctaacacactcagacaaagaatcctttcggctctcattcactccatgactttggttcatttcatcatttcaagggagaagtcaaagccagggaccaaacagaaatgtagaatcatctaaggacagctgtcagaccattttccccactgtcttcactggctggccagaaaaatagcttcacctagcacagtgttgatgttcaataactgttgaatgaaggttggaagggctttgccctgagcactgaggagagagagctggttgcgtgggacttgaagtctgtctcagtttctttaggtgggactgatgcccttggccttcctccagggaaggcatccagcatccagaggtaaggattctcctgtggaccttgtgacctctgactcctcccccttcttcccccagagttcaaggaggccttctccctctttgacaaggatggagatggcactatcaccaccaaggagttggggacagtgatgagatccctgggacagaaccccactgaagcagagctgcaggatatgatcaatgaggtggatgcagatggtgagccccacagagcgcgtgggcagccctgctcctggtcaccccgagtgactgcagggagcctctctcagggtgatggatgagcccgtgtctctcagggcccaggccaagagcattctccatcctttccccaccttccagggaacgggaccattgacttcccggagttcctgaccatgatggccagaaagatgaaggacacagacagtgaggaggagatccgagaggcgttccgtgtctttgacaaggtaagcagccctctccaggggcggctctgagactgacgccagccttcaggcagacaggcggaactggagccacggagctaccacttccaggaggtccgggtcccggtgccagcctcattgccaacctgctctgccacctcaggcagcctccctcactgtgctcactgctgagggatggtgatgacagccacccctctcactgcctctctccccaccgggagaagtgcccagtgaaaggctttatccccaacccccaggatgggaatggctacatcagcgccgcagagctgcgtcacgtaatgacgaacctgggggagaagctgaccgatgaggaggtggatgagatgatcagggaggctgacatcgatggagatggccaggtcaattatgaaggtgagtcaaggccaggcttgatctctggaacaagaagagaatcgcagcttcaggaacaagcccccagatccctcttgttggggagggccgctcgccacttagcctgcccgcctgacctcctctctctctgcttcactccacagagtttgtacagatgatgactgcaaagtgaaggccccccgggcagctggcgatgcccgttctcttgatctctctcttctcgcgcgcgcactctctcttcaacactcccctgcgtaccccggttctagcaaacaccaattgattgactgagaatctgataaagcaacaaaagatttgtcccaa

SEQ ID NO: 11040 - DNA, 927 bp, Homo sapiens
actgctgcagctgctgccgccgccggaggaaccttgatccccgtgctccggacaccccgggcctcgccatggctgaccagctgactgaggagcagattgcagagttcaaggaggccttctccctctttgacaaggatggagatggcactatcaccaccaaggagttggggacagtgatgagatccctgggacagaaccccactgaagcagagctgcaggatatgatcaatgaggtggatgcagatgggaacgggaccattgacttcccggagttcctgaccatgatggccagaaagatgaaggacacagacagtgaggaggagatccgagaggcgttccgtgtctttgacaaggtaagcagccctctccaggggcggctctgagactgacgccagccttcaggcagacaggcggaactggagccacggagctaccacttccaggaggtccgggtcccggtgccagcctcattgccaacctgctctgccacctcaggcagcctccctcactgtgctcactgctgagggatggtgatgacagccacccctctcactgcctctctccccaccgggagaagtgcccagtgaaaggctttatccccaacccccaggatgggaatggctacatcagcgccgcagagctgcgtcacgtaatgacgaacctgggggagaagctgaccgatgaggaggtggatgagatgatcagggaggctgacatcgatggagatggccaggtcaattatgaagagtttgtacagatgatgactgcaaagtgaaggccccccgggcagctggcgatgcccgttctcttgatctctctcttctcgcgcgcgcactctctcttcaacactcccctgcgtaccccggttctagcaaacaccaattgattgactgagaatctgataaagcaacaaaagatttgtcccaa

SEQ ID NO: 11041 - DNA, 7861 bp, Homo sapiens
agtgagtgtggaggcgcggacgcgcggcggagctggaactgctgcagctgctgccgccgccggaggaaccttgatccccgtgctccggacaccccgggcctcgccatggtgagtgaggctggggggtcgccgaggctgcgggctctgaggcgggcttaacggggcaggacccctgagggggcgacagagcccagagtggggggcgtccgggcccggcgagagcctcgggacccttttctacccgcgttgtcgggggctgttgaacccagagcgggacgtctggatcaccagaggtttccagaagcgactttagcaccaaatgggatgtttaagtccacaaatgggtatctgagcccctaaaggggacatttgaaccccggatggaggatcgggaccctcagtgggacccctcaaaaggattttggacccaggatggggcgttgggtttcaggatggaggtgtttggaccccaggggacgaaataagaaagatgggctggggaggggagctattcgggccctgatgaaggcgtttggtcctgagaggatgcggggaacgggggacgaagggaggctgggctgctcctggatggggtggtggagggtagctgggcccgggcggggaggggcgacccctgggctcctgtggagcagaggagagggtcaaggatgggcggtcacttctacagatgagactcccgagggtgggggagggtgggggagggtggtctccagagcccagcactgcagaggaggaggagggtgaggtgcaagcttatgggaggaagagcctggggtgggtggcagcggagattagaagatactcttgaaggcttccgggacggagaaggatcagggtcgtggaggtggtgaaaagggatggtgagagtggggctcgccagtagtcgggggacagggacccttggggttaatttggaagtagctagaaaaggttccgaggttactagtgggttaagactgttgctctagaaagacagaatttttttaacggggtgggagtgttgtgtttgggtccaagagaagatggatttccaaggtgaggggtgggggaggacttgggcttgggtggttgggaggtgaggtggaaggagaaaatgaatggcagtcaggggggcctaggtttgggggtggatgtgggtagcaccctgccagtctccagggacaggccaggacaaagacggctcagtgtggatggggagtgggctgcagggcccggaggaagcttttctaccgtcctccttcctcaggaagaacgcggctgggtggaagacaccggggcagtgggagcaggtgggcggagctgttcgggcccctattgcgcactgaagcctcatgaaatggggatgggagatcaaagtttggggtgcctcgaatgagccagctttttcaagcctagaagcctcactctgtcgctgcccttttcaggccaagagcactgccttttcccagcaggagcgccggttttctcatgatccccagccccacgcaccatgctgcacctcgtcacttgtgccaaatgacagtgcagtacagtgtggcgtcagtgacaatcagatgcctattcccgtgccctcggggtgggggctgcagagcttgatcagagagtgcctctggggagaccccttgatcggcctgagggccacttgttccattcagggccctcgctgagcgtgtctgttaattcacagggctttgagagaaaaccagcagactagttctttcctactccctgccacccacaacacccacagccccaccaggctgagcctgggaaccgtgtgcagccatcctccctggcaaggctggggagaacaggcagccgctgctgtgtatcagatctcatacttgctgacacagacctgatggctcctcttgccgctaccccattttcccccagcagaacctggctaaaaggggccctgaagcactagcaggccccctacctccagaataggacccaagctttggccacaactagtttctctttctgtttgtaatcagcaaggtagaggtgggacaagtcactggtaactggccttggactttggcctgagctctgtggctcctccttggcccgggtgaggggccctggccttggtttctgatctcatctaacactgctctctggcattggctgggggctggggcaaggcagagaaatcacaccctcttccctcccccacctcatggttttttttcttgtccagccccttgctggagcctaagatgagggataaggaagcaggagaccagctgagttattttggaaacagtttttgttgaaagtttagtcttcaggtctagaaagggaagaaaccttgagcaaggatcaatgatatcttcttaggcggtcggttttctgggcggcaaccttgcttgagatctgtacctttccttgaccaagcagggaagtgggtctccaacatgggagggagagcatctgacaggccctccatgcagagccacgcctatttgcagcaaccctgtgacagaactgaacatggcagtgcctcatctgcatcttccagtcttttggtggagactggcaaacggtggccttcagagccgctcggggcagtctgcagcctgtcacagcctcctcgcccccacccccagccccttacagtgctgcccaaaggtccggggagctggacttcttgcagggcggaacagtgggctgggaaggccctgacctggctcgctttttccattctaggccaggggaaagaatgaaaagcagatgggatggcagccacctccccacactgctgccctcctctctgttctttccctgaccctccctgggcattgcctggtctcggtaaccagaagcccatcctcccttctcactttccctaagcctcttcctcaggtgtcaggacctaagggatggctccaggcttttttgtccatggtgggaggtggggggcaggtggatcaagaggctcatgggcctggggctaccaggttggcatttagaagcccaaccaccctgtcttttttgaaggcaatgcagaagaatcttcatttggcctccccacctcccctttacactttggacttttccagaatgtgcatgtgtgccgttttctcccttcctctttccccctccctaagccctctcccctctgtgatcatcattttgattacccctcccattctgcctatttggggcttgcaagttcttcttccgttaggttttttttttttttttctaacttttttagatcagtgattgttaatatttgggacggggatgggggtaggggaggcaggcagtggtttgttcctagcttctggaacctctccgtagaatactgcaaattcacataatagtctgcttctatttctgaggctctcagactcgagactagaacatgctatagacttggagcccctttccctgattgtgaaaggaaggggaacagacccaccatggtcccgggatggtggtgccttcttcacagcatcaacaaaaaccagggaaaatgtgtcttttggctgctaaagctaaatgttgggattcagcctccccaaccccccagccccgctcctgccccataggatcactatgcctggctgatgcccagcacaccagtgcaggagaagccagtccccgcatctcctccccacccccaaaccccgcatgcagcaagggctgcctgccacccactggccagtccccagagtgcccaagctggaaagggttaaaaactgcagtgcaagccagcttcagtcctctgctgctgcccgctgcagccctctccctgacgtttgtcccttctgcccaaaagaaacaaaacagaatggccctgtgccctcactgtgcgcagggggtggagcgcctgcctccagcctgaccagagttctttaggtgcttgagcaactcgggccgccggttaggagaatttttgccacttgggtggactctgcctgagccaaccgcctccaaataggtgacacagaaactagcagagatagccccagacatcgtccctctgccctacccaaggactggcctgcttcagtttggagccttctagagcttcttgatgaggcctccagggcaatcgttcccttcactcggcctctggggctctcactgatgagatgcaaacctgtgccaggcctcaccagcgctgctggtttggggctggggcaggcttttctcccgcccctgtggctcccacatgctgagttgagattggaagcccgtgggtctgggcagcttcatcgggccgtgcgtccagcaggcctgagtgtccagcccaccctggtacccagctttctgaatcaccagactttatcatcaggcgctggctctgcctcagaccctgactctggcatgctcctccctggcccggcgggaatggcacgtggagctggcctcactggggccgagggtctgggctgagtgaggaagatgcgtccgtgctgtccggcctggtgactgactttccccttcatgcttttacaggctgaccagctgactgaggagcagattgcaggtgagtctgctatccccctcatcttagctcaggaaagcctccacatccccagccaaatcttagccactgaggagtgacatctgatgggtgaacctgtgtatcccttgtgtcacctaacactatgccttgtgcctagaatgctgataaatgtgtgtaagagcacaccagtgccccaatgacacgaagccccatggccctgagacaggcctttaccagacaccaaaggctgtgttcctctcctgggcctgggtcatctaggggcttgatatcagtggctgcaggacgagcccaactctctctcccagcttcagccaggttggcttagaaggtgagctccctgcctccctgtggggcctgcagagctcctgtcccactttaggagccgcccaggagctggctcgtcactcccacctctgcgcttgcctgcgctttgcacttcctttcgcatgtgcctgcgcctgcctgttctgctggcggaagtgcctccccagtgctttgcatgggcagctccttcccgtcccttagctcagatgtcccctcggggaggccttccctgacccccatctcaagtacacagccttcctttactctccttcacatcactttattttcttcataacctttctcgctgtctgaaattattttcttatgtcttcacctgttgtatctcctgttactagatgtgagttccattgagtttgggacttggttttgttggtccctgctatagccttaatgcctgcctagaacgtagtaggtcctccgcaaacttttgctggctaaacaaacatctctctctcagcaagctagaagaaatccctggatcccatctaattcatttttctaacccctccaaaaccccagaagggtcagctacaggaactattgtgtaattacagatccgtgcctgcctacccgcccatactgagctgcccgaggacagagagcaactcttggtttatctccatagccaggggccagcacacagtagaccagagtagcgatccagagaatgggcctctgctccccaccagctacccagcccccagctctgctgtcaggttcaaccggctgtgtaacaagtactaaaggcccagcttctgcggtgggaggcaggaacggacttgccttctctcctttctcccctcaacccgcatcacagagtcacctttgcagcttcaaaattttggccctgggtggctatggagacccctgaggaaagccagaagatggcctggtttagtgatcatgagctcggggtgccccatgacccactcactacctgccctccccaagaacaacaaggcctcagcacagggaggtgccagcctccccaaagagactcttgccatgtccccagggcccagaggctcagggccacagcttcccagctgtgcatgtccctcccaatgcacctgccacccatctcccaactctggccttgtgcaacataaacggtctgcttttcaccctgtccccattagcaaactgtccaccgcctcaccccagcccacaccctctgggaataggctgccggacatctgtttttggagggcttgggggtagaggagcaccaggtgccaaaatgggcccagtgggagggcaagagccatgtgcttttctccctgcccctgatgcggccccagctgtggccttcccactcagcactgctagctcctcatcctcctggcttggcagccgtcccctcgctttccatccccccatcaaccccacgcactgtccgtcagccatgttctgctgccgaccacccccacgctcaccacacgcagtggctcagctcctttggaagctggtagcacccacggcaaggaacagggctgccagtcagaagggagtggatgcctgcatttcctcttcaggccggccagaggcattctgcagcctcccctcctcgtcccagccagccaaccctggctaacacactcagacaaagaatcctttcggctctcattcactccatgactttggttcatttcatcatttcaagggagaagtcaaagccagggaccaaacagaaatgtagaatcatctaaggacagctgtcagaccattttccccactgtcttcactggctggccagaaaaatagcttcacctagcacagtgttgatgttcaataactgttgaatgaaggttggaagggctttgccctgagcactgaggagagagagctggttgcgtgggacttgaagtctgtctcagtttctttaggtgggactgatgcccttggccttcctccagggaaggcatccagcatccagaggtaaggattctcctgtggaccttgtgacctctgactcctcccccttcttcccccagagttcaaggaggccttctccctctttgacaaggatggagatggcactatcaccaccaaggagttggggacagtgatgagatccctgggacagaaccccactgaagcagagctgcaggatatgatcaatgaggtggatgcagatggtgagccccacagagcgcgtgggcagccctgctcctggtcaccccgagtgactgcagggagcctctctcagggtgatggatgagcccgtgtctctcagggcccaggccaagagcattctccatcctttccccaccttccagggaacgggaccattgacttcccggagttcctgaccatgatggccagaaagatgaaggacacagacagtgaggaggagatccgagaggcgttccgtgtctttgacaaggtaagcagccctctccaggggcggctctgagactgacgccagccttcaggcagacaggcggaactggagccacggagctaccacttccaggaggtccgggtcccggtgccagcctcattgccaacctgctctgccacctcaggcagcctccctcactgtgctcactgctgagggatggtgatgacagccacccctctcactgcctctctccccaccgggagaagtgcccagtgaaaggctttatccccaacccccaggatgggaatggctacatcagcgccgcagagctgcgtcacgtaatgacgaacctgggggagaagctgaccgatgaggaggtggatgagatgatcagggaggctgacatcgatggagatggccaggtcaattatgaaggtgagtcaaggccaggcttgatctctggaacaagaagagaatcgcagcttcaggaacaagcccccagatccctcttgttggggagggccgctcgccacttagcctgcccgcctgacctcctctctctctgcttcactccacagagtttgtacagatgatgactgcaaagtgaaggccccccgggcagctggcgatgcccgttctcttga

SEQ ID NO: 11042 - DNA, 561 bp, Homo sapiens
agtgagtgtggaggcgcggacgcgcggcggagctggaactgctgcagctgctgccgccgccggaggaaccttgatccccgtgctccggacaccccgggcctcgccatgagttcaaggaggccttctccctctttgacaaggatggagatggcactatcaccaccaaggagttggggacagtgatgagatccctgggacagaaccccactgaagcagagctgcaggatatgatcaatgaggtggatgcagatgggaacgggaccattgacttcccggagttcctgaccatgatggccagaaagatgaaggacacagacagtgaggaggagatccgagaggcgttccgtgtctttgacaaggatgggaatggctacatcagcgccgcagagctgcgtcacgtaatgacgaacctgggggagaagctgaccgatgaggaggtggatgagatgatcagggaggctgacatcgatggagatggccaggtcaattatgaagagtttgtacagatgatgactgcaaagtgaaggccccccgggcagctggcgatgcccgttctcttga

SEQ ID NO: 11043 - DNA, 7928 bp, Homo sapiens
agcactgcagaggaggaggagggtgaggtgcaagcttatgggaggaagagcctggggtgggtggcagcggagattagaagatactcttgaaggcttccgggacggagaaggatcagggtcgtggaggtggtgaaaagggatggtgagagtggggctcgccagtagtcgggggacagggacccttggggttaatttggaagtagctagaaaaggttccgaggttactagtgggttaagactgttgctctagaaagacagaatttttttaacggggtgggagtgttgtgtttgggtccaagagaagatggatttccaaggtgaggggtgggggaggacttgggcttgggtggttgggaggtgaggtggaaggagaaaatgaatggcagtcaggggggcctaggtttgggggtggatgtgggtagcaccctgccagtctccagggacaggccaggacaaagacggctcagtgtggatggggagtgggctgcagggcccggaggaagcttttctaccgtcctccttcctcaggaagaacgcggctgggtggaagacaccggggcagtgggagcaggtgggcggagctgttcgggcccctattgcgcactgaagcctcatgaaatggggatgggagatcaaagtttggggtgcctcgaatgagccagctttttcaagcctagaagcctcactctgtcgctgcccttttcaggccaagagcactgccttttcccagcaggagcgccggttttctcatgatccccagccccacgcaccatgctgcacctcgtcacttgtgccaaatgacagtgcagtacagtgtggcgtcagtgacaatcagatgcctattcccgtgccctcggggtgggggctgcagagcttgatcagagagtgcctctggggagaccccttgatcggcctgagggccacttgttccattcagggccctcgctgagcgtgtctgttaattcacagggctttgagagaaaaccagcagactagttctttcctactccctgccacccacaacacccacagccccaccaggctgagcctgggaaccgtgtgcagccatcctccctggcaaggctggggagaacaggcagccgctgctgtgtatcagatctcatacttgctgacacagacctgatggctcctcttgccgctaccccattttcccccagcagaacctggctaaaaggggccctgaagcactagcaggccccctacctccagaataggacccaagctttggccacaactagtttctctttctgtttgtaatcagcaaggtagaggtgggacaagtcactggtaactggccttggactttggcctgagctctgtggctcctccttggcccgggtgaggggccctggccttggtttctgatctcatctaacactgctctctggcattggctgggggctggggcaaggcagagaaatcacaccctcttccctcccccacctcatggttttttttcttgtccagccccttgctggagcctaagatgagggataaggaagcaggagaccagctgagttattttggaaacagtttttgttgaaagtttagtcttcaggtctagaaagggaagaaaccttgagcaaggatcaatgatatcttcttaggcggtcggttttctgggcggcaaccttgcttgagatctgtacctttccttgaccaagcagggaagtgggtctccaacatgggagggagagcatctgacaggccctccatgcagagccacgcctatttgcagcaaccctgtgacagaactgaacatggcagtgcctcatctgcatcttccagtcttttggtggagactggcaaacggtggccttcagagccgctcggggcagtctgcagcctgtcacagcctcctcgcccccacccccagccccttacagtgctgcccaaaggtccggggagctggacttcttgcagggcggaacagtgggctgggaaggccctgacctggctcgctttttccattctaggccaggggaaagaatgaaaagcagatgggatggcagccacctccccacactgctgccctcctctctgttctttccctgaccctccctgggcattgcctggtctcggtaaccagaagcccatcctcccttctcactttccctaagcctcttcctcaggtgtcaggacctaagggatggctccaggcttttttgtccatggtgggaggtggggggcaggtggatcaagaggctcatgggcctggggctaccaggttggcatttagaagcccaaccaccctgtcttttttgaaggcaatgcagaagaatcttcatttggcctccccacctcccctttacactttggacttttccagaatgtgcatgtgtgccgttttctcccttcctctttccccctccctaagccctctcccctctgtgatcatcattttgattacccctcccattctgcctatttggggcttgcaagttcttcttccgttaggttttttttttttttttctaacttttttagatcagtgattgttaatatttgggacggggatgggggtaggggaggcaggcagtggtttgttcctagcttctggaacctctccgtagaatactgcaaattcacataatagtctgcttctatttctgaggctctcagactcgagactagaacatgctatagacttggagcccctttccctgattgtgaaaggaaggggaacagacccaccatggtcccgggatggtggtgccttcttcacagcatcaacaaaaaccagggaaaatgtgtcttttggctgctaaagctaaatgttgggattcagcctccccaaccccccagccccgctcctgccccataggatcactatgcctggctgatgcccagcacaccagtgcaggagaagccagtccccgcatctcctccccacccccaaaccccgcatgcagcaagggctgcctgccacccactggccagtccccagagtgcccaagctggaaagggttaaaaactgcagtgcaagccagcttcagtcctctgctgctgcccgctgcagccctctccctgacgtttgtcccttctgcccaaaagaaacaaaacagaatggccctgtgccctcactgtgcgcagggggtggagcgcctgcctccagcctgaccagagttctttaggtgcttgagcaactcgggccgccggttaggagaatttttgccacttgggtggactctgcctgagccaaccgcctccaaataggtgacacagaaactagcagagatagccccagacatcgtccctctgccctacccaaggactggcctgcttcagtttggagccttctagagcttcttgatgaggcctccagggcaatcgttcccttcactcggcctctggggctctcactgatgagatgcaaacctgtgccaggcctcaccagcgctgctggtttggggctggggcaggcttttctcccgcccctgtggctcccacatgctgagttgagattggaagcccgtgggtctgggcagcttcatcgggccgtgcgtccagcaggcctgagtgtccagcccaccctggtacccagctttctgaatcaccagactttatcatcaggcgctggctctgcctcagaccctgactctggcatgctcctccctggcccggcgggaatggcacgtggagctggcctcactggggccgagggtctgggctgagtgaggaagatgcgtccgtgctgtccggcctggtgactgactttccccttcatgcttttacaggctgaccagctgactgaggagcagattgcaggtgagtctgctatccccctcatcttagctcaggaaagcctccacatccccagccaaatcttagccactgaggagtgacatctgatgggtgaacctgtgtatcccttgtgtcacctaacactatgccttgtgcctagaatgctgataaatgtgtgtaagagcacaccagtgccccaatgacacgaagccccatggccctgagacaggcctttaccagacaccaaaggctgtgttcctctcctgggcctgggtcatctaggggcttgatatcagtggctgcaggacgagcccaactctctctcccagcttcagccaggttggcttagaaggtgagctccctgcctccctgtggggcctgcagagctcctgtcccactttaggagccgcccaggagctggctcgtcactcccacctctgcgcttgcctgcgctttgcacttcctttcgcatgtgcctgcgcctgcctgttctgctggcggaagtgcctccccagtgctttgcatgggcagctccttcccgtcccttagctcagatgtcccctcggggaggccttccctgacccccatctcaagtacacagccttcctttactctccttcacatcactttattttcttcataacctttctcgctgtctgaaattattttcttatgtcttcacctgttgtatctcctgttactagatgtgagttccattgagtttgggacttggttttgttggtccctgctatagccttaatgcctgcctagaacgtagtaggtcctccgcaaacttttgctggctaaacaaacatctctctctcagcaagctagaagaaatccctggatcccatctaattcatttttctaacccctccaaaaccccagaagggtcagctacaggaactattgtgtaattacagatccgtgcctgcctacccgcccatactgagctgcccgaggacagagagcaactcttggtttatctccatagccaggggccagcacacagtagaccagagtagcgatccagagaatgggcctctgctccccaccagctacccagcccccagctctgctgtcaggttcaaccggctgtgtaacaagtactaaaggcccagcttctgcggtgggaggcaggaacggacttgccttctctcctttctcccctcaacccgcatcacagagtcacctttgcagcttcaaaattttggccctgggtggctatggagacccctgaggaaagccagaagatggcctggtttagtgatcatgagctcggggtgccccatgacccactcactacctgccctccccaagaacaacaaggcctcagcacagggaggtgccagcctccccaaagagactcttgccatgtccccagggcccagaggctcagggccacagcttcccagctgtgcatgtccctcccaatgcacctgccacccatctcccaactctggccttgtgcaacataaacggtctgcttttcaccctgtccccattagcaaactgtccaccgcctcaccccagcccacaccctctgggaataggctgccggacatctgtttttggagggcttgggggtagaggagcaccaggtgccaaaatgggcccagtgggagggcaagagccatgtgcttttctccctgcccctgatgcggccccagctgtggccttcccactcagcactgctagctcctcatcctcctggcttggcagccgtcccctcgctttccatccccccatcaaccccacgcactgtccgtcagccatgttctgctgccgaccacccccacgctcaccacacgcagtggctcagctcctttggaagctggtagcacccacggcaaggaacagggctgccagtcagaagggagtggatgcctgcatttcctcttcaggccggccagaggcattctgcagcctcccctcctcgtcccagccagccaaccctggctaacacactcagacaaagaatcctttcggctctcattcactccatgactttggttcatttcatcatttcaagggagaagtcaaagccagggaccaaacagaaatgtagaatcatctaaggacagctgtcagaccattttccccactgtcttcactggctggccagaaaaatagcttcacctagcacagtgttgatgttcaataactgttgaatgaaggttggaagggctttgccctgagcactgaggagagagagctggttgcgtgggacttgaagtctgtctcagtttctttaggtgggactgatgcccttggccttcctccagggaaggcatccagcatccagaggtaaggattctcctgtggaccttgtgacctctgactcctcccccttcttcccccagagttcaaggaggccttctccctctttgacaaggatggagatggcactatcaccaccaaggagttggggacagtgatgagatccctgggacagaaccccactgaagcagagctgcaggatatgatcaatgaggtggatgcagatggtgagccccacagagcgcgtgggcagccctgctcctggtcaccccgagtgactgcagggagcctctctcagggtgatggatgagcccgtgtctctcagggcccaggccaagagcattctccatcctttccccaccttccagggaacgggaccattgacttcccggagttcctgaccatgatggccagaaagatgaaggacacagacagtgaggaggagatccgagaggcgttccgtgtctttgacaaggtaagcagccctctccaggggcggctctgagactgacgccagccttcaggcagacaggcggaactggagccacggagctaccacttccaggaggtccgggtcccggtgccagcctcattgccaacctgctctgccacctcaggcagcctccctcactgtgctcactgctgagggatggtgatgacagccacccctctcactgcctctctccccaccgggagaagtgcccagtgaaaggctttatccccaacccccaggatgggaatggctacatcagcgccgcagagctgcgtcacgtaatgacgaacctgggggagaagctgaccgatgaggaggtggatgagatgatcagggaggctgacatcgatggagatggccaggtcaattatgaaggtgagtcaaggccaggcttgatctctggaacaagaagagaatcgcagcttcaggaacaagcccccagatccctcttgttggggagggccgctcgccacttagcctgcccgcctgacctcctctctctctgcttcactccacagagtttgtacagatgatgactgcaaagtgaaggccccccgggcagctggcgatgcccgttctcttgatctctctcttctcgcgcgcgcactctctcttcaacactcccctgcgtaccccggttctagcaaacaccaattgattgactgagaatctgataaagcaacaaaagatttgtcccaagctgcatgattgctctttctccttcttccctgagtctctctccatgcccctcatctcttccttttgccctcgcctcttccatccatgtcttccaaggcctgatgcattcataagttgaagccctccccagatccccttggggagcctctgccctcctccagcccggatggctctcctccattttggtttgtttcctcttgtttgtcatcttattttgggtgctggggtggctgccagccctgtcccgggacctgctgggagggacaagaggccctcccccaggcagaagagcatgccctttgccgttgcatgcaaccagccctgtgattccacgtgcagatcccagcagcctgttggggcaggggtgccaagagaggcattccagaaggactgagggggcgttgaggaattgtggcgttgactggatgtggcccaggagggggtcgagggggccaactcacagaaggggactgacagtgggcaacactcacatcccactggctgctgttctgaaaccatctgattggctttctgaggtttggctgggtggggactgctcatttggccactctgcaaattggacttgcccgcgttcctgaagcgctctcgagctgttctgtaaatacctggtgctaacatcccatgccgctccctcctcacgatgcacccaccgccctgagggcccgtccta

SEQ ID NO: 11044 - DNA, 1355 bp, Homo sapiens
agcactgcagaggaggaggagggaagaacgcggctgggtggaagacaccggggcagtgggagcaggctgaccagctgactgaggagcagattgcagagttcaaggaggccttctccctctttgacaaggatggagatggcactatcaccaccaaggagttggggacagtgatgagatccctgggacagaaccccactgaagcagagctgcaggatatgatcaatgaggtggatgcagatgggaacgggaccattgacttcccggagttcctgaccatgatggccagaaagatgaaggacacagacagtgaggaggagatccgagaggcgttccgtgtctttgacaaggatgggaatggctacatcagcgccgcagagctgcgtcacgtaatgacgaacctgggggagaagctgaccgatgaggaggtggatgagatgatcagggaggctgacatcgatggagatggccaggtcaattatgaagagtttgtacagatgatgactgcaaagtgaaggccccccgggcagctggcgatgcccgttctcttgatctctctcttctcgcgcgcgcactctctcttcaacactcccctgcgtaccccggttctagcaaacaccaattgattgactgagaatctgataaagcaacaaaagatttgtcccaagctgcatgattgctctttctccttcttccctgagtctctctccatgcccctcatctcttccttttgccctcgcctcttccatccatgtcttccaaggcctgatgcattcataagttgaagccctccccagatccccttggggagcctctgccctcctccagcccggatggctctcctccattttggtttgtttcctcttgtttgtcatcttattttgggtgctggggtggctgccagccctgtcccgggacctgctgggagggacaagaggccctcccccaggcagaagagcatgccctttgccgttgcatgcaaccagccctgtgattccacgtgcagatcccagcagcctgttggggcaggggtgccaagagaggcattccagaaggactgagggggcgttgaggaattgtggcgttgactggatgtggcccaggagggggtcgagggggccaactcacagaaggggactgacagtgggcaacactcacatcccactggctgctgttctgaaaccatctgattggctttctgaggtttggctgggtggggactgctcatttggccactctgcaaattggacttgcccgcgttcctgaagcgctctcgagctgttctgtaaatacctggtgctaacatcccatgccgctccctcctcacgatgcacccaccgccctgagggcccgtccta

SEQ ID NO: 11045 - DNA, 7957 bp, Homo sapiens
ggacgcgcggcggagctggaactgctgcagctgctgccgccgccggaggaaccttgatccccgtgctccggacaccccgggcctcgccatggtgagtgaggctggggggtcgccgaggctgcgggctctgaggcgggcttaacggggcaggacccctgagggggcgacagagcccagagtggggggcgtccgggcccggcgagagcctcgggacccttttctacccgcgttgtcgggggctgttgaacccagagcgggacgtctggatcaccagaggtttccagaagcgactttagcaccaaatgggatgtttaagtccacaaatgggtatctgagcccctaaaggggacatttgaaccccggatggaggatcgggaccctcagtgggacccctcaaaaggattttggacccaggatggggcgttgggtttcaggatggaggtgtttggaccccaggggacgaaataagaaagatgggctggggaggggagctattcgggccctgatgaaggcgtttggtcctgagaggatgcggggaacgggggacgaagggaggctgggctgctcctggatggggtggtggagggtagctgggcccgggcggggaggggcgacccctgggctcctgtggagcagaggagagggtcaaggatgggcggtcacttctacagatgagactcccgagggtgggggagggtgggggagggtggtctccagagcccagcactgcagaggaggaggagggtgaggtgcaagcttatgggaggaagagcctggggtgggtggcagcggagattagaagatactcttgaaggcttccgggacggagaaggatcagggtcgtggaggtggtgaaaagggatggtgagagtggggctcgccagtagtcgggggacagggacccttggggttaatttggaagtagctagaaaaggttccgaggttactagtgggttaagactgttgctctagaaagacagaatttttttaacggggtgggagtgttgtgtttgggtccaagagaagatggatttccaaggtgaggggtgggggaggacttgggcttgggtggttgggaggtgaggtggaaggagaaaatgaatggcagtcaggggggcctaggtttgggggtggatgtgggtagcaccctgccagtctccagggacaggccaggacaaagacggctcagtgtggatggggagtgggctgcagggcccggaggaagcttttctaccgtcctccttcctcaggaagaacgcggctgggtggaagacaccggggcagtgggagcaggtgggcggagctgttcgggcccctattgcgcactgaagcctcatgaaatggggatgggagatcaaagtttggggtgcctcgaatgagccagctttttcaagcctagaagcctcactctgtcgctgcccttttcaggccaagagcactgccttttcccagcaggagcgccggttttctcatgatccccagccccacgcaccatgctgcacctcgtcacttgtgccaaatgacagtgcagtacagtgtggcgtcagtgacaatcagatgcctattcccgtgccctcggggtgggggctgcagagcttgatcagagagtgcctctggggagaccccttgatcggcctgagggccacttgttccattcagggccctcgctgagcgtgtctgttaattcacagggctttgagagaaaaccagcagactagttctttcctactccctgccacccacaacacccacagccccaccaggctgagcctgggaaccgtgtgcagccatcctccctggcaaggctggggagaacaggcagccgctgctgtgtatcagatctcatacttgctgacacagacctgatggctcctcttgccgctaccccattttcccccagcagaacctggctaaaaggggccctgaagcactagcaggccccctacctccagaataggacccaagctttggccacaactagtttctctttctgtttgtaatcagcaaggtagaggtgggacaagtcactggtaactggccttggactttggcctgagctctgtggctcctccttggcccgggtgaggggccctggccttggtttctgatctcatctaacactgctctctggcattggctgggggctggggcaaggcagagaaatcacaccctcttccctcccccacctcatggttttttttcttgtccagccccttgctggagcctaagatgagggataaggaagcaggagaccagctgagttattttggaaacagtttttgttgaaagtttagtcttcaggtctagaaagggaagaaaccttgagcaaggatcaatgatatcttcttaggcggtcggttttctgggcggcaaccttgcttgagatctgtacctttccttgaccaagcagggaagtgggtctccaacatgggagggagagcatctgacaggccctccatgcagagccacgcctatttgcagcaaccctgtgacagaactgaacatggcagtgcctcatctgcatcttccagtcttttggtggagactggcaaacggtggccttcagagccgctcggggcagtctgcagcctgtcacagcctcctcgcccccacccccagccccttacagtgctgcccaaaggtccggggagctggacttcttgcagggcggaacagtgggctgggaaggccctgacctggctcgctttttccattctaggccaggggaaagaatgaaaagcagatgggatggcagccacctccccacactgctgccctcctctctgttctttccctgaccctccctgggcattgcctggtctcggtaaccagaagcccatcctcccttctcactttccctaagcctcttcctcaggtgtcaggacctaagggatggctccaggcttttttgtccatggtgggaggtggggggcaggtggatcaagaggctcatgggcctggggctaccaggttggcatttagaagcccaaccaccctgtcttttttgaaggcaatgcagaagaatcttcatttggcctccccacctcccctttacactttggacttttccagaatgtgcatgtgtgccgttttctcccttcctctttccccctccctaagccctctcccctctgtgatcatcattttgattacccctcccattctgcctatttggggcttgcaagttcttcttccgttaggttttttttttttttttctaacttttttagatcagtgattgttaatatttgggacggggatgggggtaggggaggcaggcagtggtttgttcctagcttctggaacctctccgtagaatactgcaaattcacataatagtctgcttctatttctgaggctctcagactcgagactagaacatgctatagacttggagcccctttccctgattgtgaaaggaaggggaacagacccaccatggtcccgggatggtggtgccttcttcacagcatcaacaaaaaccagggaaaatgtgtcttttggctgctaaagctaaatgttgggattcagcctccccaaccccccagccccgctcctgccccataggatcactatgcctggctgatgcccagcacaccagtgcaggagaagccagtccccgcatctcctccccacccccaaaccccgcatgcagcaagggctgcctgccacccactggccagtccccagagtgcccaagctggaaagggttaaaaactgcagtgcaagccagcttcagtcctctgctgctgcccgctgcagccctctccctgacgtttgtcccttctgcccaaaagaaacaaaacagaatggccctgtgccctcactgtgcgcagggggtggagcgcctgcctccagcctgaccagagttctttaggtgcttgagcaactcgggccgccggttaggagaatttttgccacttgggtggactctgcctgagccaaccgcctccaaataggtgacacagaaactagcagagatagccccagacatcgtccctctgccctacccaaggactggcctgcttcagtttggagccttctagagcttcttgatgaggcctccagggcaatcgttcccttcactcggcctctggggctctcactgatgagatgcaaacctgtgccaggcctcaccagcgctgctggtttggggctggggcaggcttttctcccgcccctgtggctcccacatgctgagttgagattggaagcccgtgggtctgggcagcttcatcgggccgtgcgtccagcaggcctgagtgtccagcccaccctggtacccagctttctgaatcaccagactttatcatcaggcgctggctctgcctcagaccctgactctggcatgctcctccctggcccggcgggaatggcacgtggagctggcctcactggggccgagggtctgggctgagtgaggaagatgcgtccgtgctgtccggcctggtgactgactttccccttcatgcttttacaggctgaccagctgactgaggagcagattgcaggtgagtctgctatccccctcatcttagctcaggaaagcctccacatccccagccaaatcttagccactgaggagtgacatctgatgggtgaacctgtgtatcccttgtgtcacctaacactatgccttgtgcctagaatgctgataaatgtgtgtaagagcacaccagtgccccaatgacacgaagccccatggccctgagacaggcctttaccagacaccaaaggctgtgttcctctcctgggcctgggtcatctaggggcttgatatcagtggctgcaggacgagcccaactctctctcccagcttcagccaggttggcttagaaggtgagctccctgcctccctgtggggcctgcagagctcctgtcccactttaggagccgcccaggagctggctcgtcactcccacctctgcgcttgcctgcgctttgcacttcctttcgcatgtgcctgcgcctgcctgttctgctggcggaagtgcctccccagtgctttgcatgggcagctccttcccgtcccttagctcagatgtcccctcggggaggccttccctgacccccatctcaagtacacagccttcctttactctccttcacatcactttattttcttcataacctttctcgctgtctgaaattattttcttatgtcttcacctgttgtatctcctgttactagatgtgagttccattgagtttgggacttggttttgttggtccctgctatagccttaatgcctgcctagaacgtagtaggtcctccgcaaacttttgctggctaaacaaacatctctctctcagcaagctagaagaaatccctggatcccatctaattcatttttctaacccctccaaaaccccagaagggtcagctacaggaactattgtgtaattacagatccgtgcctgcctacccgcccatactgagctgcccgaggacagagagcaactcttggtttatctccatagccaggggccagcacacagtagaccagagtagcgatccagagaatgggcctctgctccccaccagctacccagcccccagctctgctgtcaggttcaaccggctgtgtaacaagtactaaaggcccagcttctgcggtgggaggcaggaacggacttgccttctctcctttctcccctcaacccgcatcacagagtcacctttgcagcttcaaaattttggccctgggtggctatggagacccctgaggaaagccagaagatggcctggtttagtgatcatgagctcggggtgccccatgacccactcactacctgccctccccaagaacaacaaggcctcagcacagggaggtgccagcctccccaaagagactcttgccatgtccccagggcccagaggctcagggccacagcttcccagctgtgcatgtccctcccaatgcacctgccacccatctcccaactctggccttgtgcaacataaacggtctgcttttcaccctgtccccattagcaaactgtccaccgcctcaccccagcccacaccctctgggaataggctgccggacatctgtttttggagggcttgggggtagaggagcaccaggtgccaaaatgggcccagtgggagggcaagagccatgtgcttttctccctgcccctgatgcggccccagctgtggccttcccactcagcactgctagctcctcatcctcctggcttggcagccgtcccctcgctttccatccccccatcaaccccacgcactgtccgtcagccatgttctgctgccgaccacccccacgctcaccacacgcagtggctcagctcctttggaagctggtagcacccacggcaaggaacagggctgccagtcagaagggagtggatgcctgcatttcctcttcaggccggccagaggcattctgcagcctcccctcctcgtcccagccagccaaccctggctaacacactcagacaaagaatcctttcggctctcattcactccatgactttggttcatttcatcatttcaagggagaagtcaaagccagggaccaaacagaaatgtagaatcatctaaggacagctgtcagaccattttccccactgtcttcactggctggccagaaaaatagcttcacctagcacagtgttgatgttcaataactgttgaatgaaggttggaagggctttgccctgagcactgaggagagagagctggttgcgtgggacttgaagtctgtctcagtttctttaggtgggactgatgcccttggccttcctccagggaaggcatccagcatccagaggtaaggattctcctgtggaccttgtgacctctgactcctcccccttcttcccccagagttcaaggaggccttctccctctttgacaaggatggagatggcactatcaccaccaaggagttggggacagtgatgagatccctgggacagaaccccactgaagcagagctgcaggatatgatcaatgaggtggatgcagatggtgagccccacagagcgcgtgggcagccctgctcctggtcaccccgagtgactgcagggagcctctctcagggtgatggatgagcccgtgtctctcagggcccaggccaagagcattctccatcctttccccaccttccagggaacgggaccattgacttcccggagttcctgaccatgatggccagaaagatgaaggacacagacagtgaggaggagatccgagaggcgttccgtgtctttgacaaggtaagcagccctctccaggggcggctctgagactgacgccagccttcaggcagacaggcggaactggagccacggagctaccacttccaggaggtccgggtcccggtgccagcctcattgccaacctgctctgccacctcaggcagcctccctcactgtgctcactgctgagggatggtgatgacagccacccctctcactgcctctctccccaccgggagaagtgcccagtgaaaggctttatccccaacccccaggatgggaatggctacatcagcgccgcagagctgcgtcacgtaatgacgaacctgggggagaagctgaccgatgaggaggtggatgagatgatcagggaggctgacatcgatggagatggccaggtcaattatgaaggtgagtcaaggccaggcttgatctctggaacaagaagagaatcgcagcttcaggaacaagcccccagatccctcttgttggggagggccgctcgccacttagcctgcccgcctgacctcctctctctctgcttcactccacagagtttgtacagatgatgactgcaaagtgaaggccccccgggcagctggcgatgcccgttctcttgatctctctcttctcgcgcgcgcactctctcttcaacactcccctgcgtaccccggttctagcaaacaccaattgattgactgagaatctgataaagcaacaaaagatttgtccc

SEQ ID NO: 11046 - DNA, 880 bp, Homo sapiens
ggacgcgcggcggagctggaactgctgcagctgctgccgccgccggaggaaccttgatccccgtgctccggacaccccgggcctcgccatggctgaccagctgactgaggagcagattgcagaatgctgataaatgtgtgtaagagcacaccagtgccccaatgacacgaagccccatggccctgagacaggcctttaccagacaccaaaggctgtgttcctctcctgggcctgggtcatctaggggcttgatatcagtggctgcaggacgagcccaactctctctcccagcttcagccaggttggcttagaagagttcaaggaggccttctccctctttgacaaggatggagatggcactatcaccaccaaggagttggggacagtgatgagatccctgggacagaaccccactgaagcagagctgcaggatatgatcaatgaggtggatgcagatgggaacgggaccattgacttcccggagttcctgaccatgatggccagaaagatgaaggacacagacagtgaggaggagatccgagaggcgttccgtgtctttgacaaggatgggaatggctacatcagcgccgcagagctgcgtcacgtaatgacgaacctgggggagaagctgaccgatgaggaggtggatgagatgatcagggaggctgacatcgatggagatggccaggtcaattatgaagagtttgtacagatgatgactgcaaagtgaaggccccccgggcagctggcgatgcccgttctcttgatctctctcttctcgcgcgcgcactctctcttcaacactcccctgcgtaccccggttctagcaaacaccaattgattgactgagaatctgataaagcaacaaaagatttgtccc

SEQ ID NO: 11047 - DNA, 2491 bp, Homo sapiens
agattctaggaagtgtctgtagccgcagctgcgggtccgggattcccagccatggcagattcctccgggcagcagggcaaaggccggcgtgtgcagccccagtggtcccctcctgctgggacccagccatgcagactccacctttacaacagcctcaccaggaacaaggaagtgttcatacctcaagatgggaaaaaggtgacgtggtattgctgtgggccaaccgtctatgacgcatctcacatggggcacgccaggtcctacatctcttttgatatcttgagaagagtgttgaaggattacttcaaatttgatgtcttttattgcatgaacattacggatattgatgacaagatcatcaagagggcccggcagaaccacctgttcgagcagtatcgggagaagaggcctgaagcggcacagctcttggaggatgttcaggccgccctgaagccattttcagtaaaattaaatgagaccacggatcccgataaaaagcagatgctcgaacggattcagcacgcagtgcagcttgccacagagccacttgagaaagctgtgcagtccagactcacgggagaggaagtcaacagctgtgtggaggtgttgctggaagaagccaaggatttgctctctgactggctggattctacacttggctgtgatgtcactgacaattccatcttctccaagctgcccaagttctgggagggggacttccacagagacatggaagctctgaatgttctccctccagatgtcttaacccgggttagtgagtatgtgccagaaattgtgaactttgtccagaagattgtggacaacggttacggctatgtctccaatgggtctgtctactttgatacagcgaagtttgcttctagcgagaagcactcctatgggaagctggtgcctgaggccgttggagatcagaaagcccttcaagaaggggaaggtgacctgagcatctctgcagaccgcctgagtgagaagcgctctcccaacgactttgccttatggaaggcctctaagcccggagaaccgtcctggccgtgcccttggggaaagggtcgtccgggctggcatatcgagtgctcggccatggcaggcaccctcctaggggcttcgatggacattcacggaggtgggttcgacctccggttcccccaccatgacaatgagctggcacagtcggaggcctactttgaaaacgactgctgggtcaggtacttcctgcacacaggccacctgaccattgcaggctgcaaaatgtcaaagtcactaaaaaacttcatcaccattaaagatgccttgaaaaagcactcagcacggcagttgcggctggccttcctcatgcactcgtggaaggacaccctggactactccagcaacaccatggagtcagcgcttcaatatgagaagttcttgaatgagtttttcttaaatgtgaaagatatccttcgcgctcctgttgacatcactggtcagtttgagaagtggggagaagaagaagcagaactgaataagaacttttatgacaagaagacagcaattcacaaagccctctgtgacaatgttgacacccgcaccgtcatggaagagatgcgggccttggtcagtcagtgcaacctctatatggcagcccggaaagccgtgaggaagaggcccaaccaggctctgctggagaacatcgccctgtacctcacccatatgctgaagatctttggggccgtagaagaggacagctccctgggattcccggtcggagggcctggaaccagcctcagtctcgaggccacagtcatgccctaccttcaggtgttatcagaattccgagaaggagtgcggaagattgcccgagagcaaaaagtccctgagattctgcagctcagcgatgccctgcgggacaacatcctgcccgagcttggggtgcggtttgaagaccacgaaggactgcccacagtggtgaaactggtagacagaaacaccttattaaaagagagagaagaaaagagacgggttgaagaggagaagaggaagaagaaagaggaggcggcccggaggaaacaggaacaagaagcagcaaagctggccaagatgaagattccccccagtgagatgttcttgtcagaaaccgacaaatactccaagtttgatgaaaatgtaagcatggtctgcccacacatgacatggagggcaaagagctcagcaaagggcaagccaagaagctgaagaagctcttcgaggctcaggagaagctctacaaggaatatctgcagatggcccagaatggaagcttccagtgagggggcacaggactgactttttaaaccattgtggactagtggctgctgtctgcctcagtgacaatgtcccagcgctcctatcatgtttacagtcacccttgggtcctaaattaagagttgtgttcatgtaggttcgtgtcgtcgttggctctgagacattgataataaatttttctcaacagtga

SEQ ID NO: 11048 - DNA, 2758 bp, Homo sapiens
ccggggcggcggttgcatcagattctaggaagtgtctgtagccgcagctgcgggtccgggattcccagccatggcagattcctccgggcagcaggctcctgactacaggtccattctgagcattagtgacgaggcagccagggcacaagccctgaacgagcacctcagcacgcgtagctatgtccaggggtactcactgtcccaggcagacgtggacgcgttcaggcagctctcggccccgcccgctgacccccagctcttccacgtggctcggtggttcaggcacatagaagcgctcctgggtagcccctgtggcaaaggccagccctgcaggctccaagcaagcaaaggccggcgtgtgcagccccagtggtcccctcctgctgggacccagccatgcagactccacctttacaacagcctcaccaggaacaaggaagtgttcatacctcaagatgggaaaaaggtgacgtggtattgctgtgggccaaccgtctatgacgcatctcacatggggcacgccaggtcctacatctcttttgatatcttgagaagagtgttgaaggattacttcaaatttgatgtcttttattgcatgaacattacggatattgatgacaagatcatcaagagggcccggcagaaccacctgttcgagcagtatcgggagaagaggcctgaagcggcacagctcttggaggatgttcaggccgccctgaagccattttcagtaaaattaaatgagaccacggatcccgataaaaagcagatgctcgaacggattcagcacgcagtgcagcttgccacagagccacttgagaaagctgtgcagtccagactcacgggagaggaagtcaacagctgtgtggaggtgttgctggaagaagccaaggatttgctctctgactggctggattctacacttggctgtgatgtcactgacaattccatcttctccaagctgcccaagttctgggagggggacttccacagagacatggaagctctgaatgttctccctccagatgtcttaacccgggttagtgagtatgtgccagaaattgtgaactttgtccagaagattgtggacaacggttacggctatgtctccaatgggtctgtctactttgatacagcgaagtttgcttctagcgagaagcactcctatgggaagctggtgcctgaggccgttggagatcagaaagcccttcaagaaggggaaggtgacctgagcatctctgcagaccgcctgagtgagaagcgctctcccaacgactttgccttatggaaggcctctaagcccggagaaccgtcctggccgtgcccttggggaaagggtcgtccgggctggcatatcgagtgctcggccatggcaggcaccctcctaggggcttcgatggacattcacggaggtgggttcgacctccggttcccccaccatgacaatgagctggcacagtcggaggcctactttgaaaacgactgctgggtcaggtacttcctgcacacaggccacctgaccattgcaggctgcaaaatgtcaaagtcactaaaaaacttcatcaccattaaagatgccttgaaaaagcactcagcacggcagttgcggctggccttcctcatgcactcgtggaaggacaccctggactactccagcaacaccatggagtcagcgcttcaatatgagaagttcttgaatgagtttttcttaaatgtgaaagatatccttcgcgctcctgttgacatcactggtcagtttgagaagtggggagaagaagaagcagaactgaataagaacttttatgacaagaagacagcaattcacaaagccctctgtgacaatgttgacacccgcaccgtcatggaagagatgcgggccttggtcagtcagtgcaacctctatatggcagcccggaaagccgtgaggaagaggcccaaccaggctctgctggagaacatcgccctgtacctcacccatatgctgaagatctttggggccgtagaagaggacagctccctgggattcccggtcggagggcctggaaccagcctcagtctcgaggccacagtcatgccctaccttcaggtgttatcagaattccgagaaggagtgcggaagattgcccgagagcaaaaagtccctgagattctgcagctcagcgatgccctgcgggacaacatcctgcccgagcttggggtgcggtttgaagaccacgaaggactgcccacagtggtgaaactggtagacagaaacaccttattaaaagagagagaagaaaagagacgggttgaagaggagaagaggaagaagaaagaggaggcggcccggaggaaacaggaacaagaagcagcaaagctggccaagatgaagattccccccagtgagatgttcttgtcagaaaccgacaaatactccaagtttgatgaaaatggtctgcccacacatgacatggagggcaaagagctcagcaaagggcaagccaagaagctgaagaagctcttcgaggctcaggagaagctctacaaggaatatctgcagatggcccagaatggaagcttccagtgagggggcacaggactgactttttaaaccattgtggactagtggctgctgtctgcctcagtgacaatgtcccagcgctcctatcatgtttacagtcacccttgggtcctaaattaagagttgtgttcatgtaggttcgtgtcgtcgttggctctgagacattgataataaatttttctcaacagtgagaccctc

SEQ ID NO: 11049 - DNA, 2685 bp, Homo sapiens
gactactcccagcacggccactgaacgcttggccgcgcgatgctccggagcgcgggtcgccattgggttgaactacagctcccagcatgctccgggccggcgacatccggagcccctggtagttgcctagcgaccgggcgtgtcccggaagacgggcccggcgtggggcgcgacttccggggcggcggttgcatcagattctaggaagtgtctgtagccgcagctgcgggtccgggattcccagccatggcagattcctccgggcagcagggcaaaggccggcgtgtgcagccccagtggtcccctcctgctgggacccagccatgcagactccacctttacaacagcctcaccaggaacaaggaagtgttcatacctcaagatgggaaaaaggtgacgtggtattgctgtgggccaaccgtctatgacgcatctcacatggggcacgccaggtcctacatctcttttgatatcttgagaagagtgttgaaggattacttcaaatttgatgtcttttattgcatgaacattacggatattgatgacaagatcatcaagagggcccggcagaaccacctgttcgagcagtatcgggagaagaggcctgaagcggcacagctcttggaggatgttcaggccgccctgaagccattttcagtaaaattaaatgagaccacggatcccgataaaaagcagatgctcgaacggattcagcacgcagtgcagcttgccacagagccacttgagaaagctgtgcagtccagactcacgggagaggaagtcaacagctgtgtggaggtgttgctggaagaagccaaggatttgctctctgactggctggattctacacttggctgtgatgtcactgacaattccatcttctccaagctgcccaagttctgggagggggacttccacagagacatggaagctctgaatgttctccctccagatgtcttaacccgggttagtgagtatgtgccagaaattgtgaactttgtccagaagattgtggacaacggttacggctatgtctccaatgggtctgtctactttgatacagcgaagtttgcttctagcgagaagcactcctatgggaagctggtgcctgaggccgttggagatcagaaagcccttcaagaaggggaaggtgacctgagcatctctgcagaccgcctgagtgagaagcgctctcccaacgactttgccttatggaaggcctctaagcccggagaaccgtcctggccgtgcccttggggaaagggtcgtccgggctggcatatcgagtgctcggccatggcaggcaccctcctaggggcttcgatggacattcacggaggtgggttcgacctccggttcccccaccatgacaatgagctggcacagtcggaggcctactttgaaaacgactgctgggtcaggtacttcctgcacacaggccacctgaccattgcaggctgcaaaatgtcaaagtcactaaaaaacttcatcaccattaaagatgccttgaaaaagcactcagcacggcagttgcggctggccttcctcatgcactcgtggaaggacaccctggactactccagcaacaccatggagtcagcgcttcaatatgagaagttcttgaatgagtttttcttaaatgtgaaagatatccttcgcgctcctgttgacatcactggtcagtttgagaagtggggagaagaagaagcagaactgaataagaacttttatgacaagaagacagcaattcacaaagccctctgtgacaatgttgacacccgcaccgtcatggaagagatgcgggccttggtcagtcagtgcaacctctatatggcagcccggaaagccgtgaggaagaggcccaaccaggctctgctggagaacatcgccctgtacctcacccatatgctgaagatctttggggccgtagaagaggacagctccctgggattcccggtcggagggcctggaaccagcctcagtctcgaggccacagtcatgccctaccttcaggtgttatcagaattccgagaaggagtgcggaagattgcccgagagcaaaaagtccctgagattctgcagctcagcgatgccctgcgggacaacatcctgcccgagcttggggtgcggtttgaagaccacgaaggactgcccacagtggtgaaactggtagacagaaacaccttattaaaagagagagaagaaaagagacgggttgaagaggagaagaggaagaagaaagaggaggcggcccggaggaaacaggaacaagaagcagcaaagctggccaagatgaagattccccccagtgagatgttcttgtcagaaaccgacaaatactccaagtttgatgaaaatggtctgcccacacatgacatggagggcaaagagctcagcaaagggcaagccaagaagctgaagaagctcttcgaggctcaggagaagctctacaaggaatatctgcagatggcccagaatggaagcttccagtgagggggcacaggactgactttttaaaccattgtggactagtggctgctgtctgcctcagtgacaatgtcccagcgctcctatcatgtttacagtcacccttgggtcctaaattaagagttgtgttcatgtaggttcgtgtcgtcgttggctctgagacattgataataaatttttctcaacagtgagaccctc

SEQ ID NO: 11050 - DNA, 28346 bp, Homo sapiens
gcggttgcatcagattctaggaagtgtctgtagccgcagctgcgggtccgggattcccagccatggcagattcctccgggcagcagggtgagcggcgcggccgggccaggctgagggcggctgggggcctgactgggcgctgggtgctcggctcgaagggcagcgagtccttatgtctgaggggcccgggtgcatgggttctgaggggcagctgtgtccgtggtctgaggggcggcagtgcccgaggtctgaggggtgtcagtgcgcggggtctgagggacggcacgtccttgggtccgaggggcgggggtgctcggggtctgaggggtgtcagtgcccggggtctgagggacggcgggtcctgaggttcgaggggtggcacgtcctaggatccgaaggacaacgggtgcccggctccgagggacggccactgggacccctgggactcctgcgtgagggtctgccagacccgtggctggagcacagaccccgcggggacccgagcccgagcggggcgctgcccagaccacccagcctcagtttcctcacttggttcctgccgaggtccccttgcatcctcaccccgggaggtggccctacatcaaacagcctttccccagccggtgcctgggcgggccctcgctccctcttgccccagctggcctttaggggggagacaaaggcccaagggttgttttggttttctgcccagacctggcagcttccgggaggtgggcggagggcacctgaggttggtatttagggaaatggggcagaggacgccaggggtacgcgtacacacagtaaaagggcttggggctttacgaaggctttcatctccagttccgcaggcagtccactgcaagctgattgtcagagcattactgccccattttattgccaacccgggaggttccccagggacacagctgtgtcagctcccccagtcactcatgtcaccagcgggtagaccttgagagaccagtgggttcttctctcactgtccctccagcaagattttaggtgctggaaaggcaagagactgaatcagaaagcccagattcctaacagtctggagcagcctttccaaaggaaacattctcagtatctagtttttaattcttttggctggcaaaaattagatgcaagttcttgtaagacacctccagcccccaccctcagtttagatcgtaccaagatttccttagcatctggtggtgccctttgcccctgagggtttattgggttatagataggtagttatgacaacccgagtaatctggcggcatggggacacccagatgacagggctacactcttgtgccaagtggcaggaggtggtcaccttccaggcacgccgcctaccaccctacctgtgtgcctggattccagcaccatctccacccgtcccagagccaagcggccctcagaagtcacccagattcctgtaaaacagcatcatagttaacagccccaactctggaaccaccctggaagggccagggttccaactctgcctcccgccccacagcaaaccatgcgtaatggctcctaccttggagcatggagtgtaaatgaattaatagatgggaaggacgtagaacagtgcctggcactcaattaagtgctgtgtctgtgctgaaagttagggcctgtttgttttcaaactaaaaatgtgtttttgttcatttgtgaacgtaaatgacgtattagtagtgttttgtatcttgtttttaaaaatagctttagaattttaggttttcagagccttgtaagaattgccttctttttggagcttgccatataggttgggattgccctctccgggctgtcagggcagcaggcagattgcccagtcctcagcctgcgcacagcatctccagccagtgttcttctgccccagggcatggcccacctgcctttactatcgcctcctcccatcacacacacactctcaaagatgagaacaggaaataaaatccaatcgtaggccaggcgcagtggctcacacctgtaatcccagcactttgggaggccgaggcaggcagatcacgaggtcaggagatcgagaccatggtgaaaccctgtctctactaaaaataaaaaaaaaattagccgggcgcggtggcgggcgcctgactactcggaggctgaggccggagaatgatgtgaacccaggaggcggagcttgcagtgagtcgagattgcgccactgcactccagcctgggcgacagagcgagactccgtctcaaaaaaaaaaaaatccaatcgtaaatgctttcagtgaccatcttcccagatttttcaaggaggccatcatttttgtaccatcttccctaagttgactcagaaggtctatttctctttcctgatctcactgggtgtacagcttttcctttgcggtcttgaaggtgcataggcttggtgcctgtccaagagcctgattatttcagaaggatgagtttcatttctgaggtttctggggtagatggagcctacctcagggcctttccgcacagacttgggataccacttggtcggctgctcatcaggtcagacttatagtttaatttttatacagtttaattcaagggtcttcataataacacagccagcattttttcagcatgagtctgtgccaggcactgctctaaatgctttgcatctgttatctcctgccacccttgggggaacccctttgaggaagatcctgccggcatcttgtacagatgagaatcctgaggttcagagaagtcaagcaatctgtccaccatcacgactagccagaggcacagccaggctcccaacctgggcagcctgactcaatagggaccttaactgctgtgctgtgctgcctttgatgattctcttcagactcacaatagctcaacccagtgagttaaggcagacgagaataaagctgatgcccttcgatgttttccccagagccacatgaaatgtttgctcctctatgaactcaggtaccatgtttccgggtatttgaagagccttaggcagtacccttggggtggagattaagccatttccagtgtgggtgctctgggtggcaatattgctgtctgatcaccccacaggctcattgtgagggatgttggatgcccctaataatgaataacctccctcccagtaaggaggaagatggagatgctgttcttgggggtgagagaggatgcctgggggccacctttgtgaacgagttgcagctggacctccggggctggtgatcaggacggggagtgggaggggaagccctcacctgtgggaggaggcgctggtctctgggagtgggcagtgttggctcctagttggtgagagcaggggtgcatgcccctctctcctccccacgattcatgtctgggggctttttccggtcccctttctgaacacttcttgggcagggagtggatcactgggaaggacccaagaggagcagctgtagagggtgggaccaggggaacatttgcagaaagggagtaacctgcagggtgagatgttgcctggacacccacaagatgaggaccctggtgggacctttgaagtagcagggtcagagggcaaagggtcagggtgagtgaggggtgcagacccccaccaaaccggggcacttattaggagctcagacctgctgtaaaggggtctgcattttagcaagctttccacccatggggaagctggtttaaacctcacttgctgggcccaccccagagattctgatttggcaggtctctggtgagcccaagaatgtgacttctctggatcccccaggttctgctgctgaaggcacaccagggccatgcctggagtggacctgggagagcctcaagggaacgcaggaagagaaacagggcagccgggagaggtttaaatgcttacaggaggccaggcatggtggctcacgtctgtaatcccagcactttgggaggccgaggtgggtggatcacctgaggtcaggagttctagaccagcctggccaatatgtagaaaccccgtctctactaaaaatacaaaaattagctgggcatggtggcgggcacctgtaatcccagctactcgggaggctgaggcaggagaatcgcttgaacccgggaggcagagtttgcagtgagccgagatcatgccactgcactccagcctgggtgacgagcgagactccgtctcaaaaaataaaataaaataaaataaaataaaaataaataaaaaataaatgctgataggaaagagccagagagagggagaggtcgcactgccacagttgtttgacgtgtcagggttgttgttcatttggtgtggctttgttttggtatctgtgctgagcaattgcttggtacttgcatgtgatttcaataaatgttctgtagagactccacctttgtagccggtgacaaccaccatccacctttgggacattcccatgtccctcaatgtgttgatgaactgaactgcaaggtcatccggtggtggacattccttctcatgggggcagagcaggagtttcggcacggagcgtgcaggctctacgatgagggccagtgtcgaggaacaggtccctgggaggttttcagtctgctcagaagtgttctcatctgatctcagcatcagactgatccacagcctggctcaaacccatgaccacttgaaagctgacctatttttatttgtttcctcgagacacacttaaatgcagctaccacgattacccaaatgactgtctgcgtccatctcatggaagcctgtcattctcctgtgcttccctgggcaccagcacctttctgctctgagaagatccttcccaagcatggtcttggttcccttttgatgagccgtctagcctgctctagacggtacatttaagaattatgtgatccaagatcaaggcagatttggtaataaacttttaaaataataaaattaattaaataaaaatgggtgtgtgagccctaggaaaactccaggaaattctctgtgtgtagcatgcggctattacaataacattaataataccagagcgattatgataataatgatggcaaatggggcccctggctctgtgccaggcagcttttaaacattttacaagtgtcatttgacttaatggcctgcagctttacagggctgatgttatgagcgtgttttaccgtgaggaaatgccgccgtgtgtgtgagtgtaggtactcagccctggagggcgtcggggccgcccctcaggtctccagagagcggatacacagcggcttcagttcccagactgcttcctcagcgctcaaaagccactgcagccgccgttaggacatttgatgtttttctcattttaaaaatagcagatgcttactgcagaaaatgtgagcaatgaagaaaaagagggaattaaaatcacctgtcaccccctctcatcaaccatcgtcactgtcagtgttcgggctgttgctggtggtctctccatcagaatccattctgagtgtgagaggcacgtgactgtcagctcgctgtctcagctggaagccgatgctgtgtcactgtttctcagggtgctgctgttgtctcttcttccctcttgctgtcgtggagtccaacccaggcatgagcagttgcagaagaccaaggctcagggaggggacaggggagaggaatgtggagggtcagcattggggaacagctttcgaactgtggcctgatctgtgaggggacaaggctcaccttccagctctgtccatccctctggcaagttctctaatctttagtgaacttcattttctttatcatgaaatgggacccctgctggcagctgcagagctgttggagggaaatatccagctaaactagaagtctcctggctggaagttgctctgcaaaagagtttgtaggagtctgatatttatttagagttagttttccaggacctcactttggggtgcttggagctgcctctgtgggtctgcctccgcctccgtcctccctgatctcatctccagctgggaggagagcgcatctccatgtaagcagcctccttcttctcagagggaagccccggcagtgtcagtgctgacactgggcctgtaactgtggggatggggcaggtgagaggccctcaagagctcccggcaccccccaggcgccttcagtggggccagagtccacccctgtctttctctttccttggactgttggaagagctgaagtgaaaagtgacttgttcttatgtctctggtatctttgggcagcagggctcctgctaagcaagcccctgggggctcaaagcagcagaggctgtggccggttcccagcactggtccttgtgcaggtgtctttctgagaagggtgcatgaggcccagtgccacaggggaacgccagcccaccactggtggcatgcactctgtggtgccattctgctgtccactcatctgtgccctaggcaactttagctgatatctggaatgtcacacgctcagttgtagatgctgaagatcgagcagtgaataaggtagatggagcggtggggcagatggtgaaggaaagaaatgcgggcacgtgttagacaggggtgctgcggagagaaagagcagccaggctcagggtctagaggcgggcgccatatggacagggagtccttgaagacctggtggggaagccggcacctagcagagctgtgaaggattaaggggcctgctggtatctggggagcatgccccctaaaaaaagagcagcaggtggaggggccatgtgactagggtattgtgagtcaggtgggggcccatggccagcatgaggacaggcttgtgctgctggcgaggtgggtgttgggggcagtaatgtgaacgtgcgcttttcagcagggccgctggaggcctgtggctgtgaggggagagccatgctggctacaggtggcggtgtctggcttgcaggaatccaggtgacaagggctggctctcaagtccaaagcttcttttgagttagaggccccggatcctcccgtgggttggctatgggtgctcctaaggataacttgtaaaggggtgtgattccagttttggctagggagtgtgcccagagctttgcttctgggtgcctgtggctgcttggagtgggtggccatcttattggggtcagatgggacagtggctccgtgcagtgggaaggaagcagggcaagttagagggacgctgcactcgtcatcccaccagcgagagtcatcccaggaagccattttaagccctgcatccatgttgagacttcaggaaggctctcccacagagtgcccacccctttactgcagagaagaggtggcttcaggacatcttctccggcagccacggaggctgggccttggggcatcacgtggctccgtaggctccctggcgggtgaagagctcggcccagtggggcattcttgctgctgcagctgtgcactccattctgactcatctttgctgacaccacagcgttccgggaagtgccagttattggcctgacacgaagggctttccccacactaagcaaagcagagaaaggcattcgtgtgcagttacccccgcaacacactctgctctctgttttcagaagctgtgtgggcttggttggggtgactctggctctgtgccaggagtaaacacggagatgggggacaaaagggaatgggagaaggcagagagggggactgtgatgtgcagggcatccacgccccatggctgtgatgtcgggcagcctgtgcccaggaagggcagctggcacagcaaggggtggccagacatgtgcattcctaccctgagtgaactctggggtgagagggtatctgtctggaaggagcaagcatcggtccttttcccacagtcctctcagcaaacacaatcactggttcaaggtttggatgcacctgtgctcatgggctcagggaccagactccctcctctggccagaagcctggcaccatctgcctggtctgcccccactttagggacgtgggctgtggacacagcacctggtccacaactcccgtgtcagaggtaattgcagggagatattccttagaatggtgagacagattttattccctaattcctgacagtaggggaaggagctgcgttccctgccagttcagcagaggtgacttttggatttaaagggagtatgattagctgggcctggtggcatgtgcctgtagtcccagctactcaggaggcttaggctggagggtcacttgagcccagcattttgaggctgtgatgagccttgattgcaccactgcactccagcctgggcagtagagtcagacgctgtctctaaaaaataaaaataaataaataaataaataaataaaaataaaaaagggagaatggaggaggagaaggagggtgagcaggggctcaaatgaaaaaagccatggagctggtcagcgtgcatgtgtcaaggcggccttgtctacagctggcagtggtgaaagttagggttctgctcctcctcccaatggtgacatgcggaacagtggctcttgggtccttgagtgacacacctgagtggtggaggtgcacgcttactgctttgaaggctctaaggagggaggctggggcctggggccaggggccaggggccaggtgaggctggctggagcagccacattttcctggcagccctgtgctttcttgggctggtcctttgagggggcccagtcctcctgaggctgtggccttgacctgcagaagccatgctagagtccagctgtctcttggtgcaggggtgtaaatggcacacattgtcaatgtggggttctcctacccctcatcccccagcacccagagggagagggtgccgctgcggcaaagaggcttgaagttggtttggtttgggggatttctgttgtgagtttttaaaaattgaggttaaattctcgtaacatacttagctgacaggagggataccatgatcatgtaggtagctttcccaaggcgaggcttatccgttatactccagatgtgctgacccctatgatttccccaaatgtcagaaactgaactgtgtaatttgtgatggtgtggaactgtgttcctgctttccctgatagaaaacataaattaaaaatgtaaaaactaagtaatttatatgacataaagtgaaaagtacacaattctgtggtatttggcgcatgatgttgtcatgcagccttcatttctgtctagttccaaagcattttcatcacccaagagggaacccatccatacctgtcaggcagtcactccctcgcccccagtcgaagcgctgcccctgtgcctttgcctgttctggatgtttggcgtccagggaagggcttgaacacctttttccttggttctgtgccatcccctagtccctgtctttctggcggcctctgggctgcccgcctgcctgcctgacaccatgtgccctctgtctttgcagctcctgactacaggtccattctgagcattagtgacgaggcagccagggcacaagccctgaacgagcacctcagcacgcgtagctatgtccaggggtactcactgtcccaggcagacgtggacgcgttcaggcagctctcggccccgcccgctgacccccagctcttccacgtggctcggtggttcaggcacatagaagcgctcctgggtagcccctgtggcaaaggccagccctgcaggctccaagcaagtgagtaacagagtgggttccctggccattagaacctctctcccaaggtcaagggctttctccatcaccctggtgcttacctggcgtctgcggataccccagagggagcctcgcccaagtgtgtctcgagcaagtggcctggatgggcagatgcagcgcttgctggatggaggttgggataaaatcacgccctatggagttggttattcaggagcagtatgttcacatcactggtgtggcaggattgcctgaggtggtggggtgcagagccgctgcggctctggggttccacgtagcatgcccaggccacgggccctagccttgtgatttttagctaaggctgtgcctggctctggttgactcagttctttctctttatttcttccataagattgtagcgtgtctatcctccagctttagaattgttgaatcctaaagtattaattggcattgaacttttttttttttttttttttgagatggagtctcgctctatcgcccaggctggagtgcagtggtgcgatctccactcactgcaagctccacctcccgggttcatgccattctcctgcctcagcctcccgagtagctgggactgtaggcgcccaccaccatgcctggctaattttttgtatttttagtagagacggggtttcaccgtgttagccaggatggtctcgatctcccgacctcgtgatccacccgcctcggcctcccaaagtgctgggattacaagtgtgaaccaccgcgcccggccggcattgaactttttaaaaatcagaaataagtcattttttctctttgagatgatgtctgtcccgtagctccagcctgttggtgctggttgtgtctgtggaacgtgcctgtggttatttgcgggagatactcctgggatgcctgcatggctttgtcactctgtggcaaatctgagggggctccatgccatcatcactgaagtatgcctttgggtggcccagctcctcctgtggctgtgggcactcctccaccttcatgtgggggcaggtttagtgctgttttctggtggtcctggctgtagctggcagccttctgggggcttctccagactccgttggggcctgggattgggaacatgcccccccgcctctgccgtgggtcaggcctctgctagatcactgttttaaccaggctggaggtggggatgtcacatctcctgtgggtcgtgttttctggataactctgcagcagacactccttccccagcgtagggcagaggccgttgctgtgcaggtcacgtccttccccatgtagccgttcctgcctgagcctccagcgcggtcacccaagtgacacctgtgctgtgaggtgccttctctccaagggctcgggtgtcaggttgttccccctgccatgtgccattccaagacacagccagaggggggcaggattagggagggtgaagcgggcctggtacgtccagctcagcagtggcctgtccaggcttccctcatagggacttgttgaaagagcggcacagacgcaagcctccatccacactgtgagaggaaggaagggttttgctcttgcaaacactttttaacctacagagaggaagcagagccacgttgctgtgtaacagaatggaccatggatagcactaatggagttgctgtgccctccccaggttccaaatcccctcatcacccaggctgcgcaagaggctgccagggtctgcttgtgccaggaatgatgggcattatgtcaggcgaccctcactcaagcttgctgtacactgagcaggggctgaagggggaggtgggagctggagtctgggactgctagagcatccagtgacctcgagtgggtccaaggcgccatggagtccagtgtagtgtcctcgcccatgtccctgggatgacagtagctgtggatctccctccatgtagctgtgacaatcagagctgcttcccccactgagtgggaacgccctctctttccatggctcatactccccaagcatgcaccttccttgctggcacagtgggccatgtgcccctcctcctgctcgcccttccacctctgttggacatcccagcagcatcagatgtgcctgtgtctggccctcagtgtgcccgcctgttaccagctcctcccatgtgccttctgtgtcctgtctccaagatcctctcagacatggaaagactctgcttggcccggcgcggtggctcactcctgtaatcccagcactttgggaggccaaggcgggcggatcacgaggtcaggagattgagaccatgctcgctaagtcggtgacaacctgtctctactaaaaatacaaaaaattagccgggcgtgatggcgggtgcctatagtcccagctactcgggaggctgaggcaggagaatggcctgaacctgggaggcggagcttgcagtgagccgagatcgtgccactgtactccagcctaggtgacagagcgagactccgtctcggggtggggggttggagataatggaaaggctctgcttaacccccaggtccctactcctgtgaagccagaccccttcctggtggatcccttccctggatcaccagcctccagcacggaggtccactggatatcaggacgttgaacttgttgagcacttctcacccgcagtggaggctcagcccttccagcccgccggcctctccctaccccccgggaaggagtgtcagctatacccttcactgaggagggtgtgggtctgtcagacgccgaggccatagtttcaggaacatgaaggtttggtgttgctctcacccctccgatggaggacccttaacttcctgatgaaggatttctctccatgaaccccttgcttgggtcctatctgcatctggtgtgttgtaggcagactgcttgccacttcctggcttccctctccatcattttatcttcagcctcccacatccctgtttcaaagccatgtctctcatgagcggttcatagttggtctgttgttggatcactcaggtcagggtgggactctggaatcaacgaatgtgtgttcattttttccaaagaaacaaaagcacaggccaggcgcggtggctcacacctgtaatcccagcactttaggaggccaaggcaggcagatcacaaggtcaggagtttgagaccagcctggccaatatggtgaaaccccatccctactaaagatacaaaaattggtggggcgtggtggcaggtgcctgtagtcctagctacttgggaggctgaggcaggataatcgcttgaactcaggaggcggaggttgcagtgagttgagattgcgccagtgcacttcagccagattttatctaaaaaaaaaaaaggggggcaagggtccttatgtgatatctctcagttcttcccttttgcaaatctgaatttgtatatctgggcctggtaacccgttttcctggggagcccatcgccagctgtgtggagatagcagccttaggggagcaggaatgctggctgtggccaggcttcttggacaagctttcagtcctgtgaaccctgggccgtttcctcatagcagggtgagtgtgatgatcccgtggcctcatggctgtgtttctgggcagcgtctccagctgtctgagatggcagcagtgtcctattgaaggagctccagggtctttgtgagggaggagagtgatgggatcctagagtggccggttgaatgcctccaggcattgagtgagattctccttcaagggcttgtgaggcatttaaagtacactgaggccgagctgcacttggcctcaataagcacatgatgtttgattaagattggagattgcctacgctttagaatctgaccacctgtgaccactggaactcacctagagtgggggctcctgctgagcactggccctctctccgtctcctgccccatctcccacctgcccacagtacccccactgcccagacacagtgcagccgccctccttcctccccttggcctgttagtcatcagcgtctgccgtcctggctcgtgtggcctgagctagagccgggaggccaagagatggctggtgcccaggaccaacttccccgtgatcagtgtgtggcaatttgctggccatgctgccagaccctctggcacagaaaccagggacaggaggaggcaggatgcgagcaccctggtgagctgccaggcggcctgctggggtgggcacaggtcagtgctaggagtatccatctcgtaggccttcctggtgccactcagcagagacatgtgaagcccttcccagggccaggcaccagctggggtcagaggtgcccagcagagcataacgcagaacctggacctgtgggcgacgactgtggagaaaagtggggatctgctgagggggcagggcaggcaggagccggctgagggcaacgggaaagtcaccaggtaccgtcctccacacctagctttgccagattgacgtttcagagggtgaataatcaccctgtggctgcccctggccccagggacagagctctgccccttcagggatctcagatgcaggttgtgtaaggacagccttgtgccaggttggaagccaggcctggaagcagtgtgctcagagcagcccaggcggcccacaggcgagtggaggggaacaactagggaagtctggccaggaggaggtgactgcactgaggggctggctggcaggggtctctgcctggaggctgagaggagctcaggttatttatgaaggcagtatagacctatgtggagcttgaagcccagtgtctggatcagagtctgctgggctgtgggcccagagctgggagccagccactcctgcagtgtccgaagtgatgaggaggggctgggctggagccagtcttgcctgctggccgtggccacagggggtcctttctgctctgactcctggcttctgctgccagggcttggaggcttggaggtggcctctgtcccaacaagagtcctcaaaatcctcagtttgtccaggtgagggatcctgggtgggggaggttcccagggctgcggcagaacagaccataccttgtcagtgtcaagccctgactgacccaggagtgccaggtggtggtgtgctcactgccagaaaggggccagtatttgaagagcagtggaatgtgctgggcacgctgtgcaggcattcctccgccctcctggggctctaagggtgttattggggtatgctgccatacagaatattagaaagcaaaagaaagacgcggttgtcgggaggcagagcttgcagtgagccgagatcacaccactgcactctggcctgggcgacagagcgagactccgtctaaaaaaaaaaaaagacgcagttgtctttgacctgcgtaatgttgaccgagattcgtgtggtttcacattgtttaaatttcatggaaaactatggtcccgttgtaaaaaccaagtctccaggtgaagaggcgacttgcacttcctggtgctgcccctggaccctgatcctgctctctctgcctcccaggcaaaggccggcgtgtgcagccccagtggtcccctcctgctgggacccagccatgcagactccacctttacaacagcctcaccaggaacaaggtaaggagaacacagatgccgtggcacacgcacacaatggggaggcaggaggcaggacagcccatgtgccttgtcgcacaacagacttctctgttccttgtgttgggatctggagttccataaatccaggtttaagatccttcagtcacttccatgttatagtctctgtggcccagaggcagagctgtcctctgaaacccagacacgtgaagtatcatgcctcatgtggaagcctgcccatgacttctgggcatggatcaccctggcttgtctctcggactctgcccaaccatgagtacttgaggtcatccacagccacgcctttcaggaggacgcgtggttgcagcaggtggcactgtatgagccaagcaggatggacaaaacggcaaactggctggatgttgttgggagcacagcaggttttgagaagaaggcaggattggttcctaacagaatggggtttgcatggtttgcttggctcagggcatggccagtgactccagtgatttcagaccaggctctgggcggggctgcttggatttccatcagggagcatgtttggcagacagagagtcaggtgtgagggagttcatggccttccttgggaaactggttgaggatgatgcccccagagaggtctgagggtgctgggatgttggggagtggtgccagagcagcaccacgattcaggggtcctggcctccaagccgcgctcccccaacagggactgaccctggccaagtgttgtctgcctcagtttcttcatccgtaaaaagaaaatgacataacctacgtcctagagtgtactgcatattgaatatttagctcagggcctggcacatggtaggtactcagtaaatattagctgtgttattgttaaataagcagcatttcaacaatcaataaaatcattgattccctttatcgcctccctccatagatgagtagaaccccagggaggaagaggccccacccacccagggctcagttggtgggaggtgccgtacatctcactgggctcccactgagactgtgacttttcacagtaaaacaaaatggtctctgttgaattgtttacactaaacacaaaccacactgtgatgtttgttgctgtttttggtaatcctgtgcagtgtttcttgcatttcttgtgatcgtcattccttcattcctaacaaaggaagtgttcatacctcaagatgggaaaaaggtgacgtggtattgctgtgggccaaccgtctatgacgcatctcacatggggcacgccaggtaggtccaccgcggggtgtccctgcagcttctgcagttgcacgcagaagtcagagccattgggatccacagcagcgatcttaggtccacaaagatcttagatctgctacagagacctgagatttgaggaatcaagactgaatttcttctcttatttttaagatgaaaattttaatgccataagtaatctatattcactgcagaaagactacagatcaccaaaaagaaaatgtccatagccccactgctaacatgctggactcgacctgggcactttttctcacataccttaaagttttctctcatccctcaagctctcgtggggtccccagatgctgagttcccgtgacactcagacctgacaggcctgacgctgggttggctgtgaccgccccccgaccactggatggtcatggctgtagctcctgacgagtagctggctgttggggtaaatgccacagagtccttttatgtgttcatgttttagttgcagtgccaaggtcatgtatagtcaacccttgaacaacctggagggtagagggtgtgaccctctgcacagttgaaaatccacacataacttttgattccccaaaaacttcaccactaaaatagcctcctgttgaccaatagcatgccagtcaatgaacacatattttgtatatacattacatactgtattcctaatgataaaggaagccagagaaaagaaaatattatgaagaaaatcataagggagaggcaatatatttactattcattaggtggaagtggatcattataaaggtcatcatccttgccatcttcacgttgagtagactgaggaggagaagggggggtcttgctgtttcagggatggcagagaaaatcatatataaatgcactcatgcagttcaaacacgtgttgttggaggttaagctatacatatcgtctggtgtggaaatgtttgttttttcattgctttaggtcctacatctcttttgatatcttgagaagagtgttgaaggattacttcaaatttgatgtcttttattgcatgaacattacggatattgatgacaaggtaaagggaatttgtaagattaaattttaaatgcaattggatggtgtaaaagaagatagaactttcgcataagtaaataatgtaggcttgagctagcttgtgttttcacctgataaacatcattttaatcccctcagtgagttaatattaccacttctgctactgatatgatcatttctatgatgttcagacacggttagaaacctgcatgttgctcaggggtcggtagccctgggtgttttgcagaaggaaggcctcccacagcacgcacttcgacatgtggcttgcaggggaagctggggcccccagggctcatttcattaagcgtcagaaagatcatgttaggccttgggcactacttggcaggtgggagatggagggtggtgtttctatttgatgatggtgtgcacgtccggggcccacagttgtctcccaccaccctcaccctcacttagagttggccaagggagagagtggcctgctgcagagggatgcatgtgggatccaagcatcactccccaatgtctgccttccctccccagatcatcaagagggcccggcagaaccacctgttcgagcagtatcgggagaagaggcctgaagcggcacagctcttggaggatgttcaggccgccctgaaggtgggcctcttgctgtctgctctagaaaccgagccctttgctttctgttctcggtcctttgtaggctactgtccctagggtagtgtcagtctcacaggctttcacaaagtgtatgttactcaagccagttccgtcaggggcgctgaagtctccataggtaaggtcccctggcctgtgacaaagtcaccagcaaagatgtactggagtggagtggagagtaggtgacattcctgccacttacaggaaaacaactgaattcatcacagtgccactaattacacttataaaaatgcttaccaatattgctgtctaattttcaatgccaaggttacaactaaatcagaaacttctgcccaagatacaaaagctatactaagctttttaatttggtaatactgtaaattttcagaatcttttgaagaaattagttctctctagtattttcattctgaataaccatcgttatatacttatttttattacaatagtaagaataggtcattttactctctactaattatccttagtaattacagtaatcattatggatatgcttatggcattttatctctggaattaaaaacaggaataaaattagagctgagcaatcttttaggtcagtgaggcctgagtaccttcctgatggatgtgtctgcagcacacctcagaacacactgggtggcctacttttcctcatccccagaacagccctagaaatactgctctcacacccaatttgcattggagaaactgaggcacagagaggttaggtgccctgtccagggtcacacgtgagagggcagaaccaggagctcctgagccgggagcttcagtctctcttagttccttactgcctggccacttgggttgcacacttctctatctctatggggccatgggaaaaaccgttctgttttctacctggaatcacctttatgaatttaggttttgctgagcagtatctaatagatttgacgtctctttatggttgcagccattttcagtaaaattaaatgagaccacggatcccgataaaaagcagatgctcgaacggattcagcacgcagtgcagcttgccacagagccacttgagaaagctgtgcagtccagactcacgggagaggaagtcaacagctgtgtggaggtgaggcttcacacatctcccagacagcccgttcgggtcaaatgtcgggccgtgcatagactgatctgtgtgcacggattgattccacagattgtcttagtggaagacactctgtgtctccagtagctccactgtggcaggcggccctgttctgcggtggctgagtcagtgcccctcccctcccacacccctttgccccatttcctgggtgcagagcctgtgccactggaaggagactcgggatccacaccctcccaccacttccatcagataggcaggaggtgcacttggaacgtggggaggcagccttctgtcgaagtgttccaagattctccagcggactctccccacaccagctggagaaggaggagcagggattaacattgaattgagcattgaggcctgtgggtacctactgagcttggggccttcacgttgaccagctctcctgcccctgccaatatctccttcagacacagggcagagacctgggtgcagaggggaccctgccctcttcctcaggcctttccctgtggctggcgccctggacacagtcaggaaggccttctcctttgtgccagcgccgcctgctggtcaccctttaagaactcgatggaaaagagaagagacggctgcagctgtgtgtagaaaaagaggccccactgaggccgcagccctgccttccctcaccactgccctggccccacctcagtgatggggcagggagtctgtgtctgcccttcgccagcatgtttctttctagtttggtctcttctgtgtcctgactcagcagatcgcttcgttgcgcctgtttccaaacttcacggaaacacgccacgtgtatgtagtcgtcagtgtgctttcacccaagctgtgcttctgggacgacccacatgtggtcactgtcactgcctcagtgcctgcctgggagccgagctgtttgtctgttctcctgggacgggcagttaggtttccttcttaccaacaatgctgctgtaatttttttcccagttgttccactaatattctttttttttttttaattgtggtaaaacacacatcataagaaatttaccatcttagccatttttaaaaactttttttttgtagagacagggtctttttgtgtctggtttattttgcccagcatagtgtgcccatggttgacccatgctgtagtgcatgtcagactctgcttccttcctatggctgaatgatactctgttgtgtatagatgggccacattttgctcatcctttcacctgcccgtggacacgtgggttgtttccaccttttggagatgcaagtaatgctgctataaacctgggtgtacaaatatctgtttgggttcctgctttcacttcttttggggatatacacggaagtggaattgctgggtcatgtgatgattctatttttgatattctgcgtaaccaccgtattgtttctgcagtggctgcactattacacattcccacccatagtgcatggggttctgttttctccacatccttgccaaagcttgttattcttcatttttttcatcccagtaggtgtgaggtggtatactgtggttttggtttgcatttccttaatggctagtgatgtggagtgtcttttgctgaactgtgagttgttttgtgttgtctctaggtggacatttgcaagtttctttaggccatatacctgcaagtggaatcgctgggttgtgtaggatatatgtgagtgactgtcgggggttcccaacactgcccacacattctggggccctagaaggactcatgagactcggcatcgagttatcatcttgtctaaggtttgtagcagtgacacagcgaggagcagaagctcaggcggagtcttcaatcatccatgggcaggctgctgaagcttcctccctgcctcccatgaggggacacagcacactctcccccaccaggaaaaaaatgcagccacatgtgtgaaatgtccctccctagggaagcccatcacataggcaccctctgcctggcacgtgccgcaattcctgactccccaggaggaaagctggtgttccacctgcataagccacagtgtttgttcaacagcccactgggggctgctgccacagagctgggtttcccggcctcttagcacaggggacatttcagctcctggatgccagctaatggccagctctgtaggcaggcctttctcaggtggcagacacagaccttctaggctcacttttatcttcatagtagccatatcagaaatgtctatatggccaggcacagtggctcacacttgtaatcccagcactttgggaagccagggcaagaggatcacttgagcccaggagctccagaccagcctaggcaaaatagtgagactctatttctacaaaacttttaaaaattagccaagcatggtgatgcaagcctgtggttccagctactggggaggctgaggtgagacaatcacctgagcccaggagtttgaggctgcagtgagccatgaacacaccactgcactccagcctgggcagcagagtgagacccagactcttaaaaaaaaagaaagaaatgtctatgcaaatttcttcttcttctaccacattttgggtgtgctgtgtatttgcacatacacctgcatttgtattgttggattcttccctttcatcagtcaatgaatgtgaagtgctgattgctgtggtttgaatgtccctttttccaacctctcctgagactgagcatcttgtcaagtgcttgcttccagctgtgattctgtgcccccatctctccccctttcccatgaggttattggtccttttcttactgttttgtatcattcttatgtcttctgatactaattactatgatttgaatgtttgtcccctccaaaactcatgctgaaacttaatccctagtgtaacagtattaagaggtaaggccttttagaggtgatcgagtcatgagagctctgccctcatgaatgggttaatggattaatgggttatcacagaagtggggtagttatcatgagagtggggctgttacagaagccagtttggccctcatgagccccctggccatgtgatgctctgcgccaccttgggactctgggaaaagtccccaccagcaagaaggcccagaacagatgtggccccttgaccttgaactttccagcctacagaattgtaagaaataaattttatttaaaaattacccattcccaggcagggcatcgtggctcatgcctgtaatcccagcactttgggaggctgaggtgggcagatcacgaggtcaggagatcgagaccatcctggccaacatggtgaaaccccgtctctactaaaaataaaaaaaaaaaaattagctgggtgttgtggcgtgtgcctgtaatcccagctacttgggaggctgaggtgggagaatcccttgaaccagggagtcagaggttgcagtgagccgagatcgtgctgttgcactgcagcctggcgacgaagcaagactccgtctcaaaaagaaaaaaaattttacccattcccggccaggcgcagtgggtcacgcctgtaatcctagcactttgggaggctgaggcgggcggatcacctgaggtcaggggtttgagaccagcctggccaacatggcaaaaccccgttgctactaaaaatacaaaaattagccaaatgtggtggcgcgcgtctgtaatcccagctactctggaggctgaggcaggagaatagcttgaaaccaggaggcggaggttgcagtgagccgagatcacgccactgcattccagcctgggaaacagagtgagactgtctcaaaaaaacaaaacaaaacaaaacaaaaaacagaaaacaaaaaaaagaacaaacaaacaaaaaaacagaaaacagactaagacacgaattcatctctgttacatgttggcatgtgtttgtgtctcttaattctgttctgttggtcaaattgtccagcccagaccaggtgcagtggctcgttcctgtaatcatagcaccttgggaggccaaggcaagaggatcccttgagcccaggagtttgagatcagccgggacaacatagtgagactctatctctacaaaaagtttaagaatttaaaatttaaaaaatttataaaaattgcccagtcctgcaggagtatcatgctgtctctcacaggtatctgatgggtaagaggccccatcttggttttgtcgttaggtgtgttttgaagcctcagcttgtcaagttccatgtaagacactgttgggattttacatgttgtatctaagaaccatctcagatccagtttggctgtgttgatcctctgtagtctttttgttttatcagtttttgtccattctttattccttcttttcttctttttcctttggatttattctgtttttctttgtctcatttagcagtttagcttattttctgatttaagaatttaaggctatacattttcctctgactgtttttgctgcaaaatttgacatcatttacttgtaaacaatttctaatttccattttggattttttagcccaggaattatctagaagtaattacctaaaagttaattatctagaattacttagaagttttaaatttccaaatttaaattggatggtactttttcatattaacttattgttattcgcttataacttaattacccagtggttggagagtatggtctgtcccaatctggatctgtgaacagagacttgtgttgtggcccctgtgtgtgctggtttctgaatgttctcttgtgcttgagaagattccgtctaatcccctagtgcacagttccacatgccatccacttagctatacctgttggccgtgtggttaatattttgtgtgtctttgctaattcttcctgttggcttagcctattcatacagtttcttaaaaaaacaaaaacaagaaccaaaacaaaactccccctctgatgatgaatttgtctgtttctccttattttttcactttttagaaaaaaaaaaagtttttttttagaggagattctggttcacatcagaattgagaggctatatatatcccctacccacctcaccgtcacctcccccagcatccgcacccaccagggggtacgtttcttacagtcagcgaacctgctctgagcgtcattaccctgagtccgtggtttactttagggttcactctcaggattgttacatcctatgggtttggacaaatactatctcgtatccaccattacggtatcacacagaatagtttcactgccctgaacatcctctgtgctccagctattatcccttcctccccaccccaactcctgacagcagctagtctttctactgtctccgtagttttgcctttcccagaatgtcacatacttggaatcctacagtgttgcagccatttcagatcggaaaaaatttttaaacagaatacttcacctctgatcaccaaaatgcatagggatttcttcctcacccagcccacctctgccccgacaaccagtcagttctctagcaggcatcagctgggagtcctaaaatttaattcatttccaacacagtttgccaggaggaagcgtcagatctgacaggttgaagggctcagtcccataagactgtccccaattcagatgccagttgaaagtagtagtttgttacctatacttctgacctaccagttattggccgggcgcggtggctcacgcctgaactcccagcactttgggaggccgagatgggcagatcatgaggtcaagagattgagaccatcccggccaacatggtgaaaccccgtctctactgacaatgcaaacattagctgggcgtggcgtcacgtgactgtaatcccttctactcgggaggctgaggcaggagaattgcttgaacccgggaggcggaggttgcagtgagctgagattgcactactgcactccagcctggtgacagagctagactccatcaaggaaggaaggaaggaaggaaggaaggaaggagggagggagggagggagggagggagggagggagggagggagggagggagggagggagggagggaaggaaggaaggagaaagaaaagaacagagtgcactggtatattttggaatgcttcctttcccttcttgctattggaaacacaaggggatttttctccaatattcactgtgaggcctggtcaggttcctagaggtaaaactcacaaaagtatggggtcccctatgactgggtccctggggttttcaactgtctgacttgcctacaccaagcctgcagcaatctctgttacagtcctggttttcctcccccaacactggttcccacagaattttcagcttatgagtctctgctctggtaagttgtgattgtctgtcttctcctgttggtctctccagtttagggggcagtggtttgccctatgacctaacttctcttatggatctaagaagagttggtttttcagtttattcagctttttacctgttgttaggtagagtggcaacttccaagctcctgacttatgtgaaactggaaagcagaagtctcttatcattttgtatttatgcattttgattgttgatctgtatgcttgaccagcaacattgagtattccagccctatcatcaggcaagttttagaaacattatcttagaagtattggtgggaagcagcttttgtctatcttgaagtgtgtatatttccctgtttgttcaaggtggttgccgtcttctggcttccattgttggctgttgttgaaaacatcggctgcccttcaaattacttttctttgattggtaaatatgtcttttctatcaggcgcattataaaagtattctctcttttcagttttctgctatttcacaaagacattgtaagagatttgtttttacttatcctattggatattttgtgtgcttcccggggctggattgttgcatgggttttgagaaattctcagatgtgtcttcaagtatcacctttactcgattccctctctcctctcctctgggttgccaattagatgtgagtctcatcatttcatctcatccttctccgtgtctcctaacctgtctttcataaaattttccttcttgtctctgtttcattttggatgacttcttcagttctgtcttcctgttcacaaattctccttcagacaggaagtgaaacagtcactcagtaggatggataagactgtttcgcctgttaatagatttcatctctgcaggttccgtttgcttctattttcagatccagctgggccgctttgctggcctgtccctgcttgctattgcctgtcatctgggagtccgtccttatgtctttaagcctgtaatatttactggattttattatgtatctgataactcctccatctgaagcgtccatctgtttgtcgtttctgctgactcccattcacagttgctcatgttcttgggtgtttggtgacctcgattaggatgtcggttcttgctgggtcgtgaccttggtgatcctgagggccaggatgcgcgtttccctgtacttggggcaggcccagtgtttgcttttcgggcagcagacttggcagcctttgctccccagagcgcacaccctgcttttggtgcttgtctgcccactggatgccctgccgcggtggggagggtgtgctcattcctgcagacgtgccttgccacttgcaggcctgcaatacatttaacacatctgtttgattcaggagctgtaggcagggattgcatcaggaacctggcccacgtgggccctgtgccccttctctgtctgtgttgtggctttgtccaccctgtgtccttgctgtctgccaggccattttcctacactttttctctccagccttggttctttgcctccccttcccatagtaggccacagaccatctgcttggtgtcacgccctgtcctgggtccacgtcagtgcattgagactctaggtccctccaagatggcggagggtagacatttctcttttctgacatgagtgcagttggggcgtgtctcatgcctagagtgtgtgtggtcaggacctggttcacataggtgccatgttttgctgggattggtggtttttactcccattccatggtgtgtcaagtggggatggcatcttcagtcaatggcgtcagggagatggggcttttgagacctctgggaccagtgccctgcctatctctcctaacctctggctgtgtccgtcatgaatcttttcctgaatgcaccaaggggttgtgctgtaggtgacacactgtgtgctcctgcccagcctctgcccataaccctgccctgcacggcccaggtaggctgcacatgctcaccaggcccacctcggccctcccacctctttttgcctctgcacccacagtccccttggctttgctcctctgagttcatgtgagacctgcccatttgtagagtcttgtatttgtccctgccgagccagttgtgtaagcatcacagtctccctaggagacggtggctcttcacaggtcaaggtcagcacctttgaattcagggcactgatgggctcacaccagctgcacgagatgttctcatgtgaagtgtgtggcccgctgctggatttttgtttctttctcttcaggtgttgctggaagaagccaaggatttgctctctgactggctggattctacacttggctgtgatgtcactgacaattccatcttctccaagctgcccaagttctgggagggggacttccacagagacatggaagctctgaatgtaagtgtcacgattgtcttgtgctggctctcttgcgctaagggccctgatttctaaattcctgttttggcaaggccagctcaattaagcggccaagtcaacattgaacttgagttgaggggcataatgggcttttcgttttatgaattgggaacgtttttatggagcgcgtggttttcagaagggaaaatcccaggacattctcatgtcttgcacagg

SEQ ID NO: 11051 - DNA, 1021 bp, Homo sapiens
gcggttgcatcagattctaggaagtgtctgtagccgcagctgcgggtccgggattcccagccatggcagattcctccgggcagcagggcaaaggccggcgtgtgcagccccagtggtcccctcctgctgggacccagccatgcagactccacctttacaacagcctcaccaggaacaagtgtttcttgcatttcttgtgatcgtcattccttcattcctaacaaaggaagtgttcatacctcaagatgggaaaaaggtgacgtggtattgctgtgggccaaccgtctatgacgcatctcacatggggcacgccaggtcctacatctcttttgatatcttgagaagagtgttgaaggattacttcaaatttgatgtcttttattgcatgaacattacggatattgatgacaagatcatcaagagggcccggcagaaccacctgttcgagcagtatcgggagaagaggcctgaagcggcacagctcttggaggatgttcaggccgccctgaagccattttcagtaaaattaaatgagaccacggatcccgataaaaagcagatgctcgaacggattcagcacgcagtgcagcttgccacagagccacttgagaaagctgtgcagtccagactcacgggagaggaagtcaacagctgtgtggaggtgttgctggaagaagccaaggatttgctctctgactggctggattctacacttggctgtgatgtcactgacaattccatcttctccaagctgcccaagttctgggagggggacttccacagagacatggaagctctgaatgtaagtgtcacgattgtcttgtgctggctctcttgcgctaagggccctgatttctaaattcctgttttggcaaggccagctcaattaagcggccaagtcaacattgaacttgagttgaggggcataatgggcttttcgttttatgaattgggaacgtttttatggagcgcgtggttttcagaagggaaaatcccaggacattctcatgtcttgcacagg

SEQ ID NO: 11052 - DNA, 1958 bp, Homo sapiens
ttgagtagactgaggaggagaagggggggtcttgctgtttcagggatggcagagaaaatcatatataaatgcactcatgcagttcaaacacgtgttgttggaggttaagctatacatatcgtctggtgtggaaatgtttgttttttcattgctttaggtcctacatctcttttgatatcttgagaagagtgttgaaggattacttcaaatttgatgtcttttattgcatgaacattacggatattgatgacaaggtaaagggaatttgtaagattaaattttaaatgcaattggatggtgtaaaagaagatagaactttcgcataagtaaataatgtaggcttgagctagcttgtgttttcacctgataaacatcattttaatcccctcagtgagttaatattaccacttctgctactgatatgatcatttctatgatgttcagacacggttagaaacctgcatgttgctcaggggtcggtagccctgggtgttttgcagaaggaaggcctcccacagcacgcacttcgacatgtggcttgcaggggaagctggggcccccagggctcatttcattaagcgtcagaaagatcatgttaggccttgggcactacttggcaggtgggagatggagggtggtgtttctatttgatgatggtgtgcacgtccggggcccacagttgtctcccaccaccctcaccctcacttagagttggccaagggagagagtggcctgctgcagagggatgcatgtgggatccaagcatcactccccaatgtctgccttccctccccagatcatcaagagggcccggcagaaccacctgttcgagcagtatcgggagaagaggcctgaagcggcacagctcttggaggatgttcaggccgccctgaaggtgggcctcttgctgtctgctctagaaaccgagccctttgctttctgttctcggtcctttgtaggctactgtccctagggtagtgtcagtctcacaggctttcacaaagtgtatgttactcaagccagttccgtcaggggcgctgaagtctccataggtaaggtcccctggcctgtgacaaagtcaccagcaaagatgtactggagtggagtggagagtaggtgacattcctgccacttacaggaaaacaactgaattcatcacagtgccactaattacacttataaaaatgcttaccaatattgctgtctaattttcaatgccaaggttacaactaaatcagaaacttctgcccaagatacaaaagctatactaagctttttaatttggtaatactgtaaattttcagaatcttttgaagaaattagttctctctagtattttcattctgaataaccatcgttatatacttatttttattacaatagtaagaataggtcattttactctctactaattatccttagtaattacagtaatcattatggatatgcttatggcattttatctctggaattaaaaacaggaataaaattagagctgagcaatcttttaggtcagtgaggcctgagtaccttcctgatggatgtgtctgcagcacacctcagaacacactgggtggcctacttttcctcatccccagaacagccctagaaatactgctctcacacccaatttgcattggagaaactgaggcacagagaggttaggtgccctgtccagggtcacacgtgagagggcagaaccaggagctcctgagccgggagcttcagtctctcttagttccttactgcctggccacttgggttgcacacttctctatctctatggggccatgggaaaaaccgttctgttttctacctggaatcacctttatgaatttaggttttgctgagcagtatctaatagatttgacgtctctttatggttgcagccattttcagtaaaattaaatgagaccacggatcccgataaaaagcagatgctcgaacggattcagcac

SEQ ID NO: 11053 - DNA, 422 bp, Homo sapiens
ttgagtagactgaggaggagaagggggggtcttgctgtttcagggatggcagagaaaatcatatataaatgcactcatgcagttcaaacacgtgttgttggaggttaagctatacatatcgtctggtgtggaaatgtttgttttttcattgctttaggtcctacatctcttttgatatcttgagaagagtgttgaaggattacttcaaatttgatgtcttttattgcatgaacattacggatattgatgacaagatcatcaagagggcccggcagaaccacctgttcgagcagtatcgggagaagaggcctgaagcggcacagctcttggaggatgttcaggccgccctgaagccattttcagtaaaattaaatgagaccacggatcccgataaaaagcagatgctcgaacggattcagcac

SEQ ID NO: 11054 - DNA, 9868 bp, Homo sapiens
gttagtgagtatgtgccagaaattgtgaactttgtccagaagattgtggacaacggttacgggtaagcacaagggccttccctagggagggaagggctgcagaacatcgcacagggaggagctccccagctctgagcctgagtttgggaagcagaggagcaggtgttctggggctgcgtagctagaagtcccagcagacttcctcctacaactctgggcccacccaggggctgaggagcatgggtctgcactgtcctgggggccatggtgagaacctaacccagaatctgctgggaagctcggcagccaagaccatcagtcatggggccccagagctgcataatggtgagtgcgaatactgctgggccttcacagacatcagtgccattgcgtagacattttgagagtgctagtcctggtgtcatatcccgaaggaggatgcatttcatcagcatctatcgcttggctatgattttagtgactttttgttggcaaatccatcatacacttccctggcccgtattgtctcaatctccaaagtaagcattttcagaaatggccaacaaatggaaatgcagacaggaacccggttatctgtctgtagtgtgtagggaccagccccacagggtcggtgggtttttctccccatgtgtggagatgagagattgtagaaataaagacacaagacaaagagataaaagagaagacagctgggcccgggggaccactaccaccaagacgcggagaccggtagtggccccgaatgccaggctgcactgatatttattggatacaagacaaaggggtaggttaaggagagtgagccatcttcaatgataggtaaggccacgtgggtcacgtgtccactggacagggggcccttccctgcctggcagccaaggcagagagagagaggagacagagagaggcagcttacgccattatttctgcatatcagagacttttagtactttcactaatttgctactgctatctagaaggtagagccaggtgtacaggatggaacatgaaggaggactaggagcgtgaccgctgaagcacagcatcacagggagacggttaggcctccggataactgcgggcgagcctgactcatgtcaggccctccacaagaggtggaggagcagagtcttctccagactcccgcggggcaagggagactccctttcccggtctgctaagtagcgggtgtttttccttgacacttacgctaccgctagaccacagtccgcttggcaacgggcatcctcccagacgctggcgttaccactagaccaaggaacccttctggtggccgtgtccgggcataacaggaggttcacactcttgtcttctggtcactcctcactatgtcccctcagctgctatctctgtatggcctggtttttcctagattatgattatagagcgaggattattataatattggaataaagagtaattgctacaaactaatgattaatgatattcatatataatcatatctaagatctatatctggtataactattcttattttatattttattatactggaacagctcgtgccctcggtctcttgcctcggcacctgggtggcttgccgcccacagtagtgctcagcactgtaccgtgcgcctgctcccagagacccactgtgtccagcctcagattgcttccctcccacaggaaccacacaggctggatgaaagagaaacaagaggttgtgacagtgccaggaacggggcagactcttaagcagtagcgctgcttctctccccacttcacacaaactactgtggggcagcataagagcctgtgccaagccgagaggcatgggcaagccgaagctcagagaggacaggtcattccagactggagtaatctagagtgcttcttggaggccaagagcctcagctaagctaatgggtagagtgtggacattcagggaaaggtgaggccacacaagaatgaggacggcagcagccctgagcaaggcagggtgggagctgcatgggtcacaggacgccaggcagagggacgagctgcccagggcaggcaggctgcctccgcagcgggatgggccctggtgtcccactcagtccaaacagctgatacggttttcagtggccaccacagagagtagataggccacagatttcgcacttttatagccctgctttattttgttactgtcatcctgctgacacactttcgggtctgttagatgcacccacccaattccttttctgttttccagctatgtctccaatgggtctgtctactttgatacagcgaagtttgcttctagcgagaagcactcctatgggaagctggtgcctgaggccgttggagatcagaaagcccttcaagaaggggaaggtgaggagggcatgcctgagagcatgtgggctctccctcctggcccagcctgggttgtgttgactttgcaggccacgggggctgcgctgagcccacccctcagactcttgggaacagtgctttttcacctgaaggaattttaggagttttctgcactcaacattgtgcagctctaagaccatgacatgtgtttttttaatggatatataataattatgcaatttatggggaacatgtgatgtcttaatacatgcacaccgtgtgtgatgatcggggtagttaggatgctcgtcaccttagacgtttaccttttctttgcattgggaatgttccagatcttctggctatgttgaaatatacaacaaatgttttggtaactatagtcaccctactgtgctagtgaccacaagaacctattctttctgtctgtgtgtttgtgcctagaaaccaacctctctccactcactgcccctgacctgactcttctcagcttctggtgaccactgttctatgctgcacctccttgaggtccaccgttttttagctcccacataagagagaggacatgtgatatttgtctttctctgcctggtttatttcacttaacagaatgtcttccagttccatccatgttgctgtaaaagacaagatgtcatttttttatggtgtgttattttttaagaaacaaaagacagtaaacgcagtgctgtcttgagaaacatagtggcccctggggcctggattcacagggctggtgtttgctggctgagcatgtgaggtttagggggattgtggggtgctgggatgtgtgccgagtgatgcatatttgacaacagcctgtgcgcccatctggatccaaatgcttcaaacacagatatcagactttttctagaccaggcagaattatattgggaaccctttcgttggtgttttcttcatgtttatcccttaagtgaatctggggacacatccacaagaggcaaggttggaagcctccctgcagagtggggattcccgcaatgtgccagggcacgttctgcacccccaccccgcctgtcctagtgtttctggaagacaatttggccataaaaatgttcatacttttatctaattttaggctctattctaaagaaatatcagaacctaaaataaaggtgcggtggctcacgcctataatcccagcacttttggaggccgaggtgggtggatcacctgaggttgggagttcgagaccagcctggccaacatggcgaaaccccatctctactaaaaatacacaaattagccaggtgtggtggtgcttgcctgtaatcccagctactcaggaggctgaggcatgagaatcacttgaacccaggaggcagaggttatagtgagccaagattgtgccactgcactccagcctgggtgacagaatgagactctgtctcaaaaaaatatataataaaataaaaccagacaacacagactgaagaaagatagagatagccaggttgacacataaatatcagacccatggcatttcaggctccgggtttgtgggagtagaggggcgggtttgtgatgatgaagcgcctcagctctgagaggatgcagcctgggcctctggaccagaaggcttcactaccctagaaccagagtggacatgcccacgtttcatgcacttcccaggagttgacagatcaagtaggccaagaattaatacggatatgaaaggtttgaaatacagttaacaggcttggtttgagagctgggaactttgcactcaggaattaaagaacatcctttccttccaagaacacagaaacatatgccaggccacagaaagatttccacaaatctcaaagaaccgttttcaaggaaccctcattctgtcaaggagccctcattctgtcaccatggagcgattgtattagataacaacacttggccagacatggcgacccacacctgtaatcccagcactttgggaggccgaggcaggaggatcgcttgagcccaggagttccagaccaacctgggcaacatagggagaccccctttctacaaaaaatttaaaaatgagctgggtgtggtggcacgtgcctatagtcccagctacttaagaggctgatgcaggaggatcacttcagcccaagaagtcaaggctgcagtgagccctgattgtgccattgcactccagcctgggcaacagagcaagactctgtctcaaagacattaaaaaaattttttttttaaaataaaaaagataccaacactgacaggacggacgtctaaaatgtacaaacttgtctggggggttgaaatcatgctcctggataactcctaggaaagaaaaccacagtgggaaatcaggggtgtttaagcagaacagcagcaaaggtgccacacaccaaatctggagaatgcccctaaagcaccaattagaggaaactgatgtttttaaatgtagttattaaaaaacaaagatggaaaataagtgaggtgccgggtgcagtggctcacgcctgtaatcccagcactttgggaggccaaggcaggcggatcacgaggtcaggagttcgagaccagcctggccaatgtggtgaaaccccatctctactaaaaatacaaaaattagccgggtgtggtggcgcatgcctgtagtcccagctactcgggaggctgaggcagaagaatcgcttgaaccctggaggcggaggttgcagtgagctgagagcgtgccactgcactccaacctgggtgacagagcaagagtccatctcaaacaaaaaaaaaggaaataagtgagctaagcagtcagtcaaaaagctgggaaaggaacaagaagaagtagaaagaaataggaggaaataaagtaaaatcagagattaaagaaacagaaacaattgtaaaagccaaaagctgattcttctcaaaaaataatatagaagaacccttagcaagtttgattaataaaagtagaagattgaaaaacatattagggctgaattatagctcatgcctataattcagcactttgggaggccgaggcaggaggatcgcttgaggccaggaattcaagaccatcgtgggcaatgtagtgagaccgcatctctacaaaaattttaaaaattagctgagtgtggtagcatgcacctgtagtcccagttactcagaaggctgaggtaagagggttgcttgagccagggaggtcgaggctgtagtgagctgtgattacaccgttgcactccagcctggctgacagcaagatcctgtgtgtgtgtttgaatgtatgtatgtatgtatgtatgtttgaataacaagacaaaaatggaatgtaactatggatatagtagagcatttcttaaagtccttagaggaagccgtgaacaactcgcactgcatttgacacttagatgccgggagggaactggcagcacatgggaaaggtgggagtggtaagtggagcagtgccctcaggtcacgtggtgaaggaatgttctggaggcagctagagcacactgactcaccactttatgatgaattttgctatctggccccatctagggtctttttcttaaataccatttattcttgggcccattttcttccagaatgacttcagcattggtttaagttccaggaaacaggagtagaatctaacagccaatatgcaggaccaaagagggacatggatttccacccctccacagtcagtgatcagacgtgggcacatgaccacccccgcaacctccccccaccatggggagtcataaggagtgtagccttagctctgtgcagtcatgtgctcctcgccatggggactctaatggtagaggaaaaggggaggggtgatgctggggcccaagtggtcctagatgatgacagctcctcactccgccaagtaagatgacccaccagaggcagatgggccatgcagaccactcgggaaggcacgtggcaggaaggcctagtgcagggaggaagctcccccagtgggagagaacaggaccctgttgtgctggtatgaacatgcttgtagggtcaaagctagaaacactcactctgcctctggggagagagacaggaaatgaaaccaagaaggaaaacttgaaagacattgtgttgtaaccataataggtctgttgcccaatgcacagcgagtcagtataccgggataccaggggttgccgtagaagaagcgtagtaattgtatggtggacaaatggagatgggaggaaacctcagatccgcctccctgagatttggggaggggtttttaattgctctggacaggtgatggggattgccggttgctggggaagtgaggggcgaagtcatgggacagggaggtaaaccacatttctgcgacgagtcagttccttggtgcaggtcttcagaccagttggcaacagctgtcctgctggaattcaggatccaaaaaataccttaagcagttcttggtaaaaaggtccagggttagagattctatcgctaggaacagtggtggagcaggtggtcagcgtgctatgtgactctcagttagagctgcagggaagcggatggacgtgcactgcacctggccagtgaccggcctcatcattctgcctatagcctgccttggaattctcattaaccctatgagggcagttgcagtgtgatgtttgctgaaggatagggtgtttgtggggagggtcctgtgttctctgttatcaattttttcaaagcgtatttttaaaaaatcagatataaactttcatgagtaagttcataataatgaaaagttgaaaacgtgaatgtatattttctatcaaagagcatctaaaagcgaatgtcatgggccatatcacattgtgcttttgcggaattgtcagtggcagaacagtgcggaggtagaaggaagccaggacagcggccttccgtgttggtggatagatctggattttgcttgcagaggttttttgtgtttttgtgtgtttgttttttaatctgggaatcagtataccaaaatggtaacagtagtaattcctaggttaaaagataatggcaatttttttcctagttttctttttttatctttcaaatattctacatttagtacatattttataatcatgaacttggtgtttagaaaaatatatttagcggtgcttttcctctggactctgtttctcagggcagcttaggtctgttgcctgattaggctcctgaaaagtggatttgtcacctggaaagatctcactgcagcttcttcagggtcacctgagttagaaccctagatggagtctgttcttcctccacaagggggtgacagcacctaaggcagcccttagaccagggaccaggaaaggctgcagcagccgggcaagacctggcgtgggtcctggtaaccttatgcctagagtgaagacctctgctctgcccattcatcgaacaaagggtgattctctgcgtgacctttggactggctcacaggtttctttattcacagcagctaatcttttccattggtcctgcatgtattgttgagagaaatctgcagtgatggtgcattccttttctggggactcagaccgccttgtaccctgagtgtcaggtggctgagtgtcaccgagtcaatgcatggaattcaccaaggggttatttctcatccctctggcaaggcatagacagtcttgtttttgttggccaggtgatcattggctttgtccaggaaatagaacttgtgccaagagcagtactccccttttcttatggccttcctggactattctttagtttccttcacctattttccccttataaatacacaggaacagcaaatgtccccttcaccactgcactgccaccaggttccctgcagtagtacacagcagcttagctgcatccttgtatcccccgggacccataagcagatagttgtgcgggcccttgacatattgaccccacccgcatgaaccaggcaggatccctgagccatgccccagtggctgcaccactatgtcacctcctagctttagcccagggttcttatcacttgtcctagacactggtgggctaatgctgtgagaaggcagcaggaaggtgaatgtcttacggagaccccagatgtggcctcaagtcagccaggtatataagctggtgactttggggattatgtaccgttttgtaaatctagacactgggtcaacaccagaatctggtaatacatagttaacttgaagaaatgcttgagccaagttaataaacagaagttagtcagaaggactgcccattaggcaccgtggatggccttgaagtgagacatgtgggtctgtgggtgctgctgagtgaccttgcctggcgtccctcgtgtttgcaggtgacctgagcatctctgcagaccgcctgagtgagaagcgctctcccaacgactttgccttatggaaggcctctaagcccggagaaccgtcctggccgtgcccttggggaaaggtgagcgagtggcctagaaggtgtggggcttggacaggggcactggcgccagccacactctcaggcccccagcagagggccgctctgtgtgtgaaggatgttgtcactgggccagagcctggtgctggtgcagcacaggctgcctggccccggggacctggacatcatggagactccctgagtctctggacaaatcacttccctcctgggatttctgttttctggtctgtaagtggagatgtgatcagagtagacgtccatggaggcttcttggttcttgtgttctgtgactctgagtattccaggccccagggtgtaggatgcgttctgatcttcccggtgacaggagttgttgactgcagggtaccctaggaaggggcgtgaccatctgcagctgtcaagggctcagaggtctggatgtaattcagtaacttcacctaaacctcggcccacataggaccggtttatgaacttcaccaaagaaggctatccttagtcttttttttttttttgagacagagtgtcactctgtcaccaggctggagtgcagtggcgcgatctcagctcactgcaacctctgcctcctagtcccggttcaagcaattctcctgcctcagcctcctgagtagctgggattacaggcatacgtcaccatgctcagctaatttttgtatttttttgtatttttagtagagacggggtttcaccatgttggccaggctggtcttgaactcctgacctggtgatccgtctgcctcggcatcgcaaagtgctgggattacaggtgtgagccatctcgcccagccttcccttagtcttttcatgtgcgggatttaacgcttgttccaataaagttcagaggatgtaagggccatcaacttggagtgataagtgataaaggcctggacaagcgggtaggctggtcagtcactgtgtgttcggctttctccagggtcgtccgggctggcatatcgagtgctcggccatggcaggcaccctcctaggggcttcgatggacattcacggaggt

SEQ ID NO: 11055 - DNA, 658 bp, Homo sapiens
gttagtgagtatgtgccagaaattgtgaactttgtccagaagattgtggacaacggttacgggtaagcacaagggccttccctagggagggaagggctgcagaacatcgcacagggaggagctccccagctctgagcctgagtttgggaagcagaggagcaggtgttctggggctgcgtagctagaagtcccagcagacttcctcctacaactctgggcccacccaggggctgaggagcatgggtctgcactgtcctgggggccatggtgagaacctaacccagaatctgctgggaagctcggcagccaagaccatcagtcatggggccccagagctgcataatgctatgtctccaatgggtctgtctactttgatacagcgaagtttgcttctagcgagaagcactcctatgggaagctggtgcctgaggccgttggagatcagaaagcccttcaagaaggggaaggtgacctgagcatctctgcagaccgcctgagtgagaagcgctctcccaacgactttgccttatggaaggcctctaagcccggagaaccgtcctggccgtgcccttggggaaagggtcgtccgggctggcatatcgagtgctcggccatggcaggcaccctcctaggggcttcgatggacattcacggaggt

SEQ ID NO: 11056 - DNA, 16914 bp, Homo sapiens
ccggggcggcggttgcatcagattctaggaagtgtctgtagccgcagctgcgggtccgggattcccagccatggcagattcctccgggcagcagggtgagcggcgcggccgggccaggctgagggcggctgggggcctgactgggcgctgggtgctcggctcgaagggcagcgagtccttatgtctgaggggcccgggtgcatgggttctgaggggcagctgtgtccgtggtctgaggggcggcagtgcccgaggtctgaggggtgtcagtgcgcggggtctgagggacggcacgtccttgggtccgaggggcgggggtgctcggggtctgaggggtgtcagtgcccggggtctgagggacggcgggtcctgaggttcgaggggtggcacgtcctaggatccgaaggacaacgggtgcccggctccgagggacggccactgggacccctgggactcctgcgtgagggtctgccagacccgtggctggagcacagaccccgcggggacccgagcccgagcggggcgctgcccagaccacccagcctcagtttcctcacttggttcctgccgaggtccccttgcatcctcaccccgggaggtggccctacatcaaacagcctttccccagccggtgcctgggcgggccctcgctccctcttgccccagctggcctttaggggggagacaaaggcccaagggttgttttggttttctgcccagacctggcagcttccgggaggtgggcggagggcacctgaggttggtatttagggaaatggggcagaggacgccaggggtacgcgtacacacagtaaaagggcttggggctttacgaaggctttcatctccagttccgcaggcagtccactgcaagctgattgtcagagcattactgccccattttattgccaacccgggaggttccccagggacacagctgtgtcagctcccccagtcactcatgtcaccagcgggtagaccttgagagaccagtgggttcttctctcactgtccctccagcaagattttaggtgctggaaaggcaagagactgaatcagaaagcccagattcctaacagtctggagcagcctttccaaaggaaacattctcagtatctagtttttaattcttttggctggcaaaaattagatgcaagttcttgtaagacacctccagcccccaccctcagtttagatcgtaccaagatttccttagcatctggtggtgccctttgcccctgagggtttattgggttatagataggtagttatgacaacccgagtaatctggcggcatggggacacccagatgacagggctacactcttgtgccaagtggcaggaggtggtcaccttccaggcacgccgcctaccaccctacctgtgtgcctggattccagcaccatctccacccgtcccagagccaagcggccctcagaagtcacccagattcctgtaaaacagcatcatagttaacagccccaactctggaaccaccctggaagggccagggttccaactctgcctcccgccccacagcaaaccatgcgtaatggctcctaccttggagcatggagtgtaaatgaattaatagatgggaaggacgtagaacagtgcctggcactcaattaagtgctgtgtctgtgctgaaagttagggcctgtttgttttcaaactaaaaatgtgtttttgttcatttgtgaacgtaaatgacgtattagtagtgttttgtatcttgtttttaaaaatagctttagaattttaggttttcagagccttgtaagaattgccttctttttggagcttgccatataggttgggattgccctctccgggctgtcagggcagcaggcagattgcccagtcctcagcctgcgcacagcatctccagccagtgttcttctgccccagggcatggcccacctgcctttactatcgcctcctcccatcacacacacactctcaaagatgagaacaggaaataaaatccaatcgtaggccaggcgcagtggctcacacctgtaatcccagcactttgggaggccgaggcaggcagatcacgaggtcaggagatcgagaccatggtgaaaccctgtctctactaaaaataaaaaaaaaattagccgggcgcggtggcgggcgcctgactactcggaggctgaggccggagaatgatgtgaacccaggaggcggagcttgcagtgagtcgagattgcgccactgcactccagcctgggcgacagagcgagactccgtctcaaaaaaaaaaaaatccaatcgtaaatgctttcagtgaccatcttcccagatttttcaaggaggccatcatttttgtaccatcttccctaagttgactcagaaggtctatttctctttcctgatctcactgggtgtacagcttttcctttgcggtcttgaaggtgcataggcttggtgcctgtccaagagcctgattatttcagaaggatgagtttcatttctgaggtttctggggtagatggagcctacctcagggcctttccgcacagacttgggataccacttggtcggctgctcatcaggtcagacttatagtttaatttttatacagtttaattcaagggtcttcataataacacagccagcattttttcagcatgagtctgtgccaggcactgctctaaatgctttgcatctgttatctcctgccacccttgggggaacccctttgaggaagatcctgccggcatcttgtacagatgagaatcctgaggttcagagaagtcaagcaatctgtccaccatcacgactagccagaggcacagccaggctcccaacctgggcagcctgactcaatagggaccttaactgctgtgctgtgctgcctttgatgattctcttcagactcacaatagctcaacccagtgagttaaggcagacgagaataaagctgatgcccttcgatgttttccccagagccacatgaaatgtttgctcctctatgaactcaggtaccatgtttccgggtatttgaagagccttaggcagtacccttggggtggagattaagccatttccagtgtgggtgctctgggtggcaatattgctgtctgatcaccccacaggctcattgtgagggatgttggatgcccctaataatgaataacctccctcccagtaaggaggaagatggagatgctgttcttgggggtgagagaggatgcctgggggccacctttgtgaacgagttgcagctggacctccggggctggtgatcaggacggggagtgggaggggaagccctcacctgtgggaggaggcgctggtctctgggagtgggcagtgttggctcctagttggtgagagcaggggtgcatgcccctctctcctccccacgattcatgtctgggggctttttccggtcccctttctgaacacttcttgggcagggagtggatcactgggaaggacccaagaggagcagctgtagagggtgggaccaggggaacatttgcagaaagggagtaacctgcagggtgagatgttgcctggacacccacaagatgaggaccctggtgggacctttgaagtagcagggtcagagggcaaagggtcagggtgagtgaggggtgcagacccccaccaaaccggggcacttattaggagctcagacctgctgtaaaggggtctgcattttagcaagctttccacccatggggaagctggtttaaacctcacttgctgggcccaccccagagattctgatttggcaggtctctggtgagcccaagaatgtgacttctctggatcccccaggttctgctgctgaaggcacaccagggccatgcctggagtggacctgggagagcctcaagggaacgcaggaagagaaacagggcagccgggagaggtttaaatgcttacaggaggccaggcatggtggctcacgtctgtaatcccagcactttgggaggccgaggtgggtggatcacctgaggtcaggagttctagaccagcctggccaatatgtagaaaccccgtctctactaaaaatacaaaaattagctgggcatggtggcgggcacctgtaatcccagctactcgggaggctgaggcaggagaatcgcttgaacccgggaggcagagtttgcagtgagccgagatcatgccactgcactccagcctgggtgacgagcgagactccgtctcaaaaaataaaataaaataaaataaaataaaaataaataaaaaataaatgctgataggaaagagccagagagagggagaggtcgcactgccacagttgtttgacgtgtcagggttgttgttcatttggtgtggctttgttttggtatctgtgctgagcaattgcttggtacttgcatgtgatttcaataaatgttctgtagagactccacctttgtagccggtgacaaccaccatccacctttgggacattcccatgtccctcaatgtgttgatgaactgaactgcaaggtcatccggtggtggacattccttctcatgggggcagagcaggagtttcggcacggagcgtgcaggctctacgatgagggccagtgtcgaggaacaggtccctgggaggttttcagtctgctcagaagtgttctcatctgatctcagcatcagactgatccacagcctggctcaaacccatgaccacttgaaagctgacctatttttatttgtttcctcgagacacacttaaatgcagctaccacgattacccaaatgactgtctgcgtccatctcatggaagcctgtcattctcctgtgcttccctgggcaccagcacctttctgctctgagaagatccttcccaagcatggtcttggttcccttttgatgagccgtctagcctgctctagacggtacatttaagaattatgtgatccaagatcaaggcagatttggtaataaacttttaaaataataaaattaattaaataaaaatgggtgtgtgagccctaggaaaactccaggaaattctctgtgtgtagcatgcggctattacaataacattaataataccagagcgattatgataataatgatggcaaatggggcccctggctctgtgccaggcagcttttaaacattttacaagtgtcatttgacttaatggcctgcagctttacagggctgatgttatgagcgtgttttaccgtgaggaaatgccgccgtgtgtgtgagtgtaggtactcagccctggagggcgtcggggccgcccctcaggtctccagagagcggatacacagcggcttcagttcccagactgcttcctcagcgctcaaaagccactgcagccgccgttaggacatttgatgtttttctcattttaaaaatagcagatgcttactgcagaaaatgtgagcaatgaagaaaaagagggaattaaaatcacctgtcaccccctctcatcaaccatcgtcactgtcagtgttcgggctgttgctggtggtctctccatcagaatccattctgagtgtgagaggcacgtgactgtcagctcgctgtctcagctggaagccgatgctgtgtcactgtttctcagggtgctgctgttgtctcttcttccctcttgctgtcgtggagtccaacccaggcatgagcagttgcagaagaccaaggctcagggaggggacaggggagaggaatgtggagggtcagcattggggaacagctttcgaactgtggcctgatctgtgaggggacaaggctcaccttccagctctgtccatccctctggcaagttctctaatctttagtgaacttcattttctttatcatgaaatgggacccctgctggcagctgcagagctgttggagggaaatatccagctaaactagaagtctcctggctggaagttgctctgcaaaagagtttgtaggagtctgatatttatttagagttagttttccaggacctcactttggggtgcttggagctgcctctgtgggtctgcctccgcctccgtcctccctgatctcatctccagctgggaggagagcgcatctccatgtaagcagcctccttcttctcagagggaagccccggcagtgtcagtgctgacactgggcctgtaactgtggggatggggcaggtgagaggccctcaagagctcccggcaccccccaggcgccttcagtggggccagagtccacccctgtctttctctttccttggactgttggaagagctgaagtgaaaagtgacttgttcttatgtctctggtatctttgggcagcagggctcctgctaagcaagcccctgggggctcaaagcagcagaggctgtggccggttcccagcactggtccttgtgcaggtgtctttctgagaagggtgcatgaggcccagtgccacaggggaacgccagcccaccactggtggcatgcactctgtggtgccattctgctgtccactcatctgtgccctaggcaactttagctgatatctggaatgtcacacgctcagttgtagatgctgaagatcgagcagtgaataaggtagatggagcggtggggcagatggtgaaggaaagaaatgcgggcacgtgttagacaggggtgctgcggagagaaagagcagccaggctcagggtctagaggcgggcgccatatggacagggagtccttgaagacctggtggggaagccggcacctagcagagctgtgaaggattaaggggcctgctggtatctggggagcatgccccctaaaaaaagagcagcaggtggaggggccatgtgactagggtattgtgagtcaggtgggggcccatggccagcatgaggacaggcttgtgctgctggcgaggtgggtgttgggggcagtaatgtgaacgtgcgcttttcagcagggccgctggaggcctgtggctgtgaggggagagccatgctggctacaggtggcggtgtctggcttgcaggaatccaggtgacaagggctggctctcaagtccaaagcttcttttgagttagaggccccggatcctcccgtgggttggctatgggtgctcctaaggataacttgtaaaggggtgtgattccagttttggctagggagtgtgcccagagctttgcttctgggtgcctgtggctgcttggagtgggtggccatcttattggggtcagatgggacagtggctccgtgcagtgggaaggaagcagggcaagttagagggacgctgcactcgtcatcccaccagcgagagtcatcccaggaagccattttaagccctgcatccatgttgagacttcaggaaggctctcccacagagtgcccacccctttactgcagagaagaggtggcttcaggacatcttctccggcagccacggaggctgggccttggggcatcacgtggctccgtaggctccctggcgggtgaagagctcggcccagtggggcattcttgctgctgcagctgtgcactccattctgactcatctttgctgacaccacagcgttccgggaagtgccagttattggcctgacacgaagggctttccccacactaagcaaagcagagaaaggcattcgtgtgcagttacccccgcaacacactctgctctctgttttcagaagctgtgtgggcttggttggggtgactctggctctgtgccaggagtaaacacggagatgggggacaaaagggaatgggagaaggcagagagggggactgtgatgtgcagggcatccacgccccatggctgtgatgtcgggcagcctgtgcccaggaagggcagctggcacagcaaggggtggccagacatgtgcattcctaccctgagtgaactctggggtgagagggtatctgtctggaaggagcaagcatcggtccttttcccacagtcctctcagcaaacacaatcactggttcaaggtttggatgcacctgtgctcatgggctcagggaccagactccctcctctggccagaagcctggcaccatctgcctggtctgcccccactttagggacgtgggctgtggacacagcacctggtccacaactcccgtgtcagaggtaattgcagggagatattccttagaatggtgagacagattttattccctaattcctgacagtaggggaaggagctgcgttccctgccagttcagcagaggtgacttttggatttaaagggagtatgattagctgggcctggtggcatgtgcctgtagtcccagctactcaggaggcttaggctggagggtcacttgagcccagcattttgaggctgtgatgagccttgattgcaccactgcactccagcctgggcagtagagtcagacgctgtctctaaaaaataaaaataaataaataaataaataaataaaaataaaaaagggagaatggaggaggagaaggagggtgagcaggggctcaaatgaaaaaagccatggagctggtcagcgtgcatgtgtcaaggcggccttgtctacagctggcagtggtgaaagttagggttctgctcctcctcccaatggtgacatgcggaacagtggctcttgggtccttgagtgacacacctgagtggtggaggtgcacgcttactgctttgaaggctctaaggagggaggctggggcctggggccaggggccaggggccaggtgaggctggctggagcagccacattttcctggcagccctgtgctttcttgggctggtcctttgagggggcccagtcctcctgaggctgtggccttgacctgcagaagccatgctagagtccagctgtctcttggtgcaggggtgtaaatggcacacattgtcaatgtggggttctcctacccctcatcccccagcacccagagggagagggtgccgctgcggcaaagaggcttgaagttggtttggtttgggggatttctgttgtgagtttttaaaaattgaggttaaattctcgtaacatacttagctgacaggagggataccatgatcatgtaggtagctttcccaaggcgaggcttatccgttatactccagatgtgctgacccctatgatttccccaaatgtcagaaactgaactgtgtaatttgtgatggtgtggaactgtgttcctgctttccctgatagaaaacataaattaaaaatgtaaaaactaagtaatttatatgacataaagtgaaaagtacacaattctgtggtatttggcgcatgatgttgtcatgcagccttcatttctgtctagttccaaagcattttcatcacccaagagggaacccatccatacctgtcaggcagtcactccctcgcccccagtcgaagcgctgcccctgtgcctttgcctgttctggatgtttggcgtccagggaagggcttgaacacctttttccttggttctgtgccatcccctagtccctgtctttctggcggcctctgggctgcccgcctgcctgcctgacaccatgtgccctctgtctttgcagctcctgactacaggtccattctgagcattagtgacgaggcagccagggcacaagccctgaacgagcacctcagcacgcgtagctatgtccaggggtactcactgtcccaggcagacgtggacgcgttcaggcagctctcggccccgcccgctgacccccagctcttccacgtggctcggtggttcaggcacatagaagcgctcctgggtagcccctgtggcaaaggccagccctgcaggctccaagcaagtgagtaacagagtgggttccctggccattagaacctctctcccaaggtcaagggctttctccatcaccctggtgcttacctggcgtctgcggataccccagagggagcctcgcccaagtgtgtctcgagcaagtggcctggatgggcagatgcagcgcttgctggatggaggttgggataaaatcacgccctatggagttggttattcaggagcagtatgttcacatcactggtgtggcaggattgcctgaggtggtggggtgcagagccgctgcggctctggggttccacgtagcatgcccaggccacgggccctagccttgtgatttttagctaaggctgtgcctggctctggttgactcagttctttctctttatttcttccataagattgtagcgtgtctatcctccagctttagaattgttgaatcctaaagtattaattggcattgaacttttttttttttttttttttgagatggagtctcgctctatcgcccaggctggagtgcagtggtgcgatctccactcactgcaagctccacctcccgggttcatgccattctcctgcctcagcctcccgagtagctgggactgtaggcgcccaccaccatgcctggctaattttttgtatttttagtagagacggggtttcaccgtgttagccaggatggtctcgatctcccgacctcgtgatccacccgcctcggcctcccaaagtgctgggattacaagtgtgaaccaccgcgcccggccggcattgaactttttaaaaatcagaaataagtcattttttctctttgagatgatgtctgtcccgtagctccagcctgttggtgctggttgtgtctgtggaacgtgcctgtggttatttgcgggagatactcctgggatgcctgcatggctttgtcactctgtggcaaatctgagggggctccatgccatcatcactgaagtatgcctttgggtggcccagctcctcctgtggctgtgggcactcctccaccttcatgtgggggcaggtttagtgctgttttctggtggtcctggctgtagctggcagccttctgggggcttctccagactccgttggggcctgggattgggaacatgcccccccgcctctgccgtgggtcaggcctctgctagatcactgttttaaccaggctggaggtggggatgtcacatctcctgtgggtcgtgttttctggataactctgcagcagacactccttccccagcgtagggcagaggccgttgctgtgcaggtcacgtccttccccatgtagccgttcctgcctgagcctccagcgcggtcacccaagtgacacctgtgctgtgaggtgccttctctccaagggctcgggtgtcaggttgttccccctgccatgtgccattccaagacacagccagaggggggcaggattagggagggtgaagcgggcctggtacgtccagctcagcagtggcctgtccaggcttccctcatagggacttgttgaaagagcggcacagacgcaagcctccatccacactgtgagaggaaggaagggttttgctcttgcaaacactttttaacctacagagaggaagcagagccacgttgctgtgtaacagaatggaccatggatagcactaatggagttgctgtgccctccccaggttccaaatcccctcatcacccaggctgcgcaagaggctgccagggtctgcttgtgccaggaatgatgggcattatgtcaggcgaccctcactcaagcttgctgtacactgagcaggggctgaagggggaggtgggagctggagtctgggactgctagagcatccagtgacctcgagtgggtccaaggcgccatggagtccagtgtagtgtcctcgcccatgtccctgggatgacagtagctgtggatctccctccatgtagctgtgacaatcagagctgcttcccccactgagtgggaacgccctctctttccatggctcatactccccaagcatgcaccttccttgctggcacagtgggccatgtgcccctcctcctgctcgcccttccacctctgttggacatcccagcagcatcagatgtgcctgtgtctggccctcagtgtgcccgcctgttaccagctcctcccatgtgccttctgtgtcctgtctccaagatcctctcagacatggaaagactctgcttggcccggcgcggtggctcactcctgtaatcccagcactttgggaggccaaggcgggcggatcacgaggtcaggagattgagaccatgctcgctaagtcggtgacaacctgtctctactaaaaatacaaaaaattagccgggcgtgatggcgggtgcctatagtcccagctactcgggaggctgaggcaggagaatggcctgaacctgggaggcggagcttgcagtgagccgagatcgtgccactgtactccagcctaggtgacagagcgagactccgtctcggggtggggggttggagataatggaaaggctctgcttaacccccaggtccctactcctgtgaagccagaccccttcctggtggatcccttccctggatcaccagcctccagcacggaggtccactggatatcaggacgttgaacttgttgagcacttctcacccgcagtggaggctcagcccttccagcccgccggcctctccctaccccccgggaaggagtgtcagctatacccttcactgaggagggtgtgggtctgtcagacgccgaggccatagtttcaggaacatgaaggtttggtgttgctctcacccctccgatggaggacccttaacttcctgatgaaggatttctctccatgaaccccttgcttgggtcctatctgcatctggtgtgttgtaggcagactgcttgccacttcctggcttccctctccatcattttatcttcagcctcccacatccctgtttcaaagccatgtctctcatgagcggttcatagttggtctgttgttggatcactcaggtcagggtgggactctggaatcaacgaatgtgtgttcattttttccaaagaaacaaaagcacaggccaggcgcggtggctcacacctgtaatcccagcactttaggaggccaaggcaggcagatcacaaggtcaggagtttgagaccagcctggccaatatggtgaaaccccatccctactaaagatacaaaaattggtggggcgtggtggcaggtgcctgtagtcctagctacttgggaggctgaggcaggataatcgcttgaactcaggaggcggaggttgcagtgagttgagattgcgccagtgcacttcagccagattttatctaaaaaaaaaaaaggggggcaagggtccttatgtgatatctctcagttcttcccttttgcaaatctgaatttgtatatctgggcctggtaacccgttttcctggggagcccatcgccagctgtgtggagatagcagccttaggggagcaggaatgctggctgtggccaggcttcttggacaagctttcagtcctgtgaaccctgggccgtttcctcatagcagggtgagtgtgatgatcccgtggcctcatggctgtgtttctgggcagcgtctccagctgtctgagatggcagcagtgtcctattgaaggagctccagggtctttgtgagggaggagagtgatgggatcctagagtggccggttgaatgcctccaggcattgagtgagattctccttcaagggcttgtgaggcatttaaagtacactgaggccgagctgcacttggcctcaataagcacatgatgtttgattaagattggagattgcctacgctttagaatctgaccacctgtgaccactggaactcacctagagtgggggctcctgctgagcactggccctctctccgtctcctgccccatctcccacctgcccacagtacccccactgcccagacacagtgcagccgccctccttcctccccttggcctgttagtcatcagcgtctgccgtcctggctcgtgtggcctgagctagagccgggaggccaagagatggctggtgcccaggaccaacttccccgtgatcagtgtgtggcaatttgctggccatgctgccagaccctctggcacagaaaccagggacaggaggaggcaggatgcgagcaccctggtgagctgccaggcggcctgctggggtgggcacaggtcagtgctaggagtatccatctcgtaggccttcctggtgccactcagcagagacatgtgaagcccttcccagggccaggcaccagctggggtcagaggtgcccagcagagcataacgcagaacctggacctgtgggcgacgactgtggagaaaagtggggatctgctgagggggcagggcaggcaggagccggctgagggcaacgggaaagtcaccaggtaccgtcctccacacctagctttgccagattgacgtttcagagggtgaataatcaccctgtggctgcccctggccccagggacagagctctgccccttcagggatctcagatgcaggttgtgtaaggacagccttgtgccaggttggaagccaggcctggaagcagtgtgctcagagcagcccaggcggcccacaggcgagtggaggggaacaactagggaagtctggccaggaggaggtgactgcactgaggggctggctggcaggggtctctgcctggaggctgagaggagctcaggttatttatgaaggcagtatagacctatgtggagcttgaagcccagtgtctggatcagagtctgctgggctgtgggcccagagctgggagccagccactcctgcagtgtccgaagtgatgaggaggggctgggctggagccagtcttgcctgctggccgtggccacagggggtcctttctgctctgactcctggcttctgctgccagggcttggaggcttggaggtggcctctgtcccaacaagagtcctcaaaatcctcagtttgtccaggtgagggatcctgggtgggggaggttcccagggctgcggcagaacagaccataccttgtcagtgtcaagccctgactgacccaggagtgccaggtggtggtgtgctcactgccagaaaggggccagtatttgaagagcagtggaatgtgctgggcacgctgtgcaggcattcctccgccctcctggggctctaagggtgttattggggtatgctgccatacagaatattagaaagcaaaagaaagacgcggttgtcgggaggcagagcttgcagtgagccgagatcacaccactgcactctggcctgggcgacagagcgagactccgtctaaaaaaaaaaaaagacgcagttgtctttgacctgcgtaatgttgaccgagattcgtgtggtttcacattgtttaaatttcatggaaaactatggtcccgttgtaaaaaccaagtctccaggtgaagaggcgacttgcacttcctggtgctgcccctggaccctgatcctgctctctctgcctcccaggcaaaggccggcgtgtgcagccccagtggtcccctcctgctgggacccagccatgcagactccacctttacaacagcctcaccaggaacaaggtaaggagaacacagatgccgtggcacacgcacacaatggggaggcaggaggcaggacagcccatgtgccttgtcgcacaacagacttctctgttccttgtgttgggatctggagttccataaatccaggtttaagatccttcagtcacttccatgttatagtctctgtggcccagaggcagagctgtcctctgaaacccagacacgtgaagtatcatgcctcatgtggaagcctgcccatgacttctgggcatggatcaccctggcttgtctctcggactctgcccaaccatgagtacttgaggtcatccacagccacgcctttcaggaggacgcgtggttgcagcaggtggcactgtatgagccaagcaggatggacaaaacggcaaactggctggatgttgttgggagcacagcaggttttgagaagaaggcaggattggttcctaacagaatggggtttgcatggtttgcttggctcagggcatggccagtgactccagtgatttcagaccaggctctgggcggggctgcttggatttccatcagggagcatgtttggcagacagagagtcaggtgtgagggagttcatggccttccttgggaaactggttgaggatgatgcccccagagaggtctgagggtgctgggatgttggggagtggtgccagagcagcaccacgattcaggggtcctggcctccaagccgcgctcccccaacagggactgaccctggccaagtgttgtctgcctcagtttcttcatccgtaaaaagaaaatgacataacctacgtcctagagtgtactgcatattgaatatttagctcagggcctggcacatggtaggtactcagtaaatattagctgtgttattgttaaataagcagcatttcaacaatcaataaaatcattgattccctttatcgcctccctccatagatgagtagaaccccagggaggaagaggccccacccacccagggctcagttggtgggaggtgccgtacatctcactgggctcccactgagactgtgacttttcacagtaaaacaaaatggtctctgttgaattgtttacactaaacacaaaccacactgtgatgtttgttgctgtttttggtaatcctgtgcagtgtttcttgcatttcttgtgatcgtcattccttcattcctaacaaaggaagtgttcatacctcaagatgggaaaaaggtgacgtggtattgctgtgggccaaccgtctatgacgcatctcacatggggcacgccaggtaggtccaccgcggggtgtccctgcagcttctgcagttgcacgcagaagtcagagccattgggatccacagcagcgatcttaggtccacaaagatcttagatctgctacagagacctgagatttgaggaatcaagactgaatttcttctcttatttttaagatgaaaattttaatgccataagtaatctatattcactgcagaaagactacagatcaccaaaaagaaaatgtccatagccccactgctaacatgctggactcgacctgggcactttttctcacataccttaaagttttctctcatccctcaagctctcgtggggtccccagatgctgagttcccgtgacactcagacctgacaggcctgac

SEQ ID NO: 11057 - DNA, 583 bp, Homo sapiens
ccggggcggcggttgcatcagattctaggaagtgtctgtagccgcagctgcgggtccgggattcccagccatggcagattcctccgggcagcaggctcctgactacaggtccattctgagcattagtgacgaggcagccagggcacaagccctgaacgagcacctcagcacgcgtagctatgtccaggggtactcactgtcccaggcagacgtggacgcgttcaggcagctctcggccccgcccgctgacccccagctcttccacgtggctcggtggttcaggcacatagaagcgctcctgggtagcccctgtggcaaaggccagccctgcaggctccaagcaagcaaaggccggcgtgtgcagccccagtggtcccctcctgctgggacccagccatgcagactccacctttacaacagcctcaccaggaacaaggaagtgttcatacctcaagatgggaaaaaggtgacgtggtattgctgtgggccaaccgtctatgacgcatctcacatggggcacgccagctctcgtggggtccccagatgctgagttcccgtgacactcagacctgacaggcctgac

SEQ ID NO: 11058 - DNA, 7968 bp, Homo sapiens
caggtgctggcttgccttccttctaatgagggtgctatccaggggtggctttcaaagagtgaagggcaggcacctacctcagctcatgccccagtcagctgctcctcaggtggctgaggagggcctgttcccaggaatgatactgcagacaaatataaaggccattgttcccctaggtctctgcctggggaggttgaaactccggaagctgcccaaagtggctgtgcttatgagcgcggccttgaagcccaaggatatgcaattttttttttttttttttgagatggagtcttgccctgtcgctaggctggagtgcagtggtgtcatcttggcccactgcaacctccgactccctggttcaagcgattcttctgcctcagcgtcccaagtagctgggattacaggcacatgccaccacacccagatagtttttgtatttttagtagagatggggtttcaccatgttggccaggatggtctcgatctcctgaccttgtgatccacccgcctcagcctccaaaagtgctgggattacagtcatgagccaccgtgcctgcccggatatgtgaatattttatctagcagtgaatgaaggtgtggggtgcccagcaaggagctctaggggtctcagttatgaggacacagcaggaaaaggacagacgagaatggcagcatgtgcatggtcagtgctgcccaaaggcagggcaggcaggaggatggggtgggatggtgggggtcccagcaggctggggggcagggcacctgcccgcctagcacagttgggcgcagcaagctgaggggccagaagaaaactaaagggtgtggtgattccagcaaacccaaggtcagatttcagagcagaaagttgtcacttggagagcagcaagcatctgtcctgttgatgtagtctaggagatgctgtcacatcacctgatactctggagtctttctgagataggttggcatcccatttaccctgtaacacccaaaacttcttatgtcctgttctctacctgggcgttgtgcgtgggctgggaacgggaaaactcgggcagagcagagacacagagggggcgcctgctagagactgcgtgaggagcccactaggagaaccgtgggatgccgggcaagtctgcactgctgcgctctgaagtcagccacagacacatgggtttccaagcgaagctccctccccatgtgatggaggtcacagtcgccctccctgtcatgcctcctttcaccctcccagctgggtcaggtccccagtcagaggcagaggtgagcacagtcttgggaagcaacctgcggtccacccccaccgctcagccccgcctttacagctgcgtgcgcttcagccctgggagggctgattctcacagagctcgagctccttggtggtcctgggactcagctctcctgggtgccggtcaggacccccatcgcagtcccgtgtgcatttgggaaccaagtccttggggcttgagtgtaaatggtccttctgtaagaaagctgattctggcaccaacagagaggctgcctcagatgaagagtgttagcacccgaagggacccccaggcctgtcctgaccctcccacccctgctgtcggcccaacttgtgtccctttcctggaagaactgcttccggcggccagtgtgctatgcttcctcctggctctgccctgcacccccagaacagcccctgggcttacgggagacactagtctctgggcttctgcagccaatcaagctgctgggccctccctcccaagcactggaggaggtactcgttctgtgggccggggcccctccctcctgagcactggaggaggcacttgttctgtgggccacggcccctccttccccagcactggaggaggcactggttgtgtgggccctggctcctccatgtctgagggaactgctctgcttctcctacagtccctgagattctgcagctcagcgatgccctgcgggacaacatcctgcccgagcttggggtgcggtttgaagaccacgaaggtgggtgagcccttgctgtttgctacaaagttaccaggagcttggagaggtgtcacaaggagagctcccggggctgggctgaggctcatgcttcatgattgctgatgcagaatcccaaagtggcagccccatgggtcccccggcgccattcccacgctggccagcctggcaggggcaggggagcaccccgtagctccttcccactgctgcgtgtggtggtgtcacctcccctgcgcatcatctcccctaggggcctggctgcccgctgcccctgttgctaccgcctttgaagctctcagctgaggaaccagcctgtatcctgtacactgtcaacagattgcatgcttgttctcccacttcgtggaggtctttttgttccacagaaagttaatttttttgttttttattttcaatttttatttatttgtttattgagacagagtttcgctctgtcgcccaggccggagtacagtggcgcgatctcggctcattgcaacctctgcctcccgggttcaagcgattctcctgcctcagcctcccgagtagctgggattacagacgcccatcaccacgctcggctaatttttgtatctttagtagagacggggtttcactgtgttgaccaggctagtgtcgaactcctgacctcaagtaatctgcccacctcggcctcctaaagtggcatgagccacatgcccagccttagtttcagtttttatggatacataatagttgtacatatttatgggctatgtgtgatatttggatacatgcgtatgaggtactatgatcaaatctaggtaactgagatgtccatcacctcaagcatttatcatttctttgtgttacgaaccctccaattccactcttccactctgcccctggtaattttaaatctcagatgtcatgtcctattttcctactcctggctggcaagaccttcctaccttctcgttacaaaatgttctcgccaggtgtggtggctcatacctgtatcctagcactttgggaggctgaggtgggtggattacctgagctcaggagttcgagaccagcctaggcaacatggtgaaaccccgtctccactaaaatacaaaacattagctgggtgtgggctccttgggcagctgagacacgagaattgcttgaacccgataggcaaaggttgcagtgaactgagatcgtgccactgcactccagcctggatgacagagcaagactctgtctcaaaaaaaaaaaaaaaaaaatcacacacacacaaaccaaaatgttctcctgtgcttcactgctgctatggaggtttttgtttgtttttctcctgtgggccctcgctctgactgggcagcaccgcatggtctgggcagggcagggcagggcagggctggccccgcagtggggacggcccacagagcccagactcttctcacacgcagtttattttgcaggactgcccacagtggtgaaactggtagacagaaacaccttattaaaagagagagaagaaaagagacgggtgagtaaagtgaaaatgacttaagcgtgatatttgttgaaaatgtaaaaaccattgcgattattacatagtttactttttaagcattgatgtttacacttttattaaaatcccagtatttataaatgtcagaaagaaaaattaactagtatcttctaatgaaggacctcttttaaaaagattattccctcagtttaagtgaaaaccagtcacttttggcaaactgtgaagctgacttttttttttttttttttttttgagacggagtctcactctgttgctcagactggagtgcagtggcacgatcttggctcactgcaacctccacttccctggttcaagggattctcctgcctcagcctcccaagtagctgggactacaggcacgcaccactgtgcccagctaatttttgtatttttttagtagagatggggtttcaccatgttggtcaggctggtctcaatctcctgacctcgtgatccacccaccttggcctcccaaagtgctgggattacaggcttgagccaccacgcctggcccgaagctgacatgttaagatcccagtcccaccgtgccctcacctgagtggcgcgtgtcactgatgcatctccacctcctattcccagcatactccccacctgcaccccacaacgcccccaggatcagggatggcccaagttcctcggtgcccaataggacagaagaacaggaacaaaaacgcaatgtcagaatctctgggcacagcgcatggggtaccctgggatgcaggcagcaggatgagaggcacctgggcccccagtgcacaccatgggaggtgggccatgggggctgttgccaccagcaggtgggtccccaagaggcttaaagcaggagaccaccgtggagggcgagtttggatgccacagctctcaggaaggaggctctgggaggaactgaggaaggagaatcgacagggtggttgattgatagatgggatgtacaaggtcagggaaggcatctatgcctagccctgcactggcccaaggcacgaggggagagctcatgccagatccaagtgtgggtggctggagtttgcagtgctttggaggaataacgaactggaactctggggaaagctctagacagtggtgagtggtctgcaggtccatcctggttggcaggttgggaagagctgggcttgccctgtgaggttggctggtgtgactgcctcatcagggcccctccccattccatcacagtcactcacctagccttgggtctcgcctgccgtgctgtgctgtgaggtggcctggtgctggctgtgcagacgccctggcttgctgcactccctggcagagtgctcagaagcaggaaacagacaagaggagcgccagggtggcccggccagagcctcacaggccttgcactctttgtgctggcctttccactggccaccttggctgtggcctgtgacttctagtagctcctgtttcccaaccaagggactcttacctcaccaagctgctgcaagaaggcatccccaggcccgaggcaccatgggggaggggtcctgcctctccctgtaccattcccaccagcacataaacacatactaacttttaaagggaaaaagcagaaatcctgagcactgtgtctctggttcctccaagctcagtgcccagctcctcccccacctcagcccctttccctcggccagccctgctctccctccatctatctcgaaagagctcgatcctgttggccccagccccatcctgagtctctgagacctttgtgccttcctggtttcttttccctagctctgtgtgtggcgcctccccaggagaccttatctggtcctgcggcttctccaccatctatcttgtagccggtggcccaaaaacagtttgcccagctgcctacctgatagctccactgggccaggaagcctctgatatctaggctgtccaaagtaaatgtgattttcaactccccaaacttgttcctccttcctgccatggagggcgtgcctacctgatagctccactgggctgggaagcatctgaaacctaggctgtccaaaggaaaggtgaaaatgtgattttcaactccccaaacttgctccttttccgtcagtggagggcatgtctgttcgtgcaatggctcaggccagaacctcccaaagcaaccgagggcttccctcaccggcacccagcctgctggctccactaataagctctccctgcagcatcagactgtcctcgcccctgcccgggtgctgcctgctggttggagtgggctctggtctcctcacctagcccccaaggctgccctccgcccaccatccccatcctgccctggcgctcttgctccttcccaggtaccccaagacccactcaggataaccctcacagtgctgtcctggtcattgccttacagatcctctctccttgggccaggctcaccatgctggtccatttcttcatgttagtggtgcctggatcttttagcattggttctgtttgtctgcctgctgcatacctttgcatctagggcagggccaggcacccaggggtgccgctgaggatccccaaagggaatggaagagggtcggtgtgctgcccggcacatgggcttgtctccccacagtggggagggcctggtcagagttcagccctccatgccaggccctaggagaggggcttgtttggctagacctctcactccgagagacccagcagcctgaggcagccctgtctcatctggctctgtattgaccctccaggttgaagaggagaagaggaagaagaaagaggaggcggcccggaggaaacaggaacaagaagtaatgcattttgtttgggggtgagggctctactgggcaggagtgcaccctgaccccatgccctgtggctctctgtgcctccgtggaccttagccaggcccctgcagaccctcacagaaggagctccgctttctgcctccaccacccaaggcctgccaggcccttctcacatggggtgcagggaaggcctggccaaggggaaggctgtgccatgtggtcacaagctccaagacagcgtttatagacttactactattaggttttctagtaagctttccactattcctgtagaaataacatctggtttaattttaaattccttgtatgttccctccaccttggctttccccttcccatctttcatagcactctgaatctgagggcttggaagcaagttgagggctggaggtatgagcagatgtcgttcacagtgcggagccccaggtgctgctcgggggcagtgactgtgccgtgttgcgtgttctaggcagcaaagctggccaagatgaagattccccccagtgagatgttcttgtcagaaaccgacaaatactccaagtttgatgaaaatgtaagcatgtaagcatccttctcttctattcagaacttgatcagaccacattaaagtgggaggacaggaattttcaaccttggacaagcagattttctgtctgtagaaaatttggaatcaaatctgacacccgctttaggtccagggcctcctggcccaactactgagctccttccacagcccaggcagctaggcaagcccgtgccagggccccctccactggtgtggtgagctctggtccctagccctgggagttgtggccccgggccaagatccacccaggccctcacaagctggctgaagtgccgtggcgcagataggcctcctacccccagtttcttcctttgtcatagcgattcacagccactgcctccaaacctctaggcccctccctgctggcatttggatgtgtttgctatgtacctttgggccagctgtgtcagaactcagccatgggtaggctctgaggggcacagtgcccctcaccttaggcaggaagcacccccagactctggtcgcccctctcccattcttagctgctggagccagcactgccagatgagtgtgctggctccagagcagtgtggtgactgaatgtccaagcaagaggacatggctgcatcagggagatagacactttgagacgggagggcaaagaaaggggagttggggttacccaggtgcagaggagaccaatagccgctgtgctctgggttttcagggtctgcccacacatgacatggagggcaaagagctcagcaaagggcaagccaagaagctgaagaagctcttcgaggctcaggagaagctctacaaggaatatctgcagatggcccagaatggaagcttccagtgagggggcacaggactgactttttaaaccattgtggactagtggctgctgtctgcctcagtgacaatgtcccagcgctcctatcatgtttacagtcacccttgggtcctaaattaagagttgtgttcatgtaggttcgtgtcgtcgttggctctgagacattgataataaatttttctcaacagtg

SEQ ID NO: 11059 - DNA, 2671 bp, Homo sapiens
caggtgctggcttgccttccttctaatgagggtgctatccaggggtggctttcaaagagtgaagggcaggcacctacctcagctcatgccccagtcagctgctcctcaggtggctgaggagggcctgttcccaggaatgatactgcagacaaatataaaggccattgttcccctaggtctctgcctggggaggttgaaactccggaagctgcccaaagtggctgtgcttatgagcgcggccttgaagcccaaggatatgcaattttttttttttttttttgagatggagtcttgccctgtcgctaggctggagtgcagtggtgtcatcttggcccactgcaacctccgactccctggttcaagcgattcttctgcctcagcgtcccaagtagctgggattacaggcacatgccaccacacccagatagtttttgtatttttagtagagatggggtttcaccatgttggccaggatggtctcgatctcctgaccttgtgatccacccgcctcagcctccaaaagtgctgggattacagtcatgagccaccgtgcctgcccggatatgtgaatattttatctagcagtgaatgaaggtgtggggtgcccagcaaggagctctaggggtctcagttatgaggacacagcaggaaaaggacagacgagaatggcagcatgtgcatggtcagtgctgcccaaaggcagggcaggcaggaggatggggtgggatggtgggggtcccagcaggctggggggcagggcacctgcccgcctagcacagttgggcgcagcaagctgaggggccagaagaaaactaaagggtgtggtgattccagcaaacccaaggtcagatttcagagcagaaagttgtcacttggagagcagcaagcatctgtcctgttgatgtagtctaggagatgctgtcacatcacctgatactctggagtctttctgagataggttggcatcccatttaccctgtaacacccaaaacttcttatgtcctgttctctacctgggcgttgtgcgtgggctgggaacgggaaaactcgggcagagcagagacacagagggggcgcctgctagagactgcgtgaggagcccactaggagaaccgtgggatgccgggcaagtctgcactgctgcgctctgaagtcagccacagacacatgggtttccaagcgaagctccctccccatgtgatggaggtcacagtcgccctccctgtcatgcctcctttcaccctcccagctgggtcaggtccccagtcagaggcagaggtgagcacagtcttgggaagcaacctgcggtccacccccaccgctcagccccgcctttacagctgcgtgcgcttcagccctgggagggctgattctcacagagctcgagctccttggtggtcctgggactcagctctcctgggtgccggtcaggacccccatcgcagtcccgtgtgcatttgggaaccaagtccttggggcttgagtgtaaatggtccttctgtaagaaagctgattctggcaccaacagagaggctgcctcagatgaagagtgttagcacccgaagggacccccaggcctgtcctgaccctcccacccctgctgtcggcccaacttgtgtccctttcctggaagaactgcttccggcggccagtgtgctatgcttcctcctggctctgccctgcacccccagaacagcccctgggcttacgggagacactagtctctgggcttctgcagccaatcaagctgctgggccctccctcccaagcactggaggaggtactcgttctgtgggccggggcccctccctcctgagcactggaggaggcacttgttctgtgggccacggcccctccttccccagcactggaggaggcactggttgtgtgggccctggctcctccatgtctgagggaactgctctgcttctcctacagtccctgagattctgcagctcagcgatgccctgcgggacaacatcctgcccgagcttggggtgcggtttgaagaccacgaaggactgcccacagtggtgaaactggtagacagaaacaccttattaaaagagagagaagaaaagagacgggttgaagaggagaagaggaagaagaaagaggaggcggcccggaggaaacaggaacaagaacactctgaatctgagggcttggaagcaagttgagggctggaggtatgagcagatgtcgttcacagtgcggagccccaggtgctgctcgggggcagtgactgtgccgtgttgcgtgttctaggcagcaaagctggccaagatgaagattccccccagtgagatgttcttgtcagaaaccgacaaatactccaagtttgatgaaaatggtctgcccacacatgacatggagggcaaagagctcagcaaagggcaagccaagaagctgaagaagctcttcgaggctcaggagaagctctacaaggaatatctgcagatggcccagaatggaagcttccagtgagggggcacaggactgactttttaaaccattgtggactagtggctgctgtctgcctcagtgacaatgtcccagcgctcctatcatgtttacagtcacccttgggtcctaaattaagagttgtgttcatgtaggttcgtgtcgtcgttggctctgagacattgataataaatttttctcaacagtg

SEQ ID NO: 11060 - DNA, 8604 bp, Homo sapiens
catttacagtgttgtgcagccgccaccgtccatctccagaactcttcccttttcccaaactggaactctgtccccatggaacagcaactccacatcccctccctcagcccctggtgctcaccctctacttctgtctctttggattttactactccagggaccctacatgagtggagtcacacagtgtttgtcctgtgtctggcttatttcgctgatcacggtgtcctcaggtctatccatgttgcagcctgtgtcaggacctcctgcctttttaatggccaaatcatattccatggatggatgggccctgatctgtctattcttccatggaagaattctcatcacctttgcgttatctttgtagcccacatttctcttcagtaaatccctgatgatgatgtcattgtctgctcctctgccccagctctgctaacagaagccacagaggcttcttcctcagctcctcagaatccagacccagaggtcggtgtgggcctgaggggtacggcgtgtgtccctttcccccagggagtgtggcccgggaggctttcttggtgcctgctctgatgatcacccatggcgggtgggctggggtgctggccttgtggcctcccatgacacccgtgacagtgaccacaggtgctggcttgccttccttctaatgagggtgctatccaggggtggctttcaaagagtgaagggcaggcacctacctcagctcatgccccagtcagctgctcctcaggtggctgaggagggcctgttcccaggaatgatactgcagacaaatataaaggccattgttcccctaggtctctgcctggggaggttgaaactccggaagctgcccaaagtggctgtgcttatgagcgcggccttgaagcccaaggatatgcaattttttttttttttttttgagatggagtcttgccctgtcgctaggctggagtgcagtggtgtcatcttggcccactgcaacctccgactccctggttcaagcgattcttctgcctcagcgtcccaagtagctgggattacaggcacatgccaccacacccagatagtttttgtatttttagtagagatggggtttcaccatgttggccaggatggtctcgatctcctgaccttgtgatccacccgcctcagcctccaaaagtgctgggattacagtcatgagccaccgtgcctgcccggatatgtgaatattttatctagcagtgaatgaaggtgtggggtgcccagcaaggagctctaggggtctcagttatgaggacacagcaggaaaaggacagacgagaatggcagcatgtgcatggtcagtgctgcccaaaggcagggcaggcaggaggatggggtgggatggtgggggtcccagcaggctggggggcagggcacctgcccgcctagcacagttgggcgcagcaagctgaggggccagaagaaaactaaagggtgtggtgattccagcaaacccaaggtcagatttcagagcagaaagttgtcacttggagagcagcaagcatctgtcctgttgatgtagtctaggagatgctgtcacatcacctgatactctggagtctttctgagataggttggcatcccatttaccctgtaacacccaaaacttcttatgtcctgttctctacctgggcgttgtgcgtgggctgggaacgggaaaactcgggcagagcagagacacagagggggcgcctgctagagactgcgtgaggagcccactaggagaaccgtgggatgccgggcaagtctgcactgctgcgctctgaagtcagccacagacacatgggtttccaagcgaagctccctccccatgtgatggaggtcacagtcgccctccctgtcatgcctcctttcaccctcccagctgggtcaggtccccagtcagaggcagaggtgagcacagtcttgggaagcaacctgcggtccacccccaccgctcagccccgcctttacagctgcgtgcgcttcagccctgggagggctgattctcacagagctcgagctccttggtggtcctgggactcagctctcctgggtgccggtcaggacccccatcgcagtcccgtgtgcatttgggaaccaagtccttggggcttgagtgtaaatggtccttctgtaagaaagctgattctggcaccaacagagaggctgcctcagatgaagagtgttagcacccgaagggacccccaggcctgtcctgaccctcccacccctgctgtcggcccaacttgtgtccctttcctggaagaactgcttccggcggccagtgtgctatgcttcctcctggctctgccctgcacccccagaacagcccctgggcttacgggagacactagtctctgggcttctgcagccaatcaagctgctgggccctccctcccaagcactggaggaggtactcgttctgtgggccggggcccctccctcctgagcactggaggaggcacttgttctgtgggccacggcccctccttccccagcactggaggaggcactggttgtgtgggccctggctcctccatgtctgagggaactgctctgcttctcctacagtccctgagattctgcagctcagcgatgccctgcgggacaacatcctgcccgagcttggggtgcggtttgaagaccacgaaggtgggtgagcccttgctgtttgctacaaagttaccaggagcttggagaggtgtcacaaggagagctcccggggctgggctgaggctcatgcttcatgattgctgatgcagaatcccaaagtggcagccccatgggtcccccggcgccattcccacgctggccagcctggcaggggcaggggagcaccccgtagctccttcccactgctgcgtgtggtggtgtcacctcccctgcgcatcatctcccctaggggcctggctgcccgctgcccctgttgctaccgcctttgaagctctcagctgaggaaccagcctgtatcctgtacactgtcaacagattgcatgcttgttctcccacttcgtggaggtctttttgttccacagaaagttaatttttttgttttttattttcaatttttatttatttgtttattgagacagagtttcgctctgtcgcccaggccggagtacagtggcgcgatctcggctcattgcaacctctgcctcccgggttcaagcgattctcctgcctcagcctcccgagtagctgggattacagacgcccatcaccacgctcggctaatttttgtatctttagtagagacggggtttcactgtgttgaccaggctagtgtcgaactcctgacctcaagtaatctgcccacctcggcctcctaaagtggcatgagccacatgcccagccttagtttcagtttttatggatacataatagttgtacatatttatgggctatgtgtgatatttggatacatgcgtatgaggtactatgatcaaatctaggtaactgagatgtccatcacctcaagcatttatcatttctttgtgttacgaaccctccaattccactcttccactctgcccctggtaattttaaatctcagatgtcatgtcctattttcctactcctggctggcaagaccttcctaccttctcgttacaaaatgttctcgccaggtgtggtggctcatacctgtatcctagcactttgggaggctgaggtgggtggattacctgagctcaggagttcgagaccagcctaggcaacatggtgaaaccccgtctccactaaaatacaaaacattagctgggtgtgggctccttgggcagctgagacacgagaattgcttgaacccgataggcaaaggttgcagtgaactgagatcgtgccactgcactccagcctggatgacagagcaagactctgtctcaaaaaaaaaaaaaaaaaaatcacacacacacaaaccaaaatgttctcctgtgcttcactgctgctatggaggtttttgtttgtttttctcctgtgggccctcgctctgactgggcagcaccgcatggtctgggcagggcagggcagggcagggctggccccgcagtggggacggcccacagagcccagactcttctcacacgcagtttattttgcaggactgcccacagtggtgaaactggtagacagaaacaccttattaaaagagagagaagaaaagagacgggtgagtaaagtgaaaatgacttaagcgtgatatttgttgaaaatgtaaaaaccattgcgattattacatagtttactttttaagcattgatgtttacacttttattaaaatcccagtatttataaatgtcagaaagaaaaattaactagtatcttctaatgaaggacctcttttaaaaagattattccctcagtttaagtgaaaaccagtcacttttggcaaactgtgaagctgacttttttttttttttttttttttgagacggagtctcactctgttgctcagactggagtgcagtggcacgatcttggctcactgcaacctccacttccctggttcaagggattctcctgcctcagcctcccaagtagctgggactacaggcacgcaccactgtgcccagctaatttttgtatttttttagtagagatggggtttcaccatgttggtcaggctggtctcaatctcctgacctcgtgatccacccaccttggcctcccaaagtgctgggattacaggcttgagccaccacgcctggcccgaagctgacatgttaagatcccagtcccaccgtgccctcacctgagtggcgcgtgtcactgatgcatctccacctcctattcccagcatactccccacctgcaccccacaacgcccccaggatcagggatggcccaagttcctcggtgcccaataggacagaagaacaggaacaaaaacgcaatgtcagaatctctgggcacagcgcatggggtaccctgggatgcaggcagcaggatgagaggcacctgggcccccagtgcacaccatgggaggtgggccatgggggctgttgccaccagcaggtgggtccccaagaggcttaaagcaggagaccaccgtggagggcgagtttggatgccacagctctcaggaaggaggctctgggaggaactgaggaaggagaatcgacagggtggttgattgatagatgggatgtacaaggtcagggaaggcatctatgcctagccctgcactggcccaaggcacgaggggagagctcatgccagatccaagtgtgggtggctggagtttgcagtgctttggaggaataacgaactggaactctggggaaagctctagacagtggtgagtggtctgcaggtccatcctggttggcaggttgggaagagctgggcttgccctgtgaggttggctggtgtgactgcctcatcagggcccctccccattccatcacagtcactcacctagccttgggtctcgcctgccgtgctgtgctgtgaggtggcctggtgctggctgtgcagacgccctggcttgctgcactccctggcagagtgctcagaagcaggaaacagacaagaggagcgccagggtggcccggccagagcctcacaggccttgcactctttgtgctggcctttccactggccaccttggctgtggcctgtgacttctagtagctcctgtttcccaaccaagggactcttacctcaccaagctgctgcaagaaggcatccccaggcccgaggcaccatgggggaggggtcctgcctctccctgtaccattcccaccagcacataaacacatactaacttttaaagggaaaaagcagaaatcctgagcactgtgtctctggttcctccaagctcagtgcccagctcctcccccacctcagcccctttccctcggccagccctgctctccctccatctatctcgaaagagctcgatcctgttggccccagccccatcctgagtctctgagacctttgtgccttcctggtttcttttccctagctctgtgtgtggcgcctccccaggagaccttatctggtcctgcggcttctccaccatctatcttgtagccggtggcccaaaaacagtttgcccagctgcctacctgatagctccactgggccaggaagcctctgatatctaggctgtccaaagtaaatgtgattttcaactccccaaacttgttcctccttcctgccatggagggcgtgcctacctgatagctccactgggctgggaagcatctgaaacctaggctgtccaaaggaaaggtgaaaatgtgattttcaactccccaaacttgctccttttccgtcagtggagggcatgtctgttcgtgcaatggctcaggccagaacctcccaaagcaaccgagggcttccctcaccggcacccagcctgctggctccactaataagctctccctgcagcatcagactgtcctcgcccctgcccgggtgctgcctgctggttggagtgggctctggtctcctcacctagcccccaaggctgccctccgcccaccatccccatcctgccctggcgctcttgctccttcccaggtaccccaagacccactcaggataaccctcacagtgctgtcctggtcattgccttacagatcctctctccttgggccaggctcaccatgctggtccatttcttcatgttagtggtgcctggatcttttagcattggttctgtttgtctgcctgctgcatacctttgcatctagggcagggccaggcacccaggggtgccgctgaggatccccaaagggaatggaagagggtcggtgtgctgcccggcacatgggcttgtctccccacagtggggagggcctggtcagagttcagccctccatgccaggccctaggagaggggcttgtttggctagacctctcactccgagagacccagcagcctgaggcagccctgtctcatctggctctgtattgaccctccaggttgaagaggagaagaggaagaagaaagaggaggcggcccggaggaaacaggaacaagaagtaatgcattttgtttgggggtgagggctctactgggcaggagtgcaccctgaccccatgccctgtggctctctgtgcctccgtggaccttagccaggcccctgcagaccctcacagaaggagctccgctttctgcctccaccacccaaggcctgccaggcccttctcacatggggtgcagggaaggcctggccaaggggaaggctgtgccatgtggtcacaagctccaagacagcgtttatagacttactactattaggttttctagtaagctttccactattcctgtagaaataacatctggtttaattttaaattccttgtatgttccctccaccttggctttccccttcccatctttcatagcactctgaatctgagggcttggaagcaagttgagggctggaggtatgagcagatgtcgttcacagtgcggagccccaggtgctgctcgggggcagtgactgtgccgtgttgcgtgttctaggcagcaaagctggccaagatgaagattccccccagtgagatgttcttgtcagaaaccgacaaatactccaagtttgatgaaaatgtaagcatgtaagcatccttctcttctattcagaacttgatcagaccacattaaagtgggaggacaggaattttcaaccttggacaagcagattttctgtctgtagaaaatttggaatcaaatctgacacccgctttaggtccagggcctcctggcccaactactgagctccttccacagcccaggcagctaggcaagcccgtgccagggccccctccactggtgtggtgagctctggtccctagccctgggagttgtggccccgggccaagatccacccaggccctcacaagctggctgaagtgccgtggcgcagataggcctcctacccccagtttcttcctttgtcatagcgattcacagccactgcctccaaacctctaggcccctccctgctggcatttggatgtgtttgctatgtacctttgggccagctgtgtcagaactcagccatgggtaggctctgaggggcacagtgcccctcaccttaggcaggaagcacccccagactctggtcgcccctctcccattcttagctgctggagccagcactgccagatgagtgtgctggctccagagcagtgtggtgactgaatgtccaagcaagaggacatggctgcatcagggagatagacactttgagacgggagggcaaagaaaggggagttggggttacccaggtgcagaggagaccaatagccgctgtgctctgggttttcagggtctgcccacacatgacatggagggcaaagagctcagcaaagggcaagccaagaagctgaagaagctcttcgaggctcaggagaagctctacaaggaatatctgcagatggcccagaatggaagcttccagtgagggggcacaggactgactttttaaaccattgtggactagtggctgctgtctgcctcagtgacaatgtcccagcgctcctatcatgtttacagtcacccttgggtcctaaattaagagttgtgttcatgtaggttcgtgtcgtcgttggctctgagacattgataataaatttttctcaacagtg

SEQ ID NO: 11061 - DNA, 2466 bp, Homo sapiens
catttacagtgttgtgcagccgccaccgtccatctccagaactcttcccttttcccaaactggaactctgtccccatggaacagcaactccacatcccctccctcagcccctggtgctcaccctctacttctgtctctttggattttactactccagggaccctacatgagtggagtcacacagtgtttgtcctgtgtctggcttatttcgctgatcacggtgtcctcaggtctatccatgttgcagcctgtgtcaggacctcctgcctttttaatggccaaatcatattccatggatggatgggccctgatctgtctattcttccatggaagaattctcatcacctttgcgttatctttgtagcccacatttctcttcagtaaatccctgatgatgatgtcattgtctgctcctctgccccagctctgctaacagaagccacagaggcttcttcctcagctcctcagaatccagacccagaggtcggtgtgggcctgaggggtacggcgtgtgtccctttcccccagggagtgtggcccgggaggctttcttggtgcctgctctgatgatcacccatggcgggtgggctggggtgctggccttgtggcctcccatgacacccgtgacagtgaccacaggtgctggcttgccttccttctaatgagggtgctatccaggggtggctttcaaagagtgaagggcaggcacctacctcagctcatgccccagtcagctgctcctcaggtggctgaggagggcctgttcccaggaatgatactgcagacaaatataaaggccattgttcccctaggtctctgcctggggaggttgaaactccggaagctgcccaaagtggctgtgcttatgagcgcggccttgaagcccaaggatatgcaattttttttttttttttttgagatggagtcttgccctgtcgctaggctggagtgcagtggtgtcatcttggcccactgcaacctccgactccctggttcaagcgattcttctgcctcagcgtcccaagtagctgggattacaggcacatgccaccacacccagatagtttttgtatttttagtagagatggggtttcaccatgttggccaggatggtctcgatctcctgaccttgtgatccacccgcctcagcctccaaaagtgctgggattacagtcatgagccaccgtgcctgcccggatatgtgaatattttatctagcagtgaatgaaggtgtggggtgcccagcaaggagctctaggggtctcagttatgaggacacagcaggaaaaggacagacgagaatggcagcatgtgcatggtcagtgctgcccaaaggcagggcaggcaggaggatggggtgggatggtgggggtcccagcaggctggggggcagggcacctgcccgcctagcacagttgggcgcagcaagctgaggggccagaagaaaactaaagggtgtggtgattccagcaaacccaaggtcagatttcagagcagaaagttgtcacttggagagcagcaagcatctgtcctgttgatgtagtctaggagatgctgtcacatcacctgatactctggagtctttctgagataggttggcatcccatttaccctgtaacacccaaaacttcttatgtcctgttctctacctgggcgttgtgcgtgggctgggaacgggaaaactcgggcagagcagagacacagagggggcgcctgctagagactgcgtgaggagcccactaggagaaccgtgggatgccgggcaagtctgcactgctgcgctctgaagtcagccacagacacatgggtttccaagcgaagctccctccccatgtgatggaggtcacagtcgccctccctgtcatgcctcctttcaccctcccagctgggtcaggtccccagtcagaggcagagtccctgagattctgcagctcagcgatgccctgcgggacaacatcctgcccgagcttggggtgcggtttgaagaccacgaaggactgcccacagtggtgaaactggtagacagaaacaccttattaaaagagagagaagaaaagagacgggcagcaaagctggccaagatgaagattccccccagtgagatgttcttgtcagaaaccgacaaatactccaagtttgatgaaaatggtctgcccacacatgacatggagggcaaagagctcagcaaagggcaagccaagaagctgaagaagctcttcgaggctcaggagaagctctacaaggaatatctgcagatggcccagaatggaagcttccagtgagggggcacaggactgactttttaaaccattgtggactagtggctgctgtctgcctcagtgacaatgtcccagcgctcctatcatgtttacagtcacccttgggtcctaaattaagagttgtgttcatgtaggttcgtgtcgtcgttggctctgagacattgataataaatttttctcaacagtg

SEQ ID NO: 11062 - DNA, 6082 bp, Homo sapiens
gtgggccctggctcctccatgtctgagggaactgctctgcttctcctacagtccctgagattctgcagctcagcgatgccctgcgggacaacatcctgcccgagcttggggtgcggtttgaagaccacgaaggtgggtgagcccttgctgtttgctacaaagttaccaggagcttggagaggtgtcacaaggagagctcccggggctgggctgaggctcatgcttcatgattgctgatgcagaatcccaaagtggcagccccatgggtcccccggcgccattcccacgctggccagcctggcaggggcaggggagcaccccgtagctccttcccactgctgcgtgtggtggtgtcacctcccctgcgcatcatctcccctaggggcctggctgcccgctgcccctgttgctaccgcctttgaagctctcagctgaggaaccagcctgtatcctgtacactgtcaacagattgcatgcttgttctcccacttcgtggaggtctttttgttccacagaaagttaatttttttgttttttattttcaatttttatttatttgtttattgagacagagtttcgctctgtcgcccaggccggagtacagtggcgcgatctcggctcattgcaacctctgcctcccgggttcaagcgattctcctgcctcagcctcccgagtagctgggattacagacgcccatcaccacgctcggctaatttttgtatctttagtagagacggggtttcactgtgttgaccaggctagtgtcgaactcctgacctcaagtaatctgcccacctcggcctcctaaagtggcatgagccacatgcccagccttagtttcagtttttatggatacataatagttgtacatatttatgggctatgtgtgatatttggatacatgcgtatgaggtactatgatcaaatctaggtaactgagatgtccatcacctcaagcatttatcatttctttgtgttacgaaccctccaattccactcttccactctgcccctggtaattttaaatctcagatgtcatgtcctattttcctactcctggctggcaagaccttcctaccttctcgttacaaaatgttctcgccaggtgtggtggctcatacctgtatcctagcactttgggaggctgaggtgggtggattacctgagctcaggagttcgagaccagcctaggcaacatggtgaaaccccgtctccactaaaatacaaaacattagctgggtgtgggctccttgggcagctgagacacgagaattgcttgaacccgataggcaaaggttgcagtgaactgagatcgtgccactgcactccagcctggatgacagagcaagactctgtctcaaaaaaaaaaaaaaaaaaatcacacacacacaaaccaaaatgttctcctgtgcttcactgctgctatggaggtttttgtttgtttttctcctgtgggccctcgctctgactgggcagcaccgcatggtctgggcagggcagggcagggcagggctggccccgcagtggggacggcccacagagcccagactcttctcacacgcagtttattttgcaggactgcccacagtggtgaaactggtagacagaaacaccttattaaaagagagagaagaaaagagacgggtgagtaaagtgaaaatgacttaagcgtgatatttgttgaaaatgtaaaaaccattgcgattattacatagtttactttttaagcattgatgtttacacttttattaaaatcccagtatttataaatgtcagaaagaaaaattaactagtatcttctaatgaaggacctcttttaaaaagattattccctcagtttaagtgaaaaccagtcacttttggcaaactgtgaagctgacttttttttttttttttttttttgagacggagtctcactctgttgctcagactggagtgcagtggcacgatcttggctcactgcaacctccacttccctggttcaagggattctcctgcctcagcctcccaagtagctgggactacaggcacgcaccactgtgcccagctaatttttgtatttttttagtagagatggggtttcaccatgttggtcaggctggtctcaatctcctgacctcgtgatccacccaccttggcctcccaaagtgctgggattacaggcttgagccaccacgcctggcccgaagctgacatgttaagatcccagtcccaccgtgccctcacctgagtggcgcgtgtcactgatgcatctccacctcctattcccagcatactccccacctgcaccccacaacgcccccaggatcagggatggcccaagttcctcggtgcccaataggacagaagaacaggaacaaaaacgcaatgtcagaatctctgggcacagcgcatggggtaccctgggatgcaggcagcaggatgagaggcacctgggcccccagtgcacaccatgggaggtgggccatgggggctgttgccaccagcaggtgggtccccaagaggcttaaagcaggagaccaccgtggagggcgagtttggatgccacagctctcaggaaggaggctctgggaggaactgaggaaggagaatcgacagggtggttgattgatagatgggatgtacaaggtcagggaaggcatctatgcctagccctgcactggcccaaggcacgaggggagagctcatgccagatccaagtgtgggtggctggagtttgcagtgctttggaggaataacgaactggaactctggggaaagctctagacagtggtgagtggtctgcaggtccatcctggttggcaggttgggaagagctgggcttgccctgtgaggttggctggtgtgactgcctcatcagggcccctccccattccatcacagtcactcacctagccttgggtctcgcctgccgtgctgtgctgtgaggtggcctggtgctggctgtgcagacgccctggcttgctgcactccctggcagagtgctcagaagcaggaaacagacaagaggagcgccagggtggcccggccagagcctcacaggccttgcactctttgtgctggcctttccactggccaccttggctgtggcctgtgacttctagtagctcctgtttcccaaccaagggactcttacctcaccaagctgctgcaagaaggcatccccaggcccgaggcaccatgggggaggggtcctgcctctccctgtaccattcccaccagcacataaacacatactaacttttaaagggaaaaagcagaaatcctgagcactgtgtctctggttcctccaagctcagtgcccagctcctcccccacctcagcccctttccctcggccagccctgctctccctccatctatctcgaaagagctcgatcctgttggccccagccccatcctgagtctctgagacctttgtgccttcctggtttcttttccctagctctgtgtgtggcgcctccccaggagaccttatctggtcctgcggcttctccaccatctatcttgtagccggtggcccaaaaacagtttgcccagctgcctacctgatagctccactgggccaggaagcctctgatatctaggctgtccaaagtaaatgtgattttcaactccccaaacttgttcctccttcctgccatggagggcgtgcctacctgatagctccactgggctgggaagcatctgaaacctaggctgtccaaaggaaaggtgaaaatgtgattttcaactccccaaacttgctccttttccgtcagtggagggcatgtctgttcgtgcaatggctcaggccagaacctcccaaagcaaccgagggcttccctcaccggcacccagcctgctggctccactaataagctctccctgcagcatcagactgtcctcgcccctgcccgggtgctgcctgctggttggagtgggctctggtctcctcacctagcccccaaggctgccctccgcccaccatccccatcctgccctggcgctcttgctccttcccaggtaccccaagacccactcaggataaccctcacagtgctgtcctggtcattgccttacagatcctctctccttgggccaggctcaccatgctggtccatttcttcatgttagtggtgcctggatcttttagcattggttctgtttgtctgcctgctgcatacctttgcatctagggcagggccaggcacccaggggtgccgctgaggatccccaaagggaatggaagagggtcggtgtgctgcccggcacatgggcttgtctccccacagtggggagggcctggtcagagttcagccctccatgccaggccctaggagaggggcttgtttggctagacctctcactccgagagacccagcagcctgaggcagccctgtctcatctggctctgtattgaccctccaggttgaagaggagaagaggaagaagaaagaggaggcggcccggaggaaacaggaacaagaagtaatgcattttgtttgggggtgagggctctactgggcaggagtgcaccctgaccccatgccctgtggctctctgtgcctccgtggaccttagccaggcccctgcagaccctcacagaaggagctccgctttctgcctccaccacccaaggcctgccaggcccttctcacatggggtgcagggaaggcctggccaaggggaaggctgtgccatgtggtcacaagctccaagacagcgtttatagacttactactattaggttttctagtaagctttccactattcctgtagaaataacatctggtttaattttaaattccttgtatgttccctccaccttggctttccccttcccatctttcatagcactctgaatctgagggcttggaagcaagttgagggctggaggtatgagcagatgtcgttcacagtgcggagccccaggtgctgctcgggggcagtgactgtgccgtgttgcgtgttctaggcagcaaagctggccaagatgaagattccccccagtgagatgttcttgtcagaaaccgacaaatactccaagtttgatgaaaatgtaagcatgtaagcatccttctcttctattcagaacttgatcagaccacattaaagtgggaggacaggaattttcaaccttggacaagcagattttctgtctgtagaaaatttggaatcaaatctgacacccgctttaggtccagggcctcctggcccaactactgagctccttccacagcccaggcagctaggcaagcccgtgccagggccccctccactggtgtggtgagctctggtccctagccctgggagttgtggccccgggccaagatccacccaggccctcacaagctggctgaagtgccgtggcgcagataggcctcctacccccagtttcttcctttgtcatagcgattcacagccactgcctccaaacctctaggcccctccctgctggcatttggatgtgtttgctatgtacctttgggccagctgtgtcagaactcagccatgggtaggctctgaggggcacagtgcccctcaccttaggcaggaagcacccccagactctggtcgcccctctcccattcttagctgctggagccagcactgccagatgagtgtgctggctccagagcagtgtggtgactgaatgtccaagcaagaggacatggctgcatcagggagatagacactttgagacgggagggcaaagaaaggggagttggggttacccaggtgcagaggagaccaatagccgctgtgctctgggttttcagggtctgcccacacatgacatggagggcaaagagctcagcaaagggcaagccaagaagctgaagaagctcttcgaggctcaggagaagctctacaaggaatatctgcagatggcccagaatggaagcttccagtgagggggcacaggactgactttttaaaccattgtggactagtggctgctgtctgcctcagtgacaatgtcccagcgctcctatcatgtttacagtcacccttgggtcctaaattaagagttgtgttcatgtaggttcgtgtcgtcgttggctctgagacattgataataaatttttctcaacagtga

SEQ ID NO: 11063 - DNA, 1151 bp, Homo sapiens
gtgggccctggctcctccatgtctgagggaactgctctgcttctcctacagtccctgagattctgcagctcagcgatgccctgcgggacaacatcctgcccgagcttggggtgcggtttgaagaccacgaaggactgcccacagtggtgaaactggtagacagaaacaccttattaaaagagagagaagaaaagagacgggttgaagaggagaagaggaagaagaaagaggaggcggcccggaggaaacaggaacaagaagtaatgcattttgtttgggggtgagggctctactgggcaggagtgcaccctgaccccatgccctgtggctctctgtgcctccgtggaccttagccaggcccctgcagaccctcacagaaggagctccgctttctgcctccaccacccaaggcctgccaggcccttctcacatggggtgcagggaaggcctggccaaggggaaggctgtgccatgtggtcacaagctccaagacagcgtttatagacttactactattaggttttctagtaagctttccactattcctgtagaaataacatctggtttaattttaaattccttgtatgttccctccaccttggctttccccttcccatctttcatagcactctgaatctgagggcttggaagcaagttgagggctggaggtatgagcagatgtcgttcacagtgcggagccccaggtgctgctcgggggcagtgactgtgccgtgttgcgtgttctaggcagcaaagctggccaagatgaagattccccccagtgagatgttcttgtcagaaaccgacaaatactccaagtttgatgaaaatggtctgcccacacatgacatggagggcaaagagctcagcaaagggcaagccaagaagctgaagaagctcttcgaggctcaggagaagctctacaaggaatatctgcagatggcccagaatggaagcttccagtgagggggcacaggactgactttttaaaccattgtggactagtggctgctgtctgcctcagtgacaatgtcccagcgctcctatcatgtttacagtcacccttgggtcctaaattaagagttgtgttcatgtaggttcgtgtcgtcgttggctctgagacattgataataaatttttctcaacagtga

SEQ ID NO: 11064 - DNA, 18248 bp, Homo sapiens
acttccggggcggcggttgcatcagattctaggaagtgtctgtagccgcagctgcgggtccgggattcccagccatggcagattcctccgggcagcagggtgagcggcgcggccgggccaggctgagggcggctgggggcctgactgggcgctgggtgctcggctcgaagggcagcgagtccttatgtctgaggggcccgggtgcatgggttctgaggggcagctgtgtccgtggtctgaggggcggcagtgcccgaggtctgaggggtgtcagtgcgcggggtctgagggacggcacgtccttgggtccgaggggcgggggtgctcggggtctgaggggtgtcagtgcccggggtctgagggacggcgggtcctgaggttcgaggggtggcacgtcctaggatccgaaggacaacgggtgcccggctccgagggacggccactgggacccctgggactcctgcgtgagggtctgccagacccgtggctggagcacagaccccgcggggacccgagcccgagcggggcgctgcccagaccacccagcctcagtttcctcacttggttcctgccgaggtccccttgcatcctcaccccgggaggtggccctacatcaaacagcctttccccagccggtgcctgggcgggccctcgctccctcttgccccagctggcctttaggggggagacaaaggcccaagggttgttttggttttctgcccagacctggcagcttccgggaggtgggcggagggcacctgaggttggtatttagggaaatggggcagaggacgccaggggtacgcgtacacacagtaaaagggcttggggctttacgaaggctttcatctccagttccgcaggcagtccactgcaagctgattgtcagagcattactgccccattttattgccaacccgggaggttccccagggacacagctgtgtcagctcccccagtcactcatgtcaccagcgggtagaccttgagagaccagtgggttcttctctcactgtccctccagcaagattttaggtgctggaaaggcaagagactgaatcagaaagcccagattcctaacagtctggagcagcctttccaaaggaaacattctcagtatctagtttttaattcttttggctggcaaaaattagatgcaagttcttgtaagacacctccagcccccaccctcagtttagatcgtaccaagatttccttagcatctggtggtgccctttgcccctgagggtttattgggttatagataggtagttatgacaacccgagtaatctggcggcatggggacacccagatgacagggctacactcttgtgccaagtggcaggaggtggtcaccttccaggcacgccgcctaccaccctacctgtgtgcctggattccagcaccatctccacccgtcccagagccaagcggccctcagaagtcacccagattcctgtaaaacagcatcatagttaacagccccaactctggaaccaccctggaagggccagggttccaactctgcctcccgccccacagcaaaccatgcgtaatggctcctaccttggagcatggagtgtaaatgaattaatagatgggaaggacgtagaacagtgcctggcactcaattaagtgctgtgtctgtgctgaaagttagggcctgtttgttttcaaactaaaaatgtgtttttgttcatttgtgaacgtaaatgacgtattagtagtgttttgtatcttgtttttaaaaatagctttagaattttaggttttcagagccttgtaagaattgccttctttttggagcttgccatataggttgggattgccctctccgggctgtcagggcagcaggcagattgcccagtcctcagcctgcgcacagcatctccagccagtgttcttctgccccagggcatggcccacctgcctttactatcgcctcctcccatcacacacacactctcaaagatgagaacaggaaataaaatccaatcgtaggccaggcgcagtggctcacacctgtaatcccagcactttgggaggccgaggcaggcagatcacgaggtcaggagatcgagaccatggtgaaaccctgtctctactaaaaataaaaaaaaaattagccgggcgcggtggcgggcgcctgactactcggaggctgaggccggagaatgatgtgaacccaggaggcggagcttgcagtgagtcgagattgcgccactgcactccagcctgggcgacagagcgagactccgtctcaaaaaaaaaaaaatccaatcgtaaatgctttcagtgaccatcttcccagatttttcaaggaggccatcatttttgtaccatcttccctaagttgactcagaaggtctatttctctttcctgatctcactgggtgtacagcttttcctttgcggtcttgaaggtgcataggcttggtgcctgtccaagagcctgattatttcagaaggatgagtttcatttctgaggtttctggggtagatggagcctacctcagggcctttccgcacagacttgggataccacttggtcggctgctcatcaggtcagacttatagtttaatttttatacagtttaattcaagggtcttcataataacacagccagcattttttcagcatgagtctgtgccaggcactgctctaaatgctttgcatctgttatctcctgccacccttgggggaacccctttgaggaagatcctgccggcatcttgtacagatgagaatcctgaggttcagagaagtcaagcaatctgtccaccatcacgactagccagaggcacagccaggctcccaacctgggcagcctgactcaatagggaccttaactgctgtgctgtgctgcctttgatgattctcttcagactcacaatagctcaacccagtgagttaaggcagacgagaataaagctgatgcccttcgatgttttccccagagccacatgaaatgtttgctcctctatgaactcaggtaccatgtttccgggtatttgaagagccttaggcagtacccttggggtggagattaagccatttccagtgtgggtgctctgggtggcaatattgctgtctgatcaccccacaggctcattgtgagggatgttggatgcccctaataatgaataacctccctcccagtaaggaggaagatggagatgctgttcttgggggtgagagaggatgcctgggggccacctttgtgaacgagttgcagctggacctccggggctggtgatcaggacggggagtgggaggggaagccctcacctgtgggaggaggcgctggtctctgggagtgggcagtgttggctcctagttggtgagagcaggggtgcatgcccctctctcctccccacgattcatgtctgggggctttttccggtcccctttctgaacacttcttgggcagggagtggatcactgggaaggacccaagaggagcagctgtagagggtgggaccaggggaacatttgcagaaagggagtaacctgcagggtgagatgttgcctggacacccacaagatgaggaccctggtgggacctttgaagtagcagggtcagagggcaaagggtcagggtgagtgaggggtgcagacccccaccaaaccggggcacttattaggagctcagacctgctgtaaaggggtctgcattttagcaagctttccacccatggggaagctggtttaaacctcacttgctgggcccaccccagagattctgatttggcaggtctctggtgagcccaagaatgtgacttctctggatcccccaggttctgctgctgaaggcacaccagggccatgcctggagtggacctgggagagcctcaagggaacgcaggaagagaaacagggcagccgggagaggtttaaatgcttacaggaggccaggcatggtggctcacgtctgtaatcccagcactttgggaggccgaggtgggtggatcacctgaggtcaggagttctagaccagcctggccaatatgtagaaaccccgtctctactaaaaatacaaaaattagctgggcatggtggcgggcacctgtaatcccagctactcgggaggctgaggcaggagaatcgcttgaacccgggaggcagagtttgcagtgagccgagatcatgccactgcactccagcctgggtgacgagcgagactccgtctcaaaaaataaaataaaataaaataaaataaaaataaataaaaaataaatgctgataggaaagagccagagagagggagaggtcgcactgccacagttgtttgacgtgtcagggttgttgttcatttggtgtggctttgttttggtatctgtgctgagcaattgcttggtacttgcatgtgatttcaataaatgttctgtagagactccacctttgtagccggtgacaaccaccatccacctttgggacattcccatgtccctcaatgtgttgatgaactgaactgcaaggtcatccggtggtggacattccttctcatgggggcagagcaggagtttcggcacggagcgtgcaggctctacgatgagggccagtgtcgaggaacaggtccctgggaggttttcagtctgctcagaagtgttctcatctgatctcagcatcagactgatccacagcctggctcaaacccatgaccacttgaaagctgacctatttttatttgtttcctcgagacacacttaaatgcagctaccacgattacccaaatgactgtctgcgtccatctcatggaagcctgtcattctcctgtgcttccctgggcaccagcacctttctgctctgagaagatccttcccaagcatggtcttggttcccttttgatgagccgtctagcctgctctagacggtacatttaagaattatgtgatccaagatcaaggcagatttggtaataaacttttaaaataataaaattaattaaataaaaatgggtgtgtgagccctaggaaaactccaggaaattctctgtgtgtagcatgcggctattacaataacattaataataccagagcgattatgataataatgatggcaaatggggcccctggctctgtgccaggcagcttttaaacattttacaagtgtcatttgacttaatggcctgcagctttacagggctgatgttatgagcgtgttttaccgtgaggaaatgccgccgtgtgtgtgagtgtaggtactcagccctggagggcgtcggggccgcccctcaggtctccagagagcggatacacagcggcttcagttcccagactgcttcctcagcgctcaaaagccactgcagccgccgttaggacatttgatgtttttctcattttaaaaatagcagatgcttactgcagaaaatgtgagcaatgaagaaaaagagggaattaaaatcacctgtcaccccctctcatcaaccatcgtcactgtcagtgttcgggctgttgctggtggtctctccatcagaatccattctgagtgtgagaggcacgtgactgtcagctcgctgtctcagctggaagccgatgctgtgtcactgtttctcagggtgctgctgttgtctcttcttccctcttgctgtcgtggagtccaacccaggcatgagcagttgcagaagaccaaggctcagggaggggacaggggagaggaatgtggagggtcagcattggggaacagctttcgaactgtggcctgatctgtgaggggacaaggctcaccttccagctctgtccatccctctggcaagttctctaatctttagtgaacttcattttctttatcatgaaatgggacccctgctggcagctgcagagctgttggagggaaatatccagctaaactagaagtctcctggctggaagttgctctgcaaaagagtttgtaggagtctgatatttatttagagttagttttccaggacctcactttggggtgcttggagctgcctctgtgggtctgcctccgcctccgtcctccctgatctcatctccagctgggaggagagcgcatctccatgtaagcagcctccttcttctcagagggaagccccggcagtgtcagtgctgacactgggcctgtaactgtggggatggggcaggtgagaggccctcaagagctcccggcaccccccaggcgccttcagtggggccagagtccacccctgtctttctctttccttggactgttggaagagctgaagtgaaaagtgacttgttcttatgtctctggtatctttgggcagcagggctcctgctaagcaagcccctgggggctcaaagcagcagaggctgtggccggttcccagcactggtccttgtgcaggtgtctttctgagaagggtgcatgaggcccagtgccacaggggaacgccagcccaccactggtggcatgcactctgtggtgccattctgctgtccactcatctgtgccctaggcaactttagctgatatctggaatgtcacacgctcagttgtagatgctgaagatcgagcagtgaataaggtagatggagcggtggggcagatggtgaaggaaagaaatgcgggcacgtgttagacaggggtgctgcggagagaaagagcagccaggctcagggtctagaggcgggcgccatatggacagggagtccttgaagacctggtggggaagccggcacctagcagagctgtgaaggattaaggggcctgctggtatctggggagcatgccccctaaaaaaagagcagcaggtggaggggccatgtgactagggtattgtgagtcaggtgggggcccatggccagcatgaggacaggcttgtgctgctggcgaggtgggtgttgggggcagtaatgtgaacgtgcgcttttcagcagggccgctggaggcctgtggctgtgaggggagagccatgctggctacaggtggcggtgtctggcttgcaggaatccaggtgacaagggctggctctcaagtccaaagcttcttttgagttagaggccccggatcctcccgtgggttggctatgggtgctcctaaggataacttgtaaaggggtgtgattccagttttggctagggagtgtgcccagagctttgcttctgggtgcctgtggctgcttggagtgggtggccatcttattggggtcagatgggacagtggctccgtgcagtgggaaggaagcagggcaagttagagggacgctgcactcgtcatcccaccagcgagagtcatcccaggaagccattttaagccctgcatccatgttgagacttcaggaaggctctcccacagagtgcccacccctttactgcagagaagaggtggcttcaggacatcttctccggcagccacggaggctgggccttggggcatcacgtggctccgtaggctccctggcgggtgaagagctcggcccagtggggcattcttgctgctgcagctgtgcactccattctgactcatctttgctgacaccacagcgttccgggaagtgccagttattggcctgacacgaagggctttccccacactaagcaaagcagagaaaggcattcgtgtgcagttacccccgcaacacactctgctctctgttttcagaagctgtgtgggcttggttggggtgactctggctctgtgccaggagtaaacacggagatgggggacaaaagggaatgggagaaggcagagagggggactgtgatgtgcagggcatccacgccccatggctgtgatgtcgggcagcctgtgcccaggaagggcagctggcacagcaaggggtggccagacatgtgcattcctaccctgagtgaactctggggtgagagggtatctgtctggaaggagcaagcatcggtccttttcccacagtcctctcagcaaacacaatcactggttcaaggtttggatgcacctgtgctcatgggctcagggaccagactccctcctctggccagaagcctggcaccatctgcctggtctgcccccactttagggacgtgggctgtggacacagcacctggtccacaactcccgtgtcagaggtaattgcagggagatattccttagaatggtgagacagattttattccctaattcctgacagtaggggaaggagctgcgttccctgccagttcagcagaggtgacttttggatttaaagggagtatgattagctgggcctggtggcatgtgcctgtagtcccagctactcaggaggcttaggctggagggtcacttgagcccagcattttgaggctgtgatgagccttgattgcaccactgcactccagcctgggcagtagagtcagacgctgtctctaaaaaataaaaataaataaataaataaataaataaaaataaaaaagggagaatggaggaggagaaggagggtgagcaggggctcaaatgaaaaaagccatggagctggtcagcgtgcatgtgtcaaggcggccttgtctacagctggcagtggtgaaagttagggttctgctcctcctcccaatggtgacatgcggaacagtggctcttgggtccttgagtgacacacctgagtggtggaggtgcacgcttactgctttgaaggctctaaggagggaggctggggcctggggccaggggccaggggccaggtgaggctggctggagcagccacattttcctggcagccctgtgctttcttgggctggtcctttgagggggcccagtcctcctgaggctgtggccttgacctgcagaagccatgctagagtccagctgtctcttggtgcaggggtgtaaatggcacacattgtcaatgtggggttctcctacccctcatcccccagcacccagagggagagggtgccgctgcggcaaagaggcttgaagttggtttggtttgggggatttctgttgtgagtttttaaaaattgaggttaaattctcgtaacatacttagctgacaggagggataccatgatcatgtaggtagctttcccaaggcgaggcttatccgttatactccagatgtgctgacccctatgatttccccaaatgtcagaaactgaactgtgtaatttgtgatggtgtggaactgtgttcctgctttccctgatagaaaacataaattaaaaatgtaaaaactaagtaatttatatgacataaagtgaaaagtacacaattctgtggtatttggcgcatgatgttgtcatgcagccttcatttctgtctagttccaaagcattttcatcacccaagagggaacccatccatacctgtcaggcagtcactccctcgcccccagtcgaagcgctgcccctgtgcctttgcctgttctggatgtttggcgtccagggaagggcttgaacacctttttccttggttctgtgccatcccctagtccctgtctttctggcggcctctgggctgcccgcctgcctgcctgacaccatgtgccctctgtctttgcagctcctgactacaggtccattctgagcattagtgacgaggcagccagggcacaagccctgaacgagcacctcagcacgcgtagctatgtccaggggtactcactgtcccaggcagacgtggacgcgttcaggcagctctcggccccgcccgctgacccccagctcttccacgtggctcggtggttcaggcacatagaagcgctcctgggtagcccctgtggcaaaggccagccctgcaggctccaagcaagtgagtaacagagtgggttccctggccattagaacctctctcccaaggtcaagggctttctccatcaccctggtgcttacctggcgtctgcggataccccagagggagcctcgcccaagtgtgtctcgagcaagtggcctggatgggcagatgcagcgcttgctggatggaggttgggataaaatcacgccctatggagttggttattcaggagcagtatgttcacatcactggtgtggcaggattgcctgaggtggtggggtgcagagccgctgcggctctggggttccacgtagcatgcccaggccacgggccctagccttgtgatttttagctaaggctgtgcctggctctggttgactcagttctttctctttatttcttccataagattgtagcgtgtctatcctccagctttagaattgttgaatcctaaagtattaattggcattgaacttttttttttttttttttttgagatggagtctcgctctatcgcccaggctggagtgcagtggtgcgatctccactcactgcaagctccacctcccgggttcatgccattctcctgcctcagcctcccgagtagctgggactgtaggcgcccaccaccatgcctggctaattttttgtatttttagtagagacggggtttcaccgtgttagccaggatggtctcgatctcccgacctcgtgatccacccgcctcggcctcccaaagtgctgggattacaagtgtgaaccaccgcgcccggccggcattgaactttttaaaaatcagaaataagtcattttttctctttgagatgatgtctgtcccgtagctccagcctgttggtgctggttgtgtctgtggaacgtgcctgtggttatttgcgggagatactcctgggatgcctgcatggctttgtcactctgtggcaaatctgagggggctccatgccatcatcactgaagtatgcctttgggtggcccagctcctcctgtggctgtgggcactcctccaccttcatgtgggggcaggtttagtgctgttttctggtggtcctggctgtagctggcagccttctgggggcttctccagactccgttggggcctgggattgggaacatgcccccccgcctctgccgtgggtcaggcctctgctagatcactgttttaaccaggctggaggtggggatgtcacatctcctgtgggtcgtgttttctggataactctgcagcagacactccttccccagcgtagggcagaggccgttgctgtgcaggtcacgtccttccccatgtagccgttcctgcctgagcctccagcgcggtcacccaagtgacacctgtgctgtgaggtgccttctctccaagggctcgggtgtcaggttgttccccctgccatgtgccattccaagacacagccagaggggggcaggattagggagggtgaagcgggcctggtacgtccagctcagcagtggcctgtccaggcttccctcatagggacttgttgaaagagcggcacagacgcaagcctccatccacactgtgagaggaaggaagggttttgctcttgcaaacactttttaacctacagagaggaagcagagccacgttgctgtgtaacagaatggaccatggatagcactaatggagttgctgtgccctccccaggttccaaatcccctcatcacccaggctgcgcaagaggctgccagggtctgcttgtgccaggaatgatgggcattatgtcaggcgaccctcactcaagcttgctgtacactgagcaggggctgaagggggaggtgggagctggagtctgggactgctagagcatccagtgacctcgagtgggtccaaggcgccatggagtccagtgtagtgtcctcgcccatgtccctgggatgacagtagctgtggatctccctccatgtagctgtgacaatcagagctgcttcccccactgagtgggaacgccctctctttccatggctcatactccccaagcatgcaccttccttgctggcacagtgggccatgtgcccctcctcctgctcgcccttccacctctgttggacatcccagcagcatcagatgtgcctgtgtctggccctcagtgtgcccgcctgttaccagctcctcccatgtgccttctgtgtcctgtctccaagatcctctcagacatggaaagactctgcttggcccggcgcggtggctcactcctgtaatcccagcactttgggaggccaaggcgggcggatcacgaggtcaggagattgagaccatgctcgctaagtcggtgacaacctgtctctactaaaaatacaaaaaattagccgggcgtgatggcgggtgcctatagtcccagctactcgggaggctgaggcaggagaatggcctgaacctgggaggcggagcttgcagtgagccgagatcgtgccactgtactccagcctaggtgacagagcgagactccgtctcggggtggggggttggagataatggaaaggctctgcttaacccccaggtccctactcctgtgaagccagaccccttcctggtggatcccttccctggatcaccagcctccagcacggaggtccactggatatcaggacgttgaacttgttgagcacttctcacccgcagtggaggctcagcccttccagcccgccggcctctccctaccccccgggaaggagtgtcagctatacccttcactgaggagggtgtgggtctgtcagacgccgaggccatagtttcaggaacatgaaggtttggtgttgctctcacccctccgatggaggacccttaacttcctgatgaaggatttctctccatgaaccccttgcttgggtcctatctgcatctggtgtgttgtaggcagactgcttgccacttcctggcttccctctccatcattttatcttcagcctcccacatccctgtttcaaagccatgtctctcatgagcggttcatagttggtctgttgttggatcactcaggtcagggtgggactctggaatcaacgaatgtgtgttcattttttccaaagaaacaaaagcacaggccaggcgcggtggctcacacctgtaatcccagcactttaggaggccaaggcaggcagatcacaaggtcaggagtttgagaccagcctggccaatatggtgaaaccccatccctactaaagatacaaaaattggtggggcgtggtggcaggtgcctgtagtcctagctacttgggaggctgaggcaggataatcgcttgaactcaggaggcggaggttgcagtgagttgagattgcgccagtgcacttcagccagattttatctaaaaaaaaaaaaggggggcaagggtccttatgtgatatctctcagttcttcccttttgcaaatctgaatttgtatatctgggcctggtaacccgttttcctggggagcccatcgccagctgtgtggagatagcagccttaggggagcaggaatgctggctgtggccaggcttcttggacaagctttcagtcctgtgaaccctgggccgtttcctcatagcagggtgagtgtgatgatcccgtggcctcatggctgtgtttctgggcagcgtctccagctgtctgagatggcagcagtgtcctattgaaggagctccagggtctttgtgagggaggagagtgatgggatcctagagtggccggttgaatgcctccaggcattgagtgagattctccttcaagggcttgtgaggcatttaaagtacactgaggccgagctgcacttggcctcaataagcacatgatgtttgattaagattggagattgcctacgctttagaatctgaccacctgtgaccactggaactcacctagagtgggggctcctgctgagcactggccctctctccgtctcctgccccatctcccacctgcccacagtacccccactgcccagacacagtgcagccgccctccttcctccccttggcctgttagtcatcagcgtctgccgtcctggctcgtgtggcctgagctagagccgggaggccaagagatggctggtgcccaggaccaacttccccgtgatcagtgtgtggcaatttgctggccatgctgccagaccctctggcacagaaaccagggacaggaggaggcaggatgcgagcaccctggtgagctgccaggcggcctgctggggtgggcacaggtcagtgctaggagtatccatctcgtaggccttcctggtgccactcagcagagacatgtgaagcccttcccagggccaggcaccagctggggtcagaggtgcccagcagagcataacgcagaacctggacctgtgggcgacgactgtggagaaaagtggggatctgctgagggggcagggcaggcaggagccggctgagggcaacgggaaagtcaccaggtaccgtcctccacacctagctttgccagattgacgtttcagagggtgaataatcaccctgtggctgcccctggccccagggacagagctctgccccttcagggatctcagatgcaggttgtgtaaggacagccttgtgccaggttggaagccaggcctggaagcagtgtgctcagagcagcccaggcggcccacaggcgagtggaggggaacaactagggaagtctggccaggaggaggtgactgcactgaggggctggctggcaggggtctctgcctggaggctgagaggagctcaggttatttatgaaggcagtatagacctatgtggagcttgaagcccagtgtctggatcagagtctgctgggctgtgggcccagagctgggagccagccactcctgcagtgtccgaagtgatgaggaggggctgggctggagccagtcttgcctgctggccgtggccacagggggtcctttctgctctgactcctggcttctgctgccagggcttggaggcttggaggtggcctctgtcccaacaagagtcctcaaaatcctcagtttgtccaggtgagggatcctgggtgggggaggttcccagggctgcggcagaacagaccataccttgtcagtgtcaagccctgactgacccaggagtgccaggtggtggtgtgctcactgccagaaaggggccagtatttgaagagcagtggaatgtgctgggcacgctgtgcaggcattcctccgccctcctggggctctaagggtgttattggggtatgctgccatacagaatattagaaagcaaaagaaagacgcggttgtcgggaggcagagcttgcagtgagccgagatcacaccactgcactctggcctgggcgacagagcgagactccgtctaaaaaaaaaaaaagacgcagttgtctttgacctgcgtaatgttgaccgagattcgtgtggtttcacattgtttaaatttcatggaaaactatggtcccgttgtaaaaaccaagtctccaggtgaagaggcgacttgcacttcctggtgctgcccctggaccctgatcctgctctctctgcctcccaggcaaaggccggcgtgtgcagccccagtggtcccctcctgctgggacccagccatgcagactccacctttacaacagcctcaccaggaacaaggtaaggagaacacagatgccgtggcacacgcacacaatggggaggcaggaggcaggacagcccatgtgccttgtcgcacaacagacttctctgttccttgtgttgggatctggagttccataaatccaggtttaagatccttcagtcacttccatgttatagtctctgtggcccagaggcagagctgtcctctgaaacccagacacgtgaagtatcatgcctcatgtggaagcctgcccatgacttctgggcatggatcaccctggcttgtctctcggactctgcccaaccatgagtacttgaggtcatccacagccacgcctttcaggaggacgcgtggttgcagcaggtggcactgtatgagccaagcaggatggacaaaacggcaaactggctggatgttgttgggagcacagcaggttttgagaagaaggcaggattggttcctaacagaatggggtttgcatggtttgcttggctcagggcatggccagtgactccagtgatttcagaccaggctctgggcggggctgcttggatttccatcagggagcatgtttggcagacagagagtcaggtgtgagggagttcatggccttccttgggaaactggttgaggatgatgcccccagagaggtctgagggtgctgggatgttggggagtggtgccagagcagcaccacgattcaggggtcctggcctccaagccgcgctcccccaacagggactgaccctggccaagtgttgtctgcctcagtttcttcatccgtaaaaagaaaatgacataacctacgtcctagagtgtactgcatattgaatatttagctcagggcctggcacatggtaggtactcagtaaatattagctgtgttattgttaaataagcagcatttcaacaatcaataaaatcattgattccctttatcgcctccctccatagatgagtagaaccccagggaggaagaggccccacccacccagggctcagttggtgggaggtgccgtacatctcactgggctcccactgagactgtgacttttcacagtaaaacaaaatggtctctgttgaattgtttacactaaacacaaaccacactgtgatgtttgttgctgtttttggtaatcctgtgcagtgtttcttgcatttcttgtgatcgtcattccttcattcctaacaaaggaagtgttcatacctcaagatgggaaaaaggtgacgtggtattgctgtgggccaaccgtctatgacgcatctcacatggggcacgccaggtaggtccaccgcggggtgtccctgcagcttctgcagttgcacgcagaagtcagagccattgggatccacagcagcgatcttaggtccacaaagatcttagatctgctacagagacctgagatttgaggaatcaagactgaatttcttctcttatttttaagatgaaaattttaatgccataagtaatctatattcactgcagaaagactacagatcaccaaaaagaaaatgtccatagccccactgctaacatgctggactcgacctgggcactttttctcacataccttaaagttttctctcatccctcaagctctcgtggggtccccagatgctgagttcccgtgacactcagacctgacaggcctgacgctgggttggctgtgaccgccccccgaccactggatggtcatggctgtagctcctgacgagtagctggctgttggggtaaatgccacagagtccttttatgtgttcatgttttagttgcagtgccaaggtcatgtatagtcaacccttgaacaacctggagggtagagggtgtgaccctctgcacagttgaaaatccacacataacttttgattccccaaaaacttcaccactaaaatagcctcctgttgaccaatagcatgccagtcaatgaacacatattttgtatatacattacatactgtattcctaatgataaaggaagccagagaaaagaaaatattatgaagaaaatcataagggagaggcaatatatttactattcattaggtggaagtggatcattataaaggtcatcatccttgccatcttcacgttgagtagactgaggaggagaagggggggtcttgctgtttcagggatggcagagaaaatcatatataaatgcactcatgcagttcaaacacgtgttgttggaggttaagctatacatatcgtctggtgtggaaatgtttgttttttcattgctttaggtcctacatctcttttgatatcttgagaagagtgttgaaggattacttcaaatttgatgtcttttattgcatgaacattacggatattgatgacaaggtaaagggaatttgtaagattaaattttaaatgcaattggatggtgtaaaagaagatagaactttcgcataagtaaataatgtaggcttgagctagcttgtgttttcacctgataaacatcattttaatcccctcagtgagttaatattaccacttctgctactgatatgatcatttctatgatgttcagacacggttagaaacctgcatgttgctcaggggtcggtagccctgggtgttttgcagaaggaaggcctcccacagcacgcacttcgacatgtggcttgcaggggaagctggggcccccagggctcatttcattaagcgtcagaaagatcatgttaggccttgggcactacttggcaggtgggagatggagggtggtgtttctatttgatgatggtgtgcacgtccggggcccacagttgtctcccaccaccctcaccctcacttagagttggccaagggagagagtggcctgctgcagagggatgcatgtgggatccaagcatcactccccaatgtctgccttccctccccagatcatcaagagggcccggcagaaccacctgttcgagcagtatcgggagaagaggcctgaagcggcacagctcttggaggatgttcaggccgccctgaag

SEQ ID NO: 11065 - DNA, 550 bp, Homo sapiens
acttccggggcggcggttgcatcagattctaggaagtgtctgtagccgcagctgcgggtccgggattcccagccatggcagattcctccgggcagcaggtctccaggtgaagaggcgacttgcacttcctggtgctgcccctggaccctgatcctgctctctctgcctcccaggcaaaggccggcgtgtgcagccccagtggtcccctcctgctgggacccagccatgcagactccacctttacaacagcctcaccaggaacaaggaagtgttcatacctcaagatgggaaaaaggtgacgtggtattgctgtgggccaaccgtctatgacgcatctcacatggggcacgccaggtcctacatctcttttgatatcttgagaagagtgttgaaggattacttcaaatttgatgtcttttattgcatgaacattacggatattgatgacaagatcatcaagagggcccggcagaaccacctgttcgagcagtatcgggagaagaggcctgaagcggcacagctcttggaggatgttcaggccgccctgaag

SEQ ID NO: 11066 - DNA, 5732 bp, Homo sapiens
gggattcccagccatggcagattcctccgggcagcagggcaaaggccggcgtgtgcagccccagtggtcccctcctgctgggacccagccatgcagactccacctttacaacagcctcaccaggaacaagtgtttcttgcatttcttgtgatcgtcattccttcattcctaacaaaggaagtgttcatacctcaagatgggaaaaaggtgacgtggtattgctgtgggccaaccgtctatgacgcatctcacatggggcacgccaggtcctacatctcttttgatatcttgagaagagtgttgaaggattacttcaaatttgatgtcttttattgcatgaacattacggatattgatgacaagatcatcaagagggcccggcagaaccacctgttcgagcagtatcgggagaagaggcctgaagcggcacagctcttggaggatgttcaggccgccctgaagccattttcagtaaaattaaatgagaccacggatcccgataaaaagcagatgctcgaacggattcagcacgcagtgcagcttgccacagagccacttgagaaagctgtgcagtccagactcacgggagaggaagtcaacagctgtgtggaggtgttgctggaagaagccaaggatttgctctctgactggctggattctacacttggctgtgatgtcactgacaattccatcttctccaagctgcccaagttctgggagggggacttccacagagacatggaagctctgaatgttctccctccagatgtcttaacccgggttagtgagtatgtgccagaaattgtgaactttgtccagaagattgtggacaacggttacgggtaagcacaagggccttccctagggagggaagggctgcagaacatcgcacagggaggagctccccagctctgagcctgagtttgggaagcagaggagcaggtgttctggggctgcgtagctagaagtcccagcagacttcctcctacaactctgggcccacccaggggctgaggagcatgggtctgcactgtcctgggggccatggtgagaacctaacccagaatctgctgggaagctcggcagccaagaccatcagtcatggggccccagagctgcataatggtgagtgcgaatactgctgggccttcacagacatcagtgccattgcgtagacattttgagagtgctagtcctggtgtcatatcccgaaggaggatgcatttcatcagcatctatcgcttggctatgattttagtgactttttgttggcaaatccatcatacacttccctggcccgtattgtctcaatctccaaagtaagcattttcagaaatggccaacaaatggaaatgcagacaggaacccggttatctgtctgtagtgtgtagggaccagccccacagggtcggtgggtttttctccccatgtgtggagatgagagattgtagaaataaagacacaagacaaagagataaaagagaagacagctgggcccgggggaccactaccaccaagacgcggagaccggtagtggccccgaatgccaggctgcactgatatttattggatacaagacaaaggggtaggttaaggagagtgagccatcttcaatgataggtaaggccacgtgggtcacgtgtccactggacagggggcccttccctgcctggcagccaaggcagagagagagaggagacagagagaggcagcttacgccattatttctgcatatcagagacttttagtactttcactaatttgctactgctatctagaaggtagagccaggtgtacaggatggaacatgaaggaggactaggagcgtgaccgctgaagcacagcatcacagggagacggttaggcctccggataactgcgggcgagcctgactcatgtcaggccctccacaagaggtggaggagcagagtcttctccagactcccgcggggcaagggagactccctttcccggtctgctaagtagcgggtgtttttccttgacacttacgctaccgctagaccacagtccgcttggcaacgggcatcctcccagacgctggcgttaccactagaccaaggaacccttctggtggccgtgtccgggcataacaggaggttcacactcttgtcttctggtcactcctcactatgtcccctcagctgctatctctgtatggcctggtttttcctagattatgattatagagcgaggattattataatattggaataaagagtaattgctacaaactaatgattaatgatattcatatataatcatatctaagatctatatctggtataactattcttattttatattttattatactggaacagctcgtgccctcggtctcttgcctcggcacctgggtggcttgccgcccacagtagtgctcagcactgtaccgtgcgcctgctcccagagacccactgtgtccagcctcagattgcttccctcccacaggaaccacacaggctggatgaaagagaaacaagaggttgtgacagtgccaggaacggggcagactcttaagcagtagcgctgcttctctccccacttcacacaaactactgtggggcagcataagagcctgtgccaagccgagaggcatgggcaagccgaagctcagagaggacaggtcattccagactggagtaatctagagtgcttcttggaggccaagagcctcagctaagctaatgggtagagtgtggacattcagggaaaggtgaggccacacaagaatgaggacggcagcagccctgagcaaggcagggtgggagctgcatgggtcacaggacgccaggcagagggacgagctgcccagggcaggcaggctgcctccgcagcgggatgggccctggtgtcccactcagtccaaacagctgatacggttttcagtggccaccacagagagtagataggccacagatttcgcacttttatagccctgctttattttgttactgtcatcctgctgacacactttcgggtctgttagatgcacccacccaattccttttctgttttccagctatgtctccaatgggtctgtctactttgatacagcgaagtttgcttctagcgagaagcactcctatgggaagctggtgcctgaggccgttggagatcagaaagcccttcaagaaggggaaggtgacctgagcatctctgcagaccgcctgagtgagaagcgctctcccaacgactttgccttatggaaggcctctaagcccggagaaccgtcctggccgtgcccttggggaaagggtcgtccgggctggcatatcgagtgctcggccatggcaggcaccctcctaggggcttcgatggacattcacggaggtgggttcgacctccggttcccccaccatgacaatgagctggcacagtcggaggcctactttgaaaacgactgctgggtcaggtacttcctgcacacaggccacctgaccattgcaggctgcaaaatgtcaaagtcactaaaaaacttcatcaccattaaagatgccttgaaaaagcactcagggcgttggctgtcttgtgtccccccacagcacggcagttgcggctggccttcctcatgcactcgtggaaggacaccctggactactccagcaacaccatggagtcagcgcttcaatatgagaagttcttgaatgtgagtccccagccccttcctggaggttggtggagcagcctcccctgcacagtgggcaccttgtgcagtggtgataggtgcaccagcctcccgatgtctctaatggagaccagcacatgggtggaagcacctccatgctagtgggtataacaggctcggggccactcctgaaatggctgacggctcagcagagtggacagaggcctcgtcctcctagtcactgcagtgcacgtccttctgacttgtactttccaccaaatgagcatctgtaaacctaaagcaagagcatgtttctgtcaaagaaatatcttttcctttctttctgaccacttgtgtaattctggtctttcagatttttaccaaaaataaaatcacagcagtagaaagttgtaacagatatttcaggatggaaaagttgcctaaatgctgttaaactgatttttctaacttcaggagtttttcttaaatgtgaaagatatccttcgcgctcctgttgacatcactggtcagtttgagaagtggggagaagaagaagcagaactgaataagaagtaaggtggtgccatttctttggggtttttgagcatgcccatgttctatgcctagcctcgcatcttggccaccatgtgtcctggactgtcgaggaagggctggggacactgtcgtacgttgtgcagaattaattcaggataggcggctctgctaatgggagctgctctgggtgttgaagtgcatggagaatttcttttttgttttttctttttgagacggagtttcgcccttgttgcccaggctggagtgcagtggcgtgatctcggctcaccacaacctccacctcccgggttcgagcgattctcctgcctcagcctcccgagtagctggggttacaggcatgcgccaccatacctggctaatttcagatttttagtagaggtgggggtctctccatgtttgtcaggctggtctcgaactcccgacctcaggtgatccgcccacctcagcctcccaaagtgctgggattataggcgtgagccactgcgcctggccacatggggaatttctatggtgtgttttcaggtctgacttcacattccttcctctttgttgctcagcttttatgacaagaagacagcaattcacaaagccctctgtgacaatgttgacacccgcaccgtcatggaagagatgcgggccttggtcagtcagtgcaacctctatatggcagcccggaaagccgtgaggaagaggcccaaccaggctctgctggagaacatcgccctgtacctcacccatatgctgaagatctttggggccgtagaagaggacagctccctgggattcccggtcggagggcctggaaccagcctcagtctcgaggccacagtcatgccctaccttcaggtgttatcagaattccgagaaggagtgcggaagattgcccgagagcaaaaagtccctgagattctgcagctcagcgatgccctgcgggacaacatcctgcccgagcttggggtgcggtttgaagaccacgaaggactgcccacagtggtgaaactggtagacagaaacaccttattaaaagagagagaagaaaagagacgggttgaagaggagaagaggaagaagaaagaggaggcggcccggaggaaacaggaacaagaagcagcaaagctggccaagatgaagattccccccagtgagatgttcttgtcagaaaccgacaaatactccaagtttgatgaaaatggtctgcccacacatgacatggagggcaaagagctcagcaaagggcaagccaagaagctgaagaagctcttcgaggctcaggagaagctctacaaggaatatctgcagatggcccagaatggaagcttccagtgagggggcacaggactgactttttaaaccattgtggactagtggctgctgtctgcctcagtgacaatgtcccagcgctcctatcatgtttacagtcacccttgggtcctaaattaagagttgtgttcatgtaggttcgtgtcgtcgttggctctgagacattgataataaatttttctcaacagtg

SEQ ID NO: 11067 - DNA, 18202 bp, Homo sapiens
attctaggaagtgtctgtagccgcagctgcgggtccgggattcccagccatggcagattcctccgggcagcagggtgagcggcgcggccgggccaggctgagggcggctgggggcctgactgggcgctgggtgctcggctcgaagggcagcgagtccttatgtctgaggggcccgggtgcatgggttctgaggggcagctgtgtccgtggtctgaggggcggcagtgcccgaggtctgaggggtgtcagtgcgcggggtctgagggacggcacgtccttgggtccgaggggcgggggtgctcggggtctgaggggtgtcagtgcccggggtctgagggacggcgggtcctgaggttcgaggggtggcacgtcctaggatccgaaggacaacgggtgcccggctccgagggacggccactgggacccctgggactcctgcgtgagggtctgccagacccgtggctggagcacagaccccgcggggacccgagcccgagcggggcgctgcccagaccacccagcctcagtttcctcacttggttcctgccgaggtccccttgcatcctcaccccgggaggtggccctacatcaaacagcctttccccagccggtgcctgggcgggccctcgctccctcttgccccagctggcctttaggggggagacaaaggcccaagggttgttttggttttctgcccagacctggcagcttccgggaggtgggcggagggcacctgaggttggtatttagggaaatggggcagaggacgccaggggtacgcgtacacacagtaaaagggcttggggctttacgaaggctttcatctccagttccgcaggcagtccactgcaagctgattgtcagagcattactgccccattttattgccaacccgggaggttccccagggacacagctgtgtcagctcccccagtcactcatgtcaccagcgggtagaccttgagagaccagtgggttcttctctcactgtccctccagcaagattttaggtgctggaaaggcaagagactgaatcagaaagcccagattcctaacagtctggagcagcctttccaaaggaaacattctcagtatctagtttttaattcttttggctggcaaaaattagatgcaagttcttgtaagacacctccagcccccaccctcagtttagatcgtaccaagatttccttagcatctggtggtgccctttgcccctgagggtttattgggttatagataggtagttatgacaacccgagtaatctggcggcatggggacacccagatgacagggctacactcttgtgccaagtggcaggaggtggtcaccttccaggcacgccgcctaccaccctacctgtgtgcctggattccagcaccatctccacccgtcccagagccaagcggccctcagaagtcacccagattcctgtaaaacagcatcatagttaacagccccaactctggaaccaccctggaagggccagggttccaactctgcctcccgccccacagcaaaccatgcgtaatggctcctaccttggagcatggagtgtaaatgaattaatagatgggaaggacgtagaacagtgcctggcactcaattaagtgctgtgtctgtgctgaaagttagggcctgtttgttttcaaactaaaaatgtgtttttgttcatttgtgaacgtaaatgacgtattagtagtgttttgtatcttgtttttaaaaatagctttagaattttaggttttcagagccttgtaagaattgccttctttttggagcttgccatataggttgggattgccctctccgggctgtcagggcagcaggcagattgcccagtcctcagcctgcgcacagcatctccagccagtgttcttctgccccagggcatggcccacctgcctttactatcgcctcctcccatcacacacacactctcaaagatgagaacaggaaataaaatccaatcgtaggccaggcgcagtggctcacacctgtaatcccagcactttgggaggccgaggcaggcagatcacgaggtcaggagatcgagaccatggtgaaaccctgtctctactaaaaataaaaaaaaaattagccgggcgcggtggcgggcgcctgactactcggaggctgaggccggagaatgatgtgaacccaggaggcggagcttgcagtgagtcgagattgcgccactgcactccagcctgggcgacagagcgagactccgtctcaaaaaaaaaaaaatccaatcgtaaatgctttcagtgaccatcttcccagatttttcaaggaggccatcatttttgtaccatcttccctaagttgactcagaaggtctatttctctttcctgatctcactgggtgtacagcttttcctttgcggtcttgaaggtgcataggcttggtgcctgtccaagagcctgattatttcagaaggatgagtttcatttctgaggtttctggggtagatggagcctacctcagggcctttccgcacagacttgggataccacttggtcggctgctcatcaggtcagacttatagtttaatttttatacagtttaattcaagggtcttcataataacacagccagcattttttcagcatgagtctgtgccaggcactgctctaaatgctttgcatctgttatctcctgccacccttgggggaacccctttgaggaagatcctgccggcatcttgtacagatgagaatcctgaggttcagagaagtcaagcaatctgtccaccatcacgactagccagaggcacagccaggctcccaacctgggcagcctgactcaatagggaccttaactgctgtgctgtgctgcctttgatgattctcttcagactcacaatagctcaacccagtgagttaaggcagacgagaataaagctgatgcccttcgatgttttccccagagccacatgaaatgtttgctcctctatgaactcaggtaccatgtttccgggtatttgaagagccttaggcagtacccttggggtggagattaagccatttccagtgtgggtgctctgggtggcaatattgctgtctgatcaccccacaggctcattgtgagggatgttggatgcccctaataatgaataacctccctcccagtaaggaggaagatggagatgctgttcttgggggtgagagaggatgcctgggggccacctttgtgaacgagttgcagctggacctccggggctggtgatcaggacggggagtgggaggggaagccctcacctgtgggaggaggcgctggtctctgggagtgggcagtgttggctcctagttggtgagagcaggggtgcatgcccctctctcctccccacgattcatgtctgggggctttttccggtcccctttctgaacacttcttgggcagggagtggatcactgggaaggacccaagaggagcagctgtagagggtgggaccaggggaacatttgcagaaagggagtaacctgcagggtgagatgttgcctggacacccacaagatgaggaccctggtgggacctttgaagtagcagggtcagagggcaaagggtcagggtgagtgaggggtgcagacccccaccaaaccggggcacttattaggagctcagacctgctgtaaaggggtctgcattttagcaagctttccacccatggggaagctggtttaaacctcacttgctgggcccaccccagagattctgatttggcaggtctctggtgagcccaagaatgtgacttctctggatcccccaggttctgctgctgaaggcacaccagggccatgcctggagtggacctgggagagcctcaagggaacgcaggaagagaaacagggcagccgggagaggtttaaatgcttacaggaggccaggcatggtggctcacgtctgtaatcccagcactttgggaggccgaggtgggtggatcacctgaggtcaggagttctagaccagcctggccaatatgtagaaaccccgtctctactaaaaatacaaaaattagctgggcatggtggcgggcacctgtaatcccagctactcgggaggctgaggcaggagaatcgcttgaacccgggaggcagagtttgcagtgagccgagatcatgccactgcactccagcctgggtgacgagcgagactccgtctcaaaaaataaaataaaataaaataaaataaaaataaataaaaaataaatgctgataggaaagagccagagagagggagaggtcgcactgccacagttgtttgacgtgtcagggttgttgttcatttggtgtggctttgttttggtatctgtgctgagcaattgcttggtacttgcatgtgatttcaataaatgttctgtagagactccacctttgtagccggtgacaaccaccatccacctttgggacattcccatgtccctcaatgtgttgatgaactgaactgcaaggtcatccggtggtggacattccttctcatgggggcagagcaggagtttcggcacggagcgtgcaggctctacgatgagggccagtgtcgaggaacaggtccctgggaggttttcagtctgctcagaagtgttctcatctgatctcagcatcagactgatccacagcctggctcaaacccatgaccacttgaaagctgacctatttttatttgtttcctcgagacacacttaaatgcagctaccacgattacccaaatgactgtctgcgtccatctcatggaagcctgtcattctcctgtgcttccctgggcaccagcacctttctgctctgagaagatccttcccaagcatggtcttggttcccttttgatgagccgtctagcctgctctagacggtacatttaagaattatgtgatccaagatcaaggcagatttggtaataaacttttaaaataataaaattaattaaataaaaatgggtgtgtgagccctaggaaaactccaggaaattctctgtgtgtagcatgcggctattacaataacattaataataccagagcgattatgataataatgatggcaaatggggcccctggctctgtgccaggcagcttttaaacattttacaagtgtcatttgacttaatggcctgcagctttacagggctgatgttatgagcgtgttttaccgtgaggaaatgccgccgtgtgtgtgagtgtaggtactcagccctggagggcgtcggggccgcccctcaggtctccagagagcggatacacagcggcttcagttcccagactgcttcctcagcgctcaaaagccactgcagccgccgttaggacatttgatgtttttctcattttaaaaatagcagatgcttactgcagaaaatgtgagcaatgaagaaaaagagggaattaaaatcacctgtcaccccctctcatcaaccatcgtcactgtcagtgttcgggctgttgctggtggtctctccatcagaatccattctgagtgtgagaggcacgtgactgtcagctcgctgtctcagctggaagccgatgctgtgtcactgtttctcagggtgctgctgttgtctcttcttccctcttgctgtcgtggagtccaacccaggcatgagcagttgcagaagaccaaggctcagggaggggacaggggagaggaatgtggagggtcagcattggggaacagctttcgaactgtggcctgatctgtgaggggacaaggctcaccttccagctctgtccatccctctggcaagttctctaatctttagtgaacttcattttctttatcatgaaatgggacccctgctggcagctgcagagctgttggagggaaatatccagctaaactagaagtctcctggctggaagttgctctgcaaaagagtttgtaggagtctgatatttatttagagttagttttccaggacctcactttggggtgcttggagctgcctctgtgggtctgcctccgcctccgtcctccctgatctcatctccagctgggaggagagcgcatctccatgtaagcagcctccttcttctcagagggaagccccggcagtgtcagtgctgacactgggcctgtaactgtggggatggggcaggtgagaggccctcaagagctcccggcaccccccaggcgccttcagtggggccagagtccacccctgtctttctctttccttggactgttggaagagctgaagtgaaaagtgacttgttcttatgtctctggtatctttgggcagcagggctcctgctaagcaagcccctgggggctcaaagcagcagaggctgtggccggttcccagcactggtccttgtgcaggtgtctttctgagaagggtgcatgaggcccagtgccacaggggaacgccagcccaccactggtggcatgcactctgtggtgccattctgctgtccactcatctgtgccctaggcaactttagctgatatctggaatgtcacacgctcagttgtagatgctgaagatcgagcagtgaataaggtagatggagcggtggggcagatggtgaaggaaagaaatgcgggcacgtgttagacaggggtgctgcggagagaaagagcagccaggctcagggtctagaggcgggcgccatatggacagggagtccttgaagacctggtggggaagccggcacctagcagagctgtgaaggattaaggggcctgctggtatctggggagcatgccccctaaaaaaagagcagcaggtggaggggccatgtgactagggtattgtgagtcaggtgggggcccatggccagcatgaggacaggcttgtgctgctggcgaggtgggtgttgggggcagtaatgtgaacgtgcgcttttcagcagggccgctggaggcctgtggctgtgaggggagagccatgctggctacaggtggcggtgtctggcttgcaggaatccaggtgacaagggctggctctcaagtccaaagcttcttttgagttagaggccccggatcctcccgtgggttggctatgggtgctcctaaggataacttgtaaaggggtgtgattccagttttggctagggagtgtgcccagagctttgcttctgggtgcctgtggctgcttggagtgggtggccatcttattggggtcagatgggacagtggctccgtgcagtgggaaggaagcagggcaagttagagggacgctgcactcgtcatcccaccagcgagagtcatcccaggaagccattttaagccctgcatccatgttgagacttcaggaaggctctcccacagagtgcccacccctttactgcagagaagaggtggcttcaggacatcttctccggcagccacggaggctgggccttggggcatcacgtggctccgtaggctccctggcgggtgaagagctcggcccagtggggcattcttgctgctgcagctgtgcactccattctgactcatctttgctgacaccacagcgttccgggaagtgccagttattggcctgacacgaagggctttccccacactaagcaaagcagagaaaggcattcgtgtgcagttacccccgcaacacactctgctctctgttttcagaagctgtgtgggcttggttggggtgactctggctctgtgccaggagtaaacacggagatgggggacaaaagggaatgggagaaggcagagagggggactgtgatgtgcagggcatccacgccccatggctgtgatgtcgggcagcctgtgcccaggaagggcagctggcacagcaaggggtggccagacatgtgcattcctaccctgagtgaactctggggtgagagggtatctgtctggaaggagcaagcatcggtccttttcccacagtcctctcagcaaacacaatcactggttcaaggtttggatgcacctgtgctcatgggctcagggaccagactccctcctctggccagaagcctggcaccatctgcctggtctgcccccactttagggacgtgggctgtggacacagcacctggtccacaactcccgtgtcagaggtaattgcagggagatattccttagaatggtgagacagattttattccctaattcctgacagtaggggaaggagctgcgttccctgccagttcagcagaggtgacttttggatttaaagggagtatgattagctgggcctggtggcatgtgcctgtagtcccagctactcaggaggcttaggctggagggtcacttgagcccagcattttgaggctgtgatgagccttgattgcaccactgcactccagcctgggcagtagagtcagacgctgtctctaaaaaataaaaataaataaataaataaataaataaaaataaaaaagggagaatggaggaggagaaggagggtgagcaggggctcaaatgaaaaaagccatggagctggtcagcgtgcatgtgtcaaggcggccttgtctacagctggcagtggtgaaagttagggttctgctcctcctcccaatggtgacatgcggaacagtggctcttgggtccttgagtgacacacctgagtggtggaggtgcacgcttactgctttgaaggctctaaggagggaggctggggcctggggccaggggccaggggccaggtgaggctggctggagcagccacattttcctggcagccctgtgctttcttgggctggtcctttgagggggcccagtcctcctgaggctgtggccttgacctgcagaagccatgctagagtccagctgtctcttggtgcaggggtgtaaatggcacacattgtcaatgtggggttctcctacccctcatcccccagcacccagagggagagggtgccgctgcggcaaagaggcttgaagttggtttggtttgggggatttctgttgtgagtttttaaaaattgaggttaaattctcgtaacatacttagctgacaggagggataccatgatcatgtaggtagctttcccaaggcgaggcttatccgttatactccagatgtgctgacccctatgatttccccaaatgtcagaaactgaactgtgtaatttgtgatggtgtggaactgtgttcctgctttccctgatagaaaacataaattaaaaatgtaaaaactaagtaatttatatgacataaagtgaaaagtacacaattctgtggtatttggcgcatgatgttgtcatgcagccttcatttctgtctagttccaaagcattttcatcacccaagagggaacccatccatacctgtcaggcagtcactccctcgcccccagtcgaagcgctgcccctgtgcctttgcctgttctggatgtttggcgtccagggaagggcttgaacacctttttccttggttctgtgccatcccctagtccctgtctttctggcggcctctgggctgcccgcctgcctgcctgacaccatgtgccctctgtctttgcagctcctgactacaggtccattctgagcattagtgacgaggcagccagggcacaagccctgaacgagcacctcagcacgcgtagctatgtccaggggtactcactgtcccaggcagacgtggacgcgttcaggcagctctcggccccgcccgctgacccccagctcttccacgtggctcggtggttcaggcacatagaagcgctcctgggtagcccctgtggcaaaggccagccctgcaggctccaagcaagtgagtaacagagtgggttccctggccattagaacctctctcccaaggtcaagggctttctccatcaccctggtgcttacctggcgtctgcggataccccagagggagcctcgcccaagtgtgtctcgagcaagtggcctggatgggcagatgcagcgcttgctggatggaggttgggataaaatcacgccctatggagttggttattcaggagcagtatgttcacatcactggtgtggcaggattgcctgaggtggtggggtgcagagccgctgcggctctggggttccacgtagcatgcccaggccacgggccctagccttgtgatttttagctaaggctgtgcctggctctggttgactcagttctttctctttatttcttccataagattgtagcgtgtctatcctccagctttagaattgttgaatcctaaagtattaattggcattgaacttttttttttttttttttttgagatggagtctcgctctatcgcccaggctggagtgcagtggtgcgatctccactcactgcaagctccacctcccgggttcatgccattctcctgcctcagcctcccgagtagctgggactgtaggcgcccaccaccatgcctggctaattttttgtatttttagtagagacggggtttcaccgtgttagccaggatggtctcgatctcccgacctcgtgatccacccgcctcggcctcccaaagtgctgggattacaagtgtgaaccaccgcgcccggccggcattgaactttttaaaaatcagaaataagtcattttttctctttgagatgatgtctgtcccgtagctccagcctgttggtgctggttgtgtctgtggaacgtgcctgtggttatttgcgggagatactcctgggatgcctgcatggctttgtcactctgtggcaaatctgagggggctccatgccatcatcactgaagtatgcctttgggtggcccagctcctcctgtggctgtgggcactcctccaccttcatgtgggggcaggtttagtgctgttttctggtggtcctggctgtagctggcagccttctgggggcttctccagactccgttggggcctgggattgggaacatgcccccccgcctctgccgtgggtcaggcctctgctagatcactgttttaaccaggctggaggtggggatgtcacatctcctgtgggtcgtgttttctggataactctgcagcagacactccttccccagcgtagggcagaggccgttgctgtgcaggtcacgtccttccccatgtagccgttcctgcctgagcctccagcgcggtcacccaagtgacacctgtgctgtgaggtgccttctctccaagggctcgggtgtcaggttgttccccctgccatgtgccattccaagacacagccagaggggggcaggattagggagggtgaagcgggcctggtacgtccagctcagcagtggcctgtccaggcttccctcatagggacttgttgaaagagcggcacagacgcaagcctccatccacactgtgagaggaaggaagggttttgctcttgcaaacactttttaacctacagagaggaagcagagccacgttgctgtgtaacagaatggaccatggatagcactaatggagttgctgtgccctccccaggttccaaatcccctcatcacccaggctgcgcaagaggctgccagggtctgcttgtgccaggaatgatgggcattatgtcaggcgaccctcactcaagcttgctgtacactgagcaggggctgaagggggaggtgggagctggagtctgggactgctagagcatccagtgacctcgagtgggtccaaggcgccatggagtccagtgtagtgtcctcgcccatgtccctgggatgacagtagctgtggatctccctccatgtagctgtgacaatcagagctgcttcccccactgagtgggaacgccctctctttccatggctcatactccccaagcatgcaccttccttgctggcacagtgggccatgtgcccctcctcctgctcgcccttccacctctgttggacatcccagcagcatcagatgtgcctgtgtctggccctcagtgtgcccgcctgttaccagctcctcccatgtgccttctgtgtcctgtctccaagatcctctcagacatggaaagactctgcttggcccggcgcggtggctcactcctgtaatcccagcactttgggaggccaaggcgggcggatcacgaggtcaggagattgagaccatgctcgctaagtcggtgacaacctgtctctactaaaaatacaaaaaattagccgggcgtgatggcgggtgcctatagtcccagctactcgggaggctgaggcaggagaatggcctgaacctgggaggcggagcttgcagtgagccgagatcgtgccactgtactccagcctaggtgacagagcgagactccgtctcggggtggggggttggagataatggaaaggctctgcttaacccccaggtccctactcctgtgaagccagaccccttcctggtggatcccttccctggatcaccagcctccagcacggaggtccactggatatcaggacgttgaacttgttgagcacttctcacccgcagtggaggctcagcccttccagcccgccggcctctccctaccccccgggaaggagtgtcagctatacccttcactgaggagggtgtgggtctgtcagacgccgaggccatagtttcaggaacatgaaggtttggtgttgctctcacccctccgatggaggacccttaacttcctgatgaaggatttctctccatgaaccccttgcttgggtcctatctgcatctggtgtgttgtaggcagactgcttgccacttcctggcttccctctccatcattttatcttcagcctcccacatccctgtttcaaagccatgtctctcatgagcggttcatagttggtctgttgttggatcactcaggtcagggtgggactctggaatcaacgaatgtgtgttcattttttccaaagaaacaaaagcacaggccaggcgcggtggctcacacctgtaatcccagcactttaggaggccaaggcaggcagatcacaaggtcaggagtttgagaccagcctggccaatatggtgaaaccccatccctactaaagatacaaaaattggtggggcgtggtggcaggtgcctgtagtcctagctacttgggaggctgaggcaggataatcgcttgaactcaggaggcggaggttgcagtgagttgagattgcgccagtgcacttcagccagattttatctaaaaaaaaaaaaggggggcaagggtccttatgtgatatctctcagttcttcccttttgcaaatctgaatttgtatatctgggcctggtaacccgttttcctggggagcccatcgccagctgtgtggagatagcagccttaggggagcaggaatgctggctgtggccaggcttcttggacaagctttcagtcctgtgaaccctgggccgtttcctcatagcagggtgagtgtgatgatcccgtggcctcatggctgtgtttctgggcagcgtctccagctgtctgagatggcagcagtgtcctattgaaggagctccagggtctttgtgagggaggagagtgatgggatcctagagtggccggttgaatgcctccaggcattgagtgagattctccttcaagggcttgtgaggcatttaaagtacactgaggccgagctgcacttggcctcaataagcacatgatgtttgattaagattggagattgcctacgctttagaatctgaccacctgtgaccactggaactcacctagagtgggggctcctgctgagcactggccctctctccgtctcctgccccatctcccacctgcccacagtacccccactgcccagacacagtgcagccgccctccttcctccccttggcctgttagtcatcagcgtctgccgtcctggctcgtgtggcctgagctagagccgggaggccaagagatggctggtgcccaggaccaacttccccgtgatcagtgtgtggcaatttgctggccatgctgccagaccctctggcacagaaaccagggacaggaggaggcaggatgcgagcaccctggtgagctgccaggcggcctgctggggtgggcacaggtcagtgctaggagtatccatctcgtaggccttcctggtgccactcagcagagacatgtgaagcccttcccagggccaggcaccagctggggtcagaggtgcccagcagagcataacgcagaacctggacctgtgggcgacgactgtggagaaaagtggggatctgctgagggggcagggcaggcaggagccggctgagggcaacgggaaagtcaccaggtaccgtcctccacacctagctttgccagattgacgtttcagagggtgaataatcaccctgtggctgcccctggccccagggacagagctctgccccttcagggatctcagatgcaggttgtgtaaggacagccttgtgccaggttggaagccaggcctggaagcagtgtgctcagagcagcccaggcggcccacaggcgagtggaggggaacaactagggaagtctggccaggaggaggtgactgcactgaggggctggctggcaggggtctctgcctggaggctgagaggagctcaggttatttatgaaggcagtatagacctatgtggagcttgaagcccagtgtctggatcagagtctgctgggctgtgggcccagagctgggagccagccactcctgcagtgtccgaagtgatgaggaggggctgggctggagccagtcttgcctgctggccgtggccacagggggtcctttctgctctgactcctggcttctgctgccagggcttggaggcttggaggtggcctctgtcccaacaagagtcctcaaaatcctcagtttgtccaggtgagggatcctgggtgggggaggttcccagggctgcggcagaacagaccataccttgtcagtgtcaagccctgactgacccaggagtgccaggtggtggtgtgctcactgccagaaaggggccagtatttgaagagcagtggaatgtgctgggcacgctgtgcaggcattcctccgccctcctggggctctaagggtgttattggggtatgctgccatacagaatattagaaagcaaaagaaagacgcggttgtcgggaggcagagcttgcagtgagccgagatcacaccactgcactctggcctgggcgacagagcgagactccgtctaaaaaaaaaaaaagacgcagttgtctttgacctgcgtaatgttgaccgagattcgtgtggtttcacattgtttaaatttcatggaaaactatggtcccgttgtaaaaaccaagtctccaggtgaagaggcgacttgcacttcctggtgctgcccctggaccctgatcctgctctctctgcctcccaggcaaaggccggcgtgtgcagccccagtggtcccctcctgctgggacccagccatgcagactccacctttacaacagcctcaccaggaacaaggtaaggagaacacagatgccgtggcacacgcacacaatggggaggcaggaggcaggacagcccatgtgccttgtcgcacaacagacttctctgttccttgtgttgggatctggagttccataaatccaggtttaagatccttcagtcacttccatgttatagtctctgtggcccagaggcagagctgtcctctgaaacccagacacgtgaagtatcatgcctcatgtggaagcctgcccatgacttctgggcatggatcaccctggcttgtctctcggactctgcccaaccatgagtacttgaggtcatccacagccacgcctttcaggaggacgcgtggttgcagcaggtggcactgtatgagccaagcaggatggacaaaacggcaaactggctggatgttgttgggagcacagcaggttttgagaagaaggcaggattggttcctaacagaatggggtttgcatggtttgcttggctcagggcatggccagtgactccagtgatttcagaccaggctctgggcggggctgcttggatttccatcagggagcatgtttggcagacagagagtcaggtgtgagggagttcatggccttccttgggaaactggttgaggatgatgcccccagagaggtctgagggtgctgggatgttggggagtggtgccagagcagcaccacgattcaggggtcctggcctccaagccgcgctcccccaacagggactgaccctggccaagtgttgtctgcctcagtttcttcatccgtaaaaagaaaatgacataacctacgtcctagagtgtactgcatattgaatatttagctcagggcctggcacatggtaggtactcagtaaatattagctgtgttattgttaaataagcagcatttcaacaatcaataaaatcattgattccctttatcgcctccctccatagatgagtagaaccccagggaggaagaggccccacccacccagggctcagttggtgggaggtgccgtacatctcactgggctcccactgagactgtgacttttcacagtaaaacaaaatggtctctgttgaattgtttacactaaacacaaaccacactgtgatgtttgttgctgtttttggtaatcctgtgcagtgtttcttgcatttcttgtgatcgtcattccttcattcctaacaaaggaagtgttcatacctcaagatgggaaaaaggtgacgtggtattgctgtgggccaaccgtctatgacgcatctcacatggggcacgccaggtaggtccaccgcggggtgtccctgcagcttctgcagttgcacgcagaagtcagagccattgggatccacagcagcgatcttaggtccacaaagatcttagatctgctacagagacctgagatttgaggaatcaagactgaatttcttctcttatttttaagatgaaaattttaatgccataagtaatctatattcactgcagaaagactacagatcaccaaaaagaaaatgtccatagccccactgctaacatgctggactcgacctgggcactttttctcacataccttaaagttttctctcatccctcaagctctcgtggggtccccagatgctgagttcccgtgacactcagacctgacaggcctgacgctgggttggctgtgaccgccccccgaccactggatggtcatggctgtagctcctgacgagtagctggctgttggggtaaatgccacagagtccttttatgtgttcatgttttagttgcagtgccaaggtcatgtatagtcaacccttgaacaacctggagggtagagggtgtgaccctctgcacagttgaaaatccacacataacttttgattccccaaaaacttcaccactaaaatagcctcctgttgaccaatagcatgccagtcaatgaacacatattttgtatatacattacatactgtattcctaatgataaaggaagccagagaaaagaaaatattatgaagaaaatcataagggagaggcaatatatttactattcattaggtggaagtggatcattataaaggtcatcatccttgccatcttcacgttgagtagactgaggaggagaagggggggtcttgctgtttcagggatggcagagaaaatcatatataaatgcactcatgcagttcaaacacgtgttgttggaggttaagctatacatatcgtctggtgtggaaatgtttgttttttcattgctttaggtcctacatctcttttgatatcttgagaagagtgttgaaggattacttcaaatttgatgtcttttattgcatgaacattacggatattgatgacaaggtaaagggaatttgtaagattaaattttaaatgcaattggatggtgtaaaagaagatagaactttcgcataagtaaataatgtaggcttgagctagcttgtgttttcacctgataaacatcattttaatcccctcagtgagttaatattaccacttctgctactgatatgatcatttctatgatgttcagacacggttagaaacctgcatgttgctcaggggtcggtagccctgggtgttttgcagaaggaaggcctcccacagcacgcacttcgacatgtggcttgcaggggaagctggggcccccagggctcatttcattaagcgtcagaaagatcatgttaggccttgggcactacttggcaggtgggagatggagggtggtgtttctatttgatgatggtgtgcacgtccggggcccacagttgtctcccaccaccctcaccctcacttagagttggccaagggagagagtggcctgctgcagagggatgcatgtgggatccaagcatcactccccaatgtctgccttccctccccagatcatcaagagggcccggcagaaccacctgttcgagcagtatcgggagaagaggcctgaagcggcacagctcttggag

SEQ ID NO: 11068 - DNA, 564 bp, Homo sapiens
attctaggaagtgtctgtagccgcagctgcgggtccgggattcccagccatggcagattcctccgggcagcagggcaaaggccggcgtgtgcagccccagtggtcccctcctgctgggacccagccatgcagactccacctttacaacagcctcaccaggaacaaggaagtgttcatacctcaagatgggaaaaaggtgacgtggtattgctgtgggccaaccgtctatgacgcatctcacatggggcacgccagctctcgtggggtccccagatgctgagttcccgtgacactcagacctgacaggcctgacgctgggttggctgtgaccgccccccgaccactggatggtcatggctgtagctcctgacgagtagctggctgttggggtcctacatctcttttgatatcttgagaagagtgttgaaggattacttcaaatttgatgtcttttattgcatgaacattacggatattgatgacaagatcatcaagagggcccggcagaaccacctgttcgagcagtatcgggagaagaggcctgaagcggcacagctcttggag

SEQ ID NO: 11069 - DNA, 2637 bp, Homo sapiens
ctgtagccgcagctgcgggtccgggattcccagccatggcagattcctccgggcagcaggcttttcctttgcggtcttgaaggtgcataggcttggtgcctgtccaagagcctgattatttcagaaggatgagtttcatttctgaggtttctggggtagatggagcctacctcagggcctttccgcacagacttgggataccacttggtcggctgctcatcaggcaaaggccggcgtgtgcagccccagtggtcccctcctgctgggacccagccatgcagactccacctttacaacagcctcaccaggaacaaggaagtgttcatacctcaagatgggaaaaaggtgacgtggtattgctgtgggccaaccgtctatgacgcatctcacatggggcacgccaggtcctacatctcttttgatatcttgagaagagtgttgaaggattacttcaaatttgatgtcttttattgcatgaacattacggatattgatgacaagatcatcaagagggcccggcagaaccacctgttcgagcagtatcgggagaagaggcctgaagcggcacagctcttggaggatgttcaggccgccctgaagccattttcagtaaaattaaatgagaccacggatcccgataaaaagcagatgctcgaacggattcagcacgcagtgcagcttgccacagagccacttgagaaagctgtgcagtccagactcacgggagaggaagtcaacagctgtgtggaggtgttgctggaagaagccaaggatttgctctctgactggctggattctacacttggctgtgatgtcactgacaattccatcttctccaagctgcccaagttctgggagggggacttccacagagacatggaagctctgaatgttctccctccagatgtcttaacccgggttagtgagtatgtgccagaaattgtgaactttgtccagaagattgtggacaacggttacggctatgtctccaatgggtctgtctactttgatacagcgaagtttgcttctagcgagaagcactcctatgggaagctggtgcctgaggccgttggagatcagaaagcccttcaagaaggggaaggtgacctgagcatctctgcagaccgcctgagtgagaagcgctctcccaacgactttgccttatggaaggcctctaagcccggagaaccgtcctggccgtgcccttggggaaagggtcgtccgggctggcatatcgagtgctcggccatggcaggcaccctcctaggggcttcgatggacattcacggaggtgggttcgacctccggttcccccaccatgacaatgagctggcacagtcggaggcctactttgaaaacgactgctgggtcaggtacttcctgcacacaggccacctgaccattgcaggctgcaaaatgtcaaagtcactaaaaaacttcatcaccattaaagatgccttgaaaaagcactcagcacggcagttgcggctggccttcctcatgcactcgtggaaggacaccctggactactccagcaacaccatggagtcagcgcttcaatatgagaagttcttgaatgagtttttcttaaatgtgaaagatatccttcgcgctcctgttgacatcactggtcagtttgagaagtggggagaagaagaagcagaactgaataagaacttttatgacaagaagacagcaattcacaaagccctctgtgacaatgttgacacccgcaccgtcatggaagagatgcgggccttggtcagtcagtgcaacctctatatggcagcccggaaagccgtgaggaagaggcccaaccaggctctgctggagaacatcgccctgtacctcacccatatgctgaagatctttggggccgtagaagaggacagctccctgggattcccggtcggagggcctggaaccagcctcagtctcgaggccacagtcatgccctaccttcaggtgttatcagaattccgagaaggagtgcggaagattgcccgagagcaaaaagtccctgagattctgcagctcagcgatgccctgcgggacaacatcctgcccgagcttggggtgcggtttgaagaccacgaaggactgcccacagtggtgaaactggtagacagaaacaccttattaaaagagagagaagaaaagagacgggttgaagaggagaagaggaagaagaaagaggaggcggcccggaggaaacaggaacaagaagcagcaaagctggccaagatgaagattccccccagtgagatgttcttgtcagaaaccgacaaatactccaagtttgatgaaaatgtaagcatggtctgcccacacatgacatggagggcaaagagctcagcaaagggcaagccaagaagctgaagaagctcttcgaggctcaggagaagctctacaaggaatatctgcagatggcccagaatggaagcttccagtgagggggcacaggactgactttttaaaccattgtggactagtggctgctgtctgcctcagtgacaatgtcccagcgctcctatcatgtttacagtcacccttgggtcctaaattaagagttgtgttcatgtaggttcgtgtcgtcgttggctctgagacattgataataaatttttctcaacagtg

SEQ ID NO: 11070 - DNA, 2805 bp, Homo sapiens
ccggggcggcggttgcatcagattctaggaagtgtctgtagccgcagctgcgggtccgggattcccagccatggcagattcctccgggcagcaggctcctgactacaggtccattctgagcattagtgacgaggcagccagggcacaagccctgaacgagcacctcagcacgcgtagctatgtccaggggtactcactgtcccaggcagacgtggacgcgttcaggcagctctcggccccgcccgctgacccccagctcttccacgtggctcggtggttcaggcacatagaagcgctcctgggtagcccctgtggcaaaggccagccctgcaggctccaagcaagcaaaggccggcgtgtgcagccccagtggtcccctcctgctgggacccagccatgcagactccacctttacaacagcctcaccaggaacaagtgtttcttgcatttcttgtgatcgtcattccttcattcctaacaaaggaagtgttcatacctcaagatgggaaaaaggtgacgtggtattgctgtgggccaaccgtctatgacgcatctcacatggggcacgccaggtcctacatctcttttgatatcttgagaagagtgttgaaggattacttcaaatttgatgtcttttattgcatgaacattacggatattgatgacaagatcatcaagagggcccggcagaaccacctgttcgagcagtatcgggagaagaggcctgaagcggcacagctcttggaggatgttcaggccgccctgaagccattttcagtaaaattaaatgagaccacggatcccgataaaaagcagatgctcgaacggattcagcacgcagtgcagcttgccacagagccacttgagaaagctgtgcagtccagactcacgggagaggaagtcaacagctgtgtggaggtgttgctggaagaagccaaggatttgctctctgactggctggattctacacttggctgtgatgtcactgacaattccatcttctccaagctgcccaagttctgggagggggacttccacagagacatggaagctctgaatgttctccctccagatgtcttaacccgggttagtgagtatgtgccagaaattgtgaactttgtccagaagattgtggacaacggttacggctatgtctccaatgggtctgtctactttgatacagcgaagtttgcttctagcgagaagcactcctatgggaagctggtgcctgaggccgttggagatcagaaagcccttcaagaaggggaaggtgacctgagcatctctgcagaccgcctgagtgagaagcgctctcccaacgactttgccttatggaaggcctctaagcccggagaaccgtcctggccgtgcccttggggaaagggtcgtccgggctggcatatcgagtgctcggccatggcaggcaccctcctaggggcttcgatggacattcacggaggtgggttcgacctccggttcccccaccatgacaatgagctggcacagtcggaggcctactttgaaaacgactgctgggtcaggtacttcctgcacacaggccacctgaccattgcaggctgcaaaatgtcaaagtcactaaaaaacttcatcaccattaaagatgccttgaaaaagcactcagcacggcagttgcggctggccttcctcatgcactcgtggaaggacaccctggactactccagcaacaccatggagtcagcgcttcaatatgagaagttcttgaatgagtttttcttaaatgtgaaagatatccttcgcgctcctgttgacatcactggtcagtttgagaagtggggagaagaagaagcagaactgaataagaacttttatgacaagaagacagcaattcacaaagccctctgtgacaatgttgacacccgcaccgtcatggaagagatgcgggccttggtcagtcagtgcaacctctatatggcagcccggaaagccgtgaggaagaggcccaaccaggctctgctggagaacatcgccctgtacctcacccatatgctgaagatctttggggccgtagaagaggacagctccctgggattcccggtcggagggcctggaaccagcctcagtctcgaggccacagtcatgccctaccttcaggtgttatcagaattccgagaaggagtgcggaagattgcccgagagcaaaaagtccctgagattctgcagctcagcgatgccctgcgggacaacatcctgcccgagcttggggtgcggtttgaagaccacgaaggactgcccacagtggtgaaactggtagacagaaacaccttattaaaagagagagaagaaaagagacgggttgaagaggagaagaggaagaagaaagaggaggcggcccggaggaaacaggaacaagaagcagcaaagctggccaagatgaagattccccccagtgagatgttcttgtcagaaaccgacaaatactccaagtttgatgaaaatggtctgcccacacatgacatggagggcaaagagctcagcaaagggcaagccaagaagctgaagaagctcttcgaggctcaggagaagctctacaaggaatatctgcagatggcccagaatggaagcttccagtgagggggcacaggactgactttttaaaccattgtggactagtggctgctgtctgcctcagtgacaatgtcccagcgctcctatcatgtttacagtcacccttgggtcctaaattaagagttgtgttcatgtaggttcgtgtcgtcgttggctctgagacattgataataaatttttctcaacagtgagaccctc

SEQ ID NO: 11071 - DNA, 16354 bp, Homo sapiens
atggcagattcctccgggcagcagggtgagcggcgcggccgggccaggctgagggcggctgggggcctgactgggcgctgggtgctcggctcgaagggcagcgagtccttatgtctgaggggcccgggtgcatgggttctgaggggcagctgtgtccgtggtctgaggggcggcagtgcccgaggtctgaggggtgtcagtgcgcggggtctgagggacggcacgtccttgggtccgaggggcgggggtgctcggggtctgaggggtgtcagtgcccggggtctgagggacggcgggtcctgaggttcgaggggtggcacgtcctaggatccgaaggacaacgggtgcccggctccgagggacggccactgggacccctgggactcctgcgtgagggtctgccagacccgtggctggagcacagaccccgcggggacccgagcccgagcggggcgctgcccagaccacccagcctcagtttcctcacttggttcctgccgaggtccccttgcatcctcaccccgggaggtggccctacatcaaacagcctttccccagccggtgcctgggcgggccctcgctccctcttgccccagctggcctttaggggggagacaaaggcccaagggttgttttggttttctgcccagacctggcagcttccgggaggtgggcggagggcacctgaggttggtatttagggaaatggggcagaggacgccaggggtacgcgtacacacagtaaaagggcttggggctttacgaaggctttcatctccagttccgcaggcagtccactgcaagctgattgtcagagcattactgccccattttattgccaacccgggaggttccccagggacacagctgtgtcagctcccccagtcactcatgtcaccagcgggtagaccttgagagaccagtgggttcttctctcactgtccctccagcaagattttaggtgctggaaaggcaagagactgaatcagaaagcccagattcctaacagtctggagcagcctttccaaaggaaacattctcagtatctagtttttaattcttttggctggcaaaaattagatgcaagttcttgtaagacacctccagcccccaccctcagtttagatcgtaccaagatttccttagcatctggtggtgccctttgcccctgagggtttattgggttatagataggtagttatgacaacccgagtaatctggcggcatggggacacccagatgacagggctacactcttgtgccaagtggcaggaggtggtcaccttccaggcacgccgcctaccaccctacctgtgtgcctggattccagcaccatctccacccgtcccagagccaagcggccctcagaagtcacccagattcctgtaaaacagcatcatagttaacagccccaactctggaaccaccctggaagggccagggttccaactctgcctcccgccccacagcaaaccatgcgtaatggctcctaccttggagcatggagtgtaaatgaattaatagatgggaaggacgtagaacagtgcctggcactcaattaagtgctgtgtctgtgctgaaagttagggcctgtttgttttcaaactaaaaatgtgtttttgttcatttgtgaacgtaaatgacgtattagtagtgttttgtatcttgtttttaaaaatagctttagaattttaggttttcagagccttgtaagaattgccttctttttggagcttgccatataggttgggattgccctctccgggctgtcagggcagcaggcagattgcccagtcctcagcctgcgcacagcatctccagccagtgttcttctgccccagggcatggcccacctgcctttactatcgcctcctcccatcacacacacactctcaaagatgagaacaggaaataaaatccaatcgtaggccaggcgcagtggctcacacctgtaatcccagcactttgggaggccgaggcaggcagatcacgaggtcaggagatcgagaccatggtgaaaccctgtctctactaaaaataaaaaaaaaattagccgggcgcggtggcgggcgcctgactactcggaggctgaggccggagaatgatgtgaacccaggaggcggagcttgcagtgagtcgagattgcgccactgcactccagcctgggcgacagagcgagactccgtctcaaaaaaaaaaaaatccaatcgtaaatgctttcagtgaccatcttcccagatttttcaaggaggccatcatttttgtaccatcttccctaagttgactcagaaggtctatttctctttcctgatctcactgggtgtacagcttttcctttgcggtcttgaaggtgcataggcttggtgcctgtccaagagcctgattatttcagaaggatgagtttcatttctgaggtttctggggtagatggagcctacctcagggcctttccgcacagacttgggataccacttggtcggctgctcatcaggtcagacttatagtttaatttttatacagtttaattcaagggtcttcataataacacagccagcattttttcagcatgagtctgtgccaggcactgctctaaatgctttgcatctgttatctcctgccacccttgggggaacccctttgaggaagatcctgccggcatcttgtacagatgagaatcctgaggttcagagaagtcaagcaatctgtccaccatcacgactagccagaggcacagccaggctcccaacctgggcagcctgactcaatagggaccttaactgctgtgctgtgctgcctttgatgattctcttcagactcacaatagctcaacccagtgagttaaggcagacgagaataaagctgatgcccttcgatgttttccccagagccacatgaaatgtttgctcctctatgaactcaggtaccatgtttccgggtatttgaagagccttaggcagtacccttggggtggagattaagccatttccagtgtgggtgctctgggtggcaatattgctgtctgatcaccccacaggctcattgtgagggatgttggatgcccctaataatgaataacctccctcccagtaaggaggaagatggagatgctgttcttgggggtgagagaggatgcctgggggccacctttgtgaacgagttgcagctggacctccggggctggtgatcaggacggggagtgggaggggaagccctcacctgtgggaggaggcgctggtctctgggagtgggcagtgttggctcctagttggtgagagcaggggtgcatgcccctctctcctccccacgattcatgtctgggggctttttccggtcccctttctgaacacttcttgggcagggagtggatcactgggaaggacccaagaggagcagctgtagagggtgggaccaggggaacatttgcagaaagggagtaacctgcagggtgagatgttgcctggacacccacaagatgaggaccctggtgggacctttgaagtagcagggtcagagggcaaagggtcagggtgagtgaggggtgcagacccccaccaaaccggggcacttattaggagctcagacctgctgtaaaggggtctgcattttagcaagctttccacccatggggaagctggtttaaacctcacttgctgggcccaccccagagattctgatttggcaggtctctggtgagcccaagaatgtgacttctctggatcccccaggttctgctgctgaaggcacaccagggccatgcctggagtggacctgggagagcctcaagggaacgcaggaagagaaacagggcagccgggagaggtttaaatgcttacaggaggccaggcatggtggctcacgtctgtaatcccagcactttgggaggccgaggtgggtggatcacctgaggtcaggagttctagaccagcctggccaatatgtagaaaccccgtctctactaaaaatacaaaaattagctgggcatggtggcgggcacctgtaatcccagctactcgggaggctgaggcaggagaatcgcttgaacccgggaggcagagtttgcagtgagccgagatcatgccactgcactccagcctgggtgacgagcgagactccgtctcaaaaaataaaataaaataaaataaaataaaaataaataaaaaataaatgctgataggaaagagccagagagagggagaggtcgcactgccacagttgtttgacgtgtcagggttgttgttcatttggtgtggctttgttttggtatctgtgctgagcaattgcttggtacttgcatgtgatttcaataaatgttctgtagagactccacctttgtagccggtgacaaccaccatccacctttgggacattcccatgtccctcaatgtgttgatgaactgaactgcaaggtcatccggtggtggacattccttctcatgggggcagagcaggagtttcggcacggagcgtgcaggctctacgatgagggccagtgtcgaggaacaggtccctgggaggttttcagtctgctcagaagtgttctcatctgatctcagcatcagactgatccacagcctggctcaaacccatgaccacttgaaagctgacctatttttatttgtttcctcgagacacacttaaatgcagctaccacgattacccaaatgactgtctgcgtccatctcatggaagcctgtcattctcctgtgcttccctgggcaccagcacctttctgctctgagaagatccttcccaagcatggtcttggttcccttttgatgagccgtctagcctgctctagacggtacatttaagaattatgtgatccaagatcaaggcagatttggtaataaacttttaaaataataaaattaattaaataaaaatgggtgtgtgagccctaggaaaactccaggaaattctctgtgtgtagcatgcggctattacaataacattaataataccagagcgattatgataataatgatggcaaatggggcccctggctctgtgccaggcagcttttaaacattttacaagtgtcatttgacttaatggcctgcagctttacagggctgatgttatgagcgtgttttaccgtgaggaaatgccgccgtgtgtgtgagtgtaggtactcagccctggagggcgtcggggccgcccctcaggtctccagagagcggatacacagcggcttcagttcccagactgcttcctcagcgctcaaaagccactgcagccgccgttaggacatttgatgtttttctcattttaaaaatagcagatgcttactgcagaaaatgtgagcaatgaagaaaaagagggaattaaaatcacctgtcaccccctctcatcaaccatcgtcactgtcagtgttcgggctgttgctggtggtctctccatcagaatccattctgagtgtgagaggcacgtgactgtcagctcgctgtctcagctggaagccgatgctgtgtcactgtttctcagggtgctgctgttgtctcttcttccctcttgctgtcgtggagtccaacccaggcatgagcagttgcagaagaccaaggctcagggaggggacaggggagaggaatgtggagggtcagcattggggaacagctttcgaactgtggcctgatctgtgaggggacaaggctcaccttccagctctgtccatccctctggcaagttctctaatctttagtgaacttcattttctttatcatgaaatgggacccctgctggcagctgcagagctgttggagggaaatatccagctaaactagaagtctcctggctggaagttgctctgcaaaagagtttgtaggagtctgatatttatttagagttagttttccaggacctcactttggggtgcttggagctgcctctgtgggtctgcctccgcctccgtcctccctgatctcatctccagctgggaggagagcgcatctccatgtaagcagcctccttcttctcagagggaagccccggcagtgtcagtgctgacactgggcctgtaactgtggggatggggcaggtgagaggccctcaagagctcccggcaccccccaggcgccttcagtggggccagagtccacccctgtctttctctttccttggactgttggaagagctgaagtgaaaagtgacttgttcttatgtctctggtatctttgggcagcagggctcctgctaagcaagcccctgggggctcaaagcagcagaggctgtggccggttcccagcactggtccttgtgcaggtgtctttctgagaagggtgcatgaggcccagtgccacaggggaacgccagcccaccactggtggcatgcactctgtggtgccattctgctgtccactcatctgtgccctaggcaactttagctgatatctggaatgtcacacgctcagttgtagatgctgaagatcgagcagtgaataaggtagatggagcggtggggcagatggtgaaggaaagaaatgcgggcacgtgttagacaggggtgctgcggagagaaagagcagccaggctcagggtctagaggcgggcgccatatggacagggagtccttgaagacctggtggggaagccggcacctagcagagctgtgaaggattaaggggcctgctggtatctggggagcatgccccctaaaaaaagagcagcaggtggaggggccatgtgactagggtattgtgagtcaggtgggggcccatggccagcatgaggacaggcttgtgctgctggcgaggtgggtgttgggggcagtaatgtgaacgtgcgcttttcagcagggccgctggaggcctgtggctgtgaggggagagccatgctggctacaggtggcggtgtctggcttgcaggaatccaggtgacaagggctggctctcaagtccaaagcttcttttgagttagaggccccggatcctcccgtgggttggctatgggtgctcctaaggataacttgtaaaggggtgtgattccagttttggctagggagtgtgcccagagctttgcttctgggtgcctgtggctgcttggagtgggtggccatcttattggggtcagatgggacagtggctccgtgcagtgggaaggaagcagggcaagttagagggacgctgcactcgtcatcccaccagcgagagtcatcccaggaagccattttaagccctgcatccatgttgagacttcaggaaggctctcccacagagtgcccacccctttactgcagagaagaggtggcttcaggacatcttctccggcagccacggaggctgggccttggggcatcacgtggctccgtaggctccctggcgggtgaagagctcggcccagtggggcattcttgctgctgcagctgtgcactccattctgactcatctttgctgacaccacagcgttccgggaagtgccagttattggcctgacacgaagggctttccccacactaagcaaagcagagaaaggcattcgtgtgcagttacccccgcaacacactctgctctctgttttcagaagctgtgtgggcttggttggggtgactctggctctgtgccaggagtaaacacggagatgggggacaaaagggaatgggagaaggcagagagggggactgtgatgtgcagggcatccacgccccatggctgtgatgtcgggcagcctgtgcccaggaagggcagctggcacagcaaggggtggccagacatgtgcattcctaccctgagtgaactctggggtgagagggtatctgtctggaaggagcaagcatcggtccttttcccacagtcctctcagcaaacacaatcactggttcaaggtttggatgcacctgtgctcatgggctcagggaccagactccctcctctggccagaagcctggcaccatctgcctggtctgcccccactttagggacgtgggctgtggacacagcacctggtccacaactcccgtgtcagaggtaattgcagggagatattccttagaatggtgagacagattttattccctaattcctgacagtaggggaaggagctgcgttccctgccagttcagcagaggtgacttttggatttaaagggagtatgattagctgggcctggtggcatgtgcctgtagtcccagctactcaggaggcttaggctggagggtcacttgagcccagcattttgaggctgtgatgagccttgattgcaccactgcactccagcctgggcagtagagtcagacgctgtctctaaaaaataaaaataaataaataaataaataaataaaaataaaaaagggagaatggaggaggagaaggagggtgagcaggggctcaaatgaaaaaagccatggagctggtcagcgtgcatgtgtcaaggcggccttgtctacagctggcagtggtgaaagttagggttctgctcctcctcccaatggtgacatgcggaacagtggctcttgggtccttgagtgacacacctgagtggtggaggtgcacgcttactgctttgaaggctctaaggagggaggctggggcctggggccaggggccaggggccaggtgaggctggctggagcagccacattttcctggcagccctgtgctttcttgggctggtcctttgagggggcccagtcctcctgaggctgtggccttgacctgcagaagccatgctagagtccagctgtctcttggtgcaggggtgtaaatggcacacattgtcaatgtggggttctcctacccctcatcccccagcacccagagggagagggtgccgctgcggcaaagaggcttgaagttggtttggtttgggggatttctgttgtgagtttttaaaaattgaggttaaattctcgtaacatacttagctgacaggagggataccatgatcatgtaggtagctttcccaaggcgaggcttatccgttatactccagatgtgctgacccctatgatttccccaaatgtcagaaactgaactgtgtaatttgtgatggtgtggaactgtgttcctgctttccctgatagaaaacataaattaaaaatgtaaaaactaagtaatttatatgacataaagtgaaaagtacacaattctgtggtatttggcgcatgatgttgtcatgcagccttcatttctgtctagttccaaagcattttcatcacccaagagggaacccatccatacctgtcaggcagtcactccctcgcccccagtcgaagcgctgcccctgtgcctttgcctgttctggatgtttggcgtccagggaagggcttgaacacctttttccttggttctgtgccatcccctagtccctgtctttctggcggcctctgggctgcccgcctgcctgcctgacaccatgtgccctctgtctttgcagctcctgactacaggtccattctgagcattagtgacgaggcagccagggcacaagccctgaacgagcacctcagcacgcgtagctatgtccaggggtactcactgtcccaggcagacgtggacgcgttcaggcagctctcggccccgcccgctgacccccagctcttccacgtggctcggtggttcaggcacatagaagcgctcctgggtagcccctgtggcaaaggccagccctgcaggctccaagcaagtgagtaacagagtgggttccctggccattagaacctctctcccaaggtcaagggctttctccatcaccctggtgcttacctggcgtctgcggataccccagagggagcctcgcccaagtgtgtctcgagcaagtggcctggatgggcagatgcagcgcttgctggatggaggttgggataaaatcacgccctatggagttggttattcaggagcagtatgttcacatcactggtgtggcaggattgcctgaggtggtggggtgcagagccgctgcggctctggggttccacgtagcatgcccaggccacgggccctagccttgtgatttttagctaaggctgtgcctggctctggttgactcagttctttctctttatttcttccataagattgtagcgtgtctatcctccagctttagaattgttgaatcctaaagtattaattggcattgaacttttttttttttttttttttgagatggagtctcgctctatcgcccaggctggagtgcagtggtgcgatctccactcactgcaagctccacctcccgggttcatgccattctcctgcctcagcctcccgagtagctgggactgtaggcgcccaccaccatgcctggctaattttttgtatttttagtagagacggggtttcaccgtgttagccaggatggtctcgatctcccgacctcgtgatccacccgcctcggcctcccaaagtgctgggattacaagtgtgaaccaccgcgcccggccggcattgaactttttaaaaatcagaaataagtcattttttctctttgagatgatgtctgtcccgtagctccagcctgttggtgctggttgtgtctgtggaacgtgcctgtggttatttgcgggagatactcctgggatgcctgcatggctttgtcactctgtggcaaatctgagggggctccatgccatcatcactgaagtatgcctttgggtggcccagctcctcctgtggctgtgggcactcctccaccttcatgtgggggcaggtttagtgctgttttctggtggtcctggctgtagctggcagccttctgggggcttctccagactccgttggggcctgggattgggaacatgcccccccgcctctgccgtgggtcaggcctctgctagatcactgttttaaccaggctggaggtggggatgtcacatctcctgtgggtcgtgttttctggataactctgcagcagacactccttccccagcgtagggcagaggccgttgctgtgcaggtcacgtccttccccatgtagccgttcctgcctgagcctccagcgcggtcacccaagtgacacctgtgctgtgaggtgccttctctccaagggctcgggtgtcaggttgttccccctgccatgtgccattccaagacacagccagaggggggcaggattagggagggtgaagcgggcctggtacgtccagctcagcagtggcctgtccaggcttccctcatagggacttgttgaaagagcggcacagacgcaagcctccatccacactgtgagaggaaggaagggttttgctcttgcaaacactttttaacctacagagaggaagcagagccacgttgctgtgtaacagaatggaccatggatagcactaatggagttgctgtgccctccccaggttccaaatcccctcatcacccaggctgcgcaagaggctgccagggtctgcttgtgccaggaatgatgggcattatgtcaggcgaccctcactcaagcttgctgtacactgagcaggggctgaagggggaggtgggagctggagtctgggactgctagagcatccagtgacctcgagtgggtccaaggcgccatggagtccagtgtagtgtcctcgcccatgtccctgggatgacagtagctgtggatctccctccatgtagctgtgacaatcagagctgcttcccccactgagtgggaacgccctctctttccatggctcatactccccaagcatgcaccttccttgctggcacagtgggccatgtgcccctcctcctgctcgcccttccacctctgttggacatcccagcagcatcagatgtgcctgtgtctggccctcagtgtgcccgcctgttaccagctcctcccatgtgccttctgtgtcctgtctccaagatcctctcagacatggaaagactctgcttggcccggcgcggtggctcactcctgtaatcccagcactttgggaggccaaggcgggcggatcacgaggtcaggagattgagaccatgctcgctaagtcggtgacaacctgtctctactaaaaatacaaaaaattagccgggcgtgatggcgggtgcctatagtcccagctactcgggaggctgaggcaggagaatggcctgaacctgggaggcggagcttgcagtgagccgagatcgtgccactgtactccagcctaggtgacagagcgagactccgtctcggggtggggggttggagataatggaaaggctctgcttaacccccaggtccctactcctgtgaagccagaccccttcctggtggatcccttccctggatcaccagcctccagcacggaggtccactggatatcaggacgttgaacttgttgagcacttctcacccgcagtggaggctcagcccttccagcccgccggcctctccctaccccccgggaaggagtgtcagctatacccttcactgaggagggtgtgggtctgtcagacgccgaggccatagtttcaggaacatgaaggtttggtgttgctctcacccctccgatggaggacccttaacttcctgatgaaggatttctctccatgaaccccttgcttgggtcctatctgcatctggtgtgttgtaggcagactgcttgccacttcctggcttccctctccatcattttatcttcagcctcccacatccctgtttcaaagccatgtctctcatgagcggttcatagttggtctgttgttggatcactcaggtcagggtgggactctggaatcaacgaatgtgtgttcattttttccaaagaaacaaaagcacaggccaggcgcggtggctcacacctgtaatcccagcactttaggaggccaaggcaggcagatcacaaggtcaggagtttgagaccagcctggccaatatggtgaaaccccatccctactaaagatacaaaaattggtggggcgtggtggcaggtgcctgtagtcctagctacttgggaggctgaggcaggataatcgcttgaactcaggaggcggaggttgcagtgagttgagattgcgccagtgcacttcagccagattttatctaaaaaaaaaaaaggggggcaagggtccttatgtgatatctctcagttcttcccttttgcaaatctgaatttgtatatctgggcctggtaacccgttttcctggggagcccatcgccagctgtgtggagatagcagccttaggggagcaggaatgctggctgtggccaggcttcttggacaagctttcagtcctgtgaaccctgggccgtttcctcatagcagggtgagtgtgatgatcccgtggcctcatggctgtgtttctgggcagcgtctccagctgtctgagatggcagcagtgtcctattgaaggagctccagggtctttgtgagggaggagagtgatgggatcctagagtggccggttgaatgcctccaggcattgagtgagattctccttcaagggcttgtgaggcatttaaagtacactgaggccgagctgcacttggcctcaataagcacatgatgtttgattaagattggagattgcctacgctttagaatctgaccacctgtgaccactggaactcacctagagtgggggctcctgctgagcactggccctctctccgtctcctgccccatctcccacctgcccacagtacccccactgcccagacacagtgcagccgccctccttcctccccttggcctgttagtcatcagcgtctgccgtcctggctcgtgtggcctgagctagagccgggaggccaagagatggctggtgcccaggaccaacttccccgtgatcagtgtgtggcaatttgctggccatgctgccagaccctctggcacagaaaccagggacaggaggaggcaggatgcgagcaccctggtgagctgccaggcggcctgctggggtgggcacaggtcagtgctaggagtatccatctcgtaggccttcctggtgccactcagcagagacatgtgaagcccttcccagggccaggcaccagctggggtcagaggtgcccagcagagcataacgcagaacctggacctgtgggcgacgactgtggagaaaagtggggatctgctgagggggcagggcaggcaggagccggctgagggcaacgggaaagtcaccaggtaccgtcctccacacctagctttgccagattgacgtttcagagggtgaataatcaccctgtggctgcccctggccccagggacagagctctgccccttcagggatctcagatgcaggttgtgtaaggacagccttgtgccaggttggaagccaggcctggaagcagtgtgctcagagcagcccaggcggcccacaggcgagtggaggggaacaactagggaagtctggccaggaggaggtgactgcactgaggggctggctggcaggggtctctgcctggaggctgagaggagctcaggttatttatgaaggcagtatagacctatgtggagcttgaagcccagtgtctggatcagagtctgctgggctgtgggcccagagctgggagccagccactcctgcagtgtccgaagtgatgaggaggggctgggctggagccagtcttgcctgctggccgtggccacagggggtcctttctgctctgactcctggcttctgctgccagggcttggaggcttggaggtggcctctgtcccaacaagagtcctcaaaatcctcagtttgtccaggtgagggatcctgggtgggggaggttcccagggctgcggcagaacagaccataccttgtcagtgtcaagccctgactgacccaggagtgccaggtggtggtgtgctcactgccagaaaggggccagtatttgaagagcagtggaatgtgctgggcacgctgtgcaggcattcctccgccctcctggggctctaagggtgttattggggtatgctgccatacagaatattagaaagcaaaagaaagacgcggttgtcgggaggcagagcttgcagtgagccgagatcacaccactgcactctggcctgggcgacagagcgagactccgtctaaaaaaaaaaaaagacgcagttgtctttgacctgcgtaatgttgaccgagattcgtgtggtttcacattgtttaaatttcatggaaaactatggtcccgttgtaaaaaccaagtctccaggtgaagaggcgacttgcacttcctggtgctgcccctggaccctgatcctgctctctctgcctcccaggcaaaggccggcgtgtgcagccccagtggtcccctcctgctgggacccagccatgcagactccacctttacaacagcctcaccaggaacaaggtaaggagaacacagatgccgtggcacacgcacacaatggggaggcaggaggcaggacagcccatgtgccttgtcgcacaacagacttctctgttccttgtgttgggatctggagttccataaatccaggtttaagatccttcagtcacttccatgttatagtctctgtggcccagaggcagagctgtcctctgaaacccagacacgtgaagtatcatgcctcatgtggaagcctgcccatgacttctgggcatggatcaccctggcttgtctctcggactctgcccaaccatgagtacttgaggtcatccacagccacgcctttcaggaggacgcgtggttgcagcaggtggcactgtatgagccaagcaggatggacaaaacggcaaactggctggatgttgttgggagcacagcaggttttgagaagaaggcaggattggttcctaacagaatggggtttgcatggtttgcttggctcagggcatggccagtgactccagtgatttcagaccaggctctgggcggggctgcttggatttccatcagggagcatgtttggcagacagagagtcaggtgtgagggagttcatggccttccttgggaaactggttgaggatgatgcccccagagaggtctgagggtgctgggatgttggggagtggtgccagagcagcaccacgattcaggggtcctggcctccaagccgcgctcccccaacagggactgaccctggccaagtgttgtctgcctcagtttcttcatccgtaaaaagaaaatgacataacctacgtcctagagtgtactgcatattgaatatttagctcagggcctggcacatggtaggtactcagtaaatattagctgtgttattgttaaataagcagcatttcaacaatcaataaaatcattgattccctttatcgcctccctccatagatgagtagaaccccagggaggaagaggccccacccacccagggctcagttggtgggaggtgccgtacatctcactgggctcccactgagactgtgacttttcacagtaaaacaaaatggtctctgttgaattgtttacactaaacacaaaccacactgtgatgtttgttgctgtttttggtaatcctgtgcagtgtttcttgcatttcttg

SEQ ID NO: 11072 - DNA, 135 bp, Homo sapiens
atggcagattcctccgggcagcagggcaaaggccggcgtgtgcagccccagtggtcccctcctgctgggacccagccatgcagactccacctttacaacagcctcaccaggaacaagtgtttcttgcatttcttg

SEQ ID NO: 11073 - DNA, 2808 bp, Homo sapiens
agttggctactcgccatggacgaagcggatcggcggctcctgcggcggtgccggctgcggctggtggaagagctgcaggtggaccagctctgggacgccctgctgagccgcgagctgttcaggccccatatgatcgaggacatccagcgggcaggctctggatctcggcgggatcaggccaggcagctgatcatagatctggagactcgagggagtcaggctcttcctttgttcatctcctgcttagaggacacaggccaggacatgctggcttcgtttctgcgaactaacaggcaagcagcaaagttgtcgaagccaaccctagaaaaccttaccccagtggtgctcagaccagagattcgcaaaccagaggttctcagaccggaaacacccagaccagtggacattggttctggaggatttggtgatgtcggtgctcttgagagtttgaggggaaatgcagatttggcttacatcctgagcatggagccctgtggccactgcctcattatcaacaatgtgaacttctgccgtgagtccgggctccgcacccgcactggctccaacatcgactgtgagaagttgcggcgtcgcttctcctcgctgcatttcatggtggaggtgaagggcgacctgactgccaagaaaatggtgctggctttgctggagctggcgcagcaggaccacggtgctctggactgctgcgtggtggtcattctctctcacggctgtcaggccagccacctgcagttcccaggggctgtctacggcacagatggatgccctgtgtcggtcgagaagattgtgaacatcttcaatgggaccagctgccccagcctgggagggaagcccaagctctttttcatccaggcctgtggtggggagcagaaagaccatgggtttgaggtggcctccacttcccctgaagacgagtcccctggcagtaaccccgagccagatgccaccccgttccaggaaggtttgaggaccttcgaccagctggacgccatatctagtttgcccacacccagtgacatctttgtgtcctactctactttcccaggttttgtttcctggagggaccccaagagtggctcctggtacgttgagaccctggacgacatctttgagcagtgggctcactctgaagacctgcagtccctcctgcttagggtcgctaatgctgtttcggtgaaagggatttataaacagatgcctggttgctttaatttcctccggaaaaaacttttctttaaaacatcataaggccagggcccctcaccctgccttatcttgcaccccaaagctttcctgccccaggcctgaaagaggctgaggcctggactttcctgcaactcaaggactttgcagccggcacagggtctgctctttctctgccagtgacagacaggctcttagcagcttccagattgacgacaagtgctgaacagtggaggaagagggacagatgaatgccgtggattgcacgtggcctcttgagcagtggctggtccagggctagtgacttgtgtcccatgatccctgtgttgtctctagagcagggattaacctctgcactactgacatgtggggccaggtcaccctttgctgtgaggctgtcctgtacattgtgggatgttcagcactgtcccttgcctcaatgccagtaacgcgtcttcctgagtggtgccaaacaaaaaggttctcaggtgttgccaaatatgtcctggggtataaaactttcctcgcctgacaaccactggtctgtagggatttttggctacacacaaaccagtatcgctcatagatcagcaaaccggggcctactagagtctgaacagctgtaatctatgaattctaagtgaaattttaaaaattgttaatttttcctatattgcattaattttaaaaaataaatctgaggcaaatatggactctcttttgcctatttcttccctcattttgctccaactctttcttcttccttacaaaagagacttttgcttttttcgaaacatttccccatgtttttctggggtctcgctatgttgcccaggctggtctcaaactcctgggctcaagtgaccctcccaagtagctcttactacaggcgtgcaccattgcacccagccccatttattcatgtcttatttcacttgatccttatcccatcccaggaaggcaacaagggtgagaaccctgtgctcagggaggttaggtctcttgtccaagggaaaacgattatccagagaagagacctggccagaacctgggtcccctgagtcctagccatgcttcccatgtgccttacttgctgaagcacccccggactgcagtgtgaacgtgctgtgcaatagtgacacgctgggcttccccacaaggctccaccctgaggtcttttaagctgtccttatgccagcctatttcttgttttttgggcctttttttttggagatagggtctcactctgtcgcccaggctggagtgcaatgacgcaatcttggcttattgcagtctcgacctcctgggctcaagagatccttccacctcagccacctgagtagcttggactacaggtgtgcaccacctctcccagttaatttttgtatttttagtagagacagagttatgccatgttactcaggctggtcttgaactcctggactcaagcgatcagcctgccttagcctcccaaagtgcaggggttacaggcttgagccattgcgcctgacctatttctggttcttagggccctggatgttaggatggatttctgaattaataataataataaaaccctcatcaaga

SEQ ID NO: 11074 - DNA, 1621 bp, Homo sapiens
gtccggaggcggtggggagcgaagactgacccggggccgtgacgcgggggcaggccctggggcgggggcgggtcctggggactggggcgggcggccgaggcccggaagcggactgaggcggcctggagtcttagttggctactcgccatggacgaagcggatcggcggctcctgcggcggtgccggctgcggctggtggaagagctgcaggtggaccagctctgggacgccctgctgagccgcgagctgttcaggccccatatgatcgaggacatccagcgggcaggctctggatctcggcgggatcaggccaggcagctgatcatagatctggagactcgagggagtcaggctcttcctttgttcatctcctgcttagaggacacaggccaggacatgctggcttcgtttctgcgaactaacaggcaagcagcaaagttgtcgaagccaaccctagaaaaccttaccccagtggtgctcagaccagagattcgcaaaccagaggttctcagaccggaaacacccagaccagtggacattggttctggaggatttggtgatgtcgagcagaaagaccatgggtttgaggtggcctccacttcccctgaagacgagtcccctggcagtaaccccgagccagatgccaccccgttccaggaaggtttgaggaccttcgaccagctggacgccatatctagtttgcccacacccagtgacatctttgtgtcctactctactttcccaggttttgtttcctggagggaccccaagagtggctcctggtacgttgagaccctggacgacatctttgagcagtgggctcactctgaagacctgcagtccctcctgcttagggtcgctaatgctgtttcggtgaaagggatttataaacagatgcctggttgctttaatttcctccggaaaaaacttttctttaaaacatcataaggccagggcccctcaccctgccttatcttgcaccccaaagctttcctgccccaggcctgaaagaggctgaggcctggactttcctgcaactcaaggactttgcagccggcacagggtctgctctttctctgccagtgacagacaggctcttagcagcttccagattgacgacaagtgctgaacagtggaggaagagggacagatgaatgccgtggattgcacgtggcctcttgagcagtggctggtccagggctagtgacttgtgtcccatgatccctgtgttgtctctagagcagggattaacctctgcactactgacatgtggggccaggtcaccctttgctgtgaggctgtcctgtacattgtgggatgttcagcactgtcccttgcctcaatgccagtaacgcgtcttcctgagtggtgccaaacaaaaaggttctcaggtgttgccaaatatgtcctggggtataaaactttcctcgcctgacaaccactggtctgtagggatttttggctacacacaaaccagtatcgctcatagatcagcaaaccggggcctactagagtctgaacagctgtaatctatgaattctaagtgaaattttaaaaattgttaatttttcctatattgcattaattttaaaaaataaatctgaggcaaatatggactctc

SEQ ID NO: 11075 - DNA, 1351 bp, Homo sapiens
aattgaccctggggacagggcgaggcgcggaggcgtcctgaaggcgaggcggtgacgcaagagcgaatccttggggcggggcgaggcgttggagatgcgtcctgcgggcgggacggtaacgcgggggcggggcggtgacgtgagcgggcaggctctggatctcggcgggatcaggccaggcagctgatcatagatctggagactcgagggagtcaggctcttcctttgttcatctcctgcttagaggacacaggccaggacatgctggcttcgtttctgcgaactaacaggcaagcagcaaagttgtcgaagccaaccctagaaaaccttaccccagtggtgctcagaccagagattcgcaaaccagaggttctcagaccggaaacacccagaccagtggacattggttctggaggatttggtgatgtcggtgctcttgagagtttgaggggaaatgcagatttggcttacatcctgagcatggagccctgtggccactgcctcattatcaacaatgtgaacttctgccgtgagtccgggctccgcacccgcactggctccaacatcgactgtgagaagttgcggcgtcgcttctcctcgctgcatttcatggtggaggtgaagggcgacctgactgccaagaaaatggtgctggctttgctggagctggcgcagcaggaccacggtgctctggactgctgcgtggtggtcattctctctcacggctgtcaggccagccacctgcagttcccaggggctgtctacggcacagatggatgccctgtgtcggtcgagaagattgtgaacatcttcaatgggaccagctgccccagcctgggagggaagcccaagctctttttcatccaggcctgtggtggggagcagaaagaccatgggtttgaggtggcctccacttcccctgaagacgagtcccctggcagtaaccccgagccagatgccaccccgttccaggaaggtttgaggaccttcgaccagctggacgccatatctagtttgcccacacccagtgacatctttgtgtcctactctactttcccaggttttgtttcctggagggaccccaagagtggctcctggtacgttgagaccctggacgacatctttgagcagtgggctcactctgaagacctgcagtccctcctgcttagggtcgctaatgctgtttcggtgaaagggatttataaacagatgcctggttgctttaatttcctccggaaaaaacttttctttaaaacatcataaggccagggcccctcaccctgccttatcttgcaccccaaagctttcctgccccaggcctgaaagaggctgaggcctggactttcctgca

SEQ ID NO: 11076 - DNA, 1878 bp, Homo sapiens
agcggatcggcggctcctgcggcggtgccggctgcggctggtggaagagctgcaggtggaccagctctgggacgccctgctgagccgcgagctgttcaggccccatatgatcgaggacatccagcgggcaggctctggatctcggcgggatcaggccaggcagctgatcatagatctggagactcgagggagtcaggctcttcctttgttcatctcctgcttagaggacacaggccaggacatgctggcttcgtttctgcgaactaacaggcaagcagcaaagttgtcgaagccaaccctagaaaaccttaccccagtggtgctcagaccagagattcgcaaaccagaggttctcagaccggaaacacccagaccagtggacattggttctggaggatttggtgatgtcggtgctcttgagagtttgaggggaaatgcagatttgactgtcctctagggagcgtggggagagcccgggtttacgtgggtccctgtgctggcaggcttacatcctgagcatggagccctgtggccactgcctcattatcaacaatgtgaacttctgccgtgagtccgggctccgcacccgcactggctccaacatcgactgtgagaagttgcggcgtcgcttctcctcgctgcatttcatggtggaggtgaagggcgacctgactgccaagaaaatggtgctggctttgctggagctggcgcagcaggaccacggtgctctggactgctgcgtggtggtcattctctctcacggctgtcaggccagccacctgcagttcccaggggctgtctacggcacagatggatgccctgtgtcggtcgagaagattgtgaacatcttcaatgggaccagctgccccagcctgggagggaagcccaagctctttttcatccaggcctgtggtggggagcagaaagaccatgggtttgaggtggcctccacttcccctgaagacgagtcccctggcagtaaccccgagccagatgccaccccgttccaggaaggtttgaggaccttcgaccagctggacgccatatctagtttgcccacacccagtgacatctttgtgtcctactctactttcccaggttttgtttcctggagggaccccaagagtggctcctggtacgttgagaccctggacgacatctttgagcagtgggctcactctgaagacctgcagtccctcctgcttagggtcgctaatgctgtttcggtgaaagggatttataaacagatgcctggttgctttaatttcctccggaaaaaacttttctttaaaacatcataaggccagggcccctcaccctgccttatcttgcaccccaaagctttcctgccccaggcctgaaagaggctgaggcctggactttcctgcaactcaaggactttgcagccggcacagggtctgctctttctctgccagtgacagacaggctcttagcagcttccagattgacgacaagtgctgaacagtggaggaagagggacagatgaatgccgtggattgcacgtggcctcttgagcagtggctggtccagggctagtgacttgtgtcccatgatccctgtgttgtctctagagcagggattaacctctgcactactgacatgtggggccaggtcaccctttgctgtgaggctgtcctgtacattgtgggatgttcagcactgtcccttgcctcaatgccagtaacgcgtcttcctgagtggtgccaaacaaaaaggttctcaggtgttgccaaatatgtcctggggtataaaactttcctcgcctgacaaccactggtctgtagggatttttggctacacacaaaccagtatcgctcatagatcagcaaaccggggcctactagagtctgaacagct

SEQ ID NO: 11077 - DNA, 14255 bp, Homo sapiens
ctgtggccactgcctcattatcaacaatgtgaacttctgccgtgagtccgggctccgcacccgcactggctccaacatcgactgtgagaagttgcggcgtcgcttctcctcgctgcatttcatggtggaggtgaagggcgacctgactgccaaggtacactcactatctgtggagggagacagggtggggggcagtgggtggggaagtatcttttgagggactccaaaagccagctgactccccaggcgagcccttacatctggaggaccatgggaggtaggacggcccagcggctacaggttcaagttcagacgcagaagtccgggtttgaggactggctctctcggccacctgctgtgtgacctcctgtgcctcagtttccttgtctggaaagcaggaatagtacctgcctccttgggttgttttgggggttagatgaacagtgcccaagcgtagcaccttctccccaaaaatggtggctattacgactgctgggactgtcagcacttcggtactggccctgggaaaccgagaaagtgctctgcccaggcgtttgggttgggccctttgttgttttattttttggggggggcgggggcacagagtcccactctgtcatccaggctggagtacagtggcgcgatctcggctcactgcaacctccacctcccaggttcaagcaattctcctgcctcagcctcctgagtagctgggattacaggtgtgtgccaccatgcctggctaaatttttttttttgtatttttagtagagacggggtttcaccatgttggccaggctggtctcgaactcgtgacctcaaatgatccacctgccttggcctcccaaagtgctgggattacaggcgtgaaccaccatgcctggccaggctgggcccttttattgttaggaacggtccagtctgcatctagacctatccgtgcttctggctcacctgcagccctctcttgtagaaaatggtgctggctttgctggagctggcgcagcaggaccacggtgctctggactgctgcgtggtggtcattctctctcacggctgtcaggtaggaagcctcccactgttccctgggcaggcattgggtactggccgtgccaagaggctgtgcaggggccatgtcccttcttgtgtccaaaacacccttggctttgtggaaaagggctgtggggccctgcccacctcctgttgttttcttgggagccatgtggtcctctgaggagttggctgcaccgtcctgggcaggtcggtgttcctgggagaagccctctgggagagggagggcagagaccaggtctgctcacgaagctcctgcacccagagtttgttcagaggcgggtacagcacacatgttgtctcagctcctgtctctgtcctgtgaggcactgccccaggccccttgctgctggtgggactcaggacaccaggcccactgggggcttggccccttacgtatttgtcactgtgattaagcccttaccccttactgggcctcagtttcctcatcttttaagttgaggagttggacagatcacagttataagctggggcctggagtccccctgtggtctgcacggtgttttgaaaactggcaaatttcacataaaaatcaggatttctagtttctcttgacaaaccgcaaaggtctggcctgacgaggccagcatcttcagccagtaaaactccagcctgtggctgggcagggctttccctttggtcctttctctcataatatggtccctagagctcatgaagaatgtggactcccaggccctaccctggacctcttcattccaagtccgcccagcaacaaggtttccaggtgatttccatgcccttgaggtctgagctgaactgatttaaagcagccactctcagcgttgagctgcctcagtcagaggggcctggaggaccatactgctgattaggaggtctgggtggggcccaggaatcacatttcttacaagttcccaagcgatattgatgccgctgctgcaggggccaaactttgagaaccactggtctagaggccgcagccagcactctccaggcacactggcccctagaggcacatgagtttgacatgcaaccccttgctgtcaaggtgtctttccagatgctgaccagggtctttccagaaccaacctgctctgtctcaatcagcctcgtgcccctggctttgaccttccaaatccttggctcccacaaaacctctgaacaggctgttggattcctactccaacttcttggttttgtaaccagggttcttggtcttctaggccagccacctgcagttcccaggggctgtctacggcacagatggatgccctgtgtcggtcgagaagattgtgaacatcttcaatgggaccagctgccccagcctgggagggaagcccaagctctttttcatccaggcctgtggtgggggtaagcagctcctcagcctccctctgggtgggtctggtggggagggagccgccacctgcttctttctccagcctgcccctcacagggcccatgaggtctctccaggcagtcagagggtaccacacatggtccctttttggcagcacctctgtctggctggagcaggccctgctctgtctgctttgtagaggtcagagtcttctgtttcatggcacagtggcatcatgggctcaagtaactttggcagcttcaattccaaagacttggcaaaaagaaagcagaagagagaggagaaacctctttttatttttcttgtcaccattctcctgacctccatcaactagaccccgtttccactatcccagagaaagggtggccacagctaaactgcatggagaaaccaaagaatttaaatattggaattttcaaaagtgtagttgtgggggttcgaggaacatttaaagattacttgggctgggtgcagtgtctcatgcccaacactttgggaggccgaggcaggaggattgcttgagccaggagttcgagaccagcctgggcaacacagcgagaccctgtctctatttttgttttgttttttaaatgtattacttggattctttgtagttttgctgtatgctctaattttaaacttaactcctattacagtgttatctgattttcttataaaaaaagagggaagagagacaaacatggggttcctagtttgtgggtcatgacaggaatatcagggagcgctagaaattctgtcccagggagtcccctctgccctaggctctccacggactggaacattcagaaggtatatcagttccttgcctccagcctgatctgccagagaagtgagcactgttataccatagcgctgtccagctcgtccagctgtgacatgggcacctgtggtctatttctcctgtgcacatccaactgccccatccctattccacgttggtggagttgggtggaggctacctaggagagcagtctctggtcacatcattcatccagtaagtgtttattgagcaccatctgtatataccaggctgtgcgttaggtgctggggataggggaaaaacagagtttcagtctcctggaatttataatttgacatgaactgtattaagtcactgtcatgacccatgcccataacttgaccacaagtgattgagaacacttgattaaccctggatgggctactgacctatctatcacacagccctgggccagttcatctctagacagctcagcaaatggggaaaataacagaacccactcccaagctcaggtgatcctcccacctcagcctcctgagtagctggggctacaggtgcacactaccatgcccagctaatttttctattttttttttgtagagacagggttttgccatgttgcccaggctggtcttgaactcctgggttcaagcaatctgctcacttcggcctcccaaagtgctgggattacaggcgtgagccactgtgcccaggcaactttaataatatttaatgcactaattggtgtgtgtacagtgattggttcattttaataactgaaaacccagcctgccccccgctcccaccccggaggacccagtgtcacataagagtcccccaccccgctgtcgccagcagagttccctcaggacaacagtaacaggaagtgaggaaggctgccactctcggggctgtagaaaccctgctctgcctcacctcctgtcttatccacagtgtgtggtccagcaatgctcttccttcggagcctccggtccctctttctcctatgaatcaaatgaaagacagaaagggcaggggaattaggaatgcaggctgagcaggcatacctactttctggacagttagtcagtcttgtgctcctcccatgccccatccagtctcagtctcaacagcagggagggcctttgtcacgtgaatatctgctgtcactcttaggactcagtagcagggcttccaaggcctttggtgacctggcccctgccacttcaccttccccagcctggcatgctccgagtccccagcacggcccagccttcccaggatgtccaggctcttgcttgctcttctacctgctcccctggctaactctttttttaaaattcatttttacttattttgttttagagatgggggtctcactatattgcccaggctagtcttgaactgttgggttcaagtgatactcccacctccgcctcccaaagtgctgggataacaggcatgagccaccgtgcctggcacctggctgactcttaatcatccatccttctggttacaatttattgtcacttccctaaacaccccctttcttggccaaagtcagggttagctggcctttgtgctcctgcagcctctgtccctcccctaccatagcactgtctcattgtattgagatgggcttatcccctggtcagctctgaggggagggccaggcctaccctgcagccaggcccccagcctggcacagagcccacagtctggttgcgtctcatgtggattctaatttgaatgtaaaggagaaccatacaaaagcatctgtggtggttcacgcctgtaatcccaacagtttgggaggccaaggtgggaggatctcttgagacgaggagtttgagaccagtctctatcataaaatttaaaacattagccaggcctggtggtgtgtgcctatggtcccagctacttgggatgtttaggcaggaagatcgcttgagccctggaggtcgaggctacagtgagccatgtttacactattgcactccggcctgagtgacagagccagtctgtcacctgtctctaaaaaaataaaaaataaaaaaaaaatatgagccaaatttggcataatgtagatttccatcattaaaacaaaactcacagaaaacagcaagatttcaaagccagcatgcagtgattaagatatccctttggagtcgggtccttgctttgcctccgcaggctgcgtgacctggtgcttaacgcagttaccacatggtggcgccacgtcagctgagagcagaaatagaaaggtccccgttcttcactagtgcctggcgaggggtctgtttacatgcatcagaacacctgtcctgggttttgaggactcttgtattgctattttataactcactataatactttaaaaatatttaatttaaaaatcatttaataattaatttaaatataataataaataatttaaaaatcatttttaaataataattttaaaaccctccaacatgtcatccacccattcattaggaggtaacagcaccagggctgaaaaatgtgcattaaagtcgataactttggtgtgcaacgtcagcgtgataggcaaccaagtagccacctctctgaggctgagccgtcaattttggggtgacccctctttgggatttgagagatcgggctgagaagacagaaagcaatgacaatatgctgcagtggtcgtggattttctgtgcggagggaacatctcctcctactgtatatttattcttgtggggaatgagtcctgccctacggggagttttgcattaatgaggctctctaagaaccgaggctctccaagaaccaagccatgcatacagtgcagaacaccctaggcaaggccttcacatcagatttgtgggctgaggctgacacgtgaacggagctgccttagcgccccgcctgaccccctctttcctttcccccacaccccctgctctgatctgctgtctcttctcagcctctctgctcaccctgtctcttctggccattcttaacggcatcccccacttaggcatccctccgcccccacaggctgccaggcagacccagcaccatcacattcacgcctcaggcctccttgctgtgctgtttcacgtcattcccagacacctggggcagattccggagtctctaccaagaaaacaaccagaagcaatgaaccacaaaatctggagaaaaacatggctgtcacagatcaaagaggcccccctttggaggctgggggcctccgtgagaagcagtgggatagttgagaggcaaaaaacatggggcagaattccgcgcccctcatatcagctgggagaatgccaatgaccagtggtttctgagctttagctgtgtggggtaagaggtcaatagattttggtgttactattatggggttgccagagccacctctgttcctgccagatgggcccccagctcctctgggtgaactgtgacttccctcagtcacatagatccagccatgcaaacctgcctgcgttgcggccacagcacttgctgtctctctcaccaggaccgttctccctgatggcatcagggcctggatcacagtcacattctccaggagtgtttttgcaggggaccctctggatcactcctactccaacttcagcctatttttaaaaaaatttctctttttttttctgcagtatgtatacatagttaaatatatatttatattttttaaccaaagctcttgttagatgccttctttcctgagtagccctctgtgctccgccttaccccacccaccatgagccctactgcagaagacctcatcccggaagacctccgtcagtgtctccacttcagtagctctgtagctgagccatgtggggcacaagtcctgccaggacctctctgttttccaagcttggcactgcctttggggagtctagattttaaaatggaaaagacaaaaaatatggcaacctaaaaaagaaaataattcagaatgttataagctaatacagccatctcatttttgcatcttccttttggattccagcccatgagcacagtctgcttttctcagctaacgttatcccttaagcagttccccagatctccatggccttcatcatcactagctcaaatggctttataatgggccattttcatgacatgcactaatttactaaaccattttcctaatgtcggccatttaggtgatatctaatttttggctcacacaaccacaggtgtcttcatatagaaagcttttgactgcatttgaattattttcttaggaaattactggattagaaggtgtaaacatctccatggatttcattatccatgacttggtgtctatttggtatttttctgatggcttctttgattctagaaaaggatttgccatagtgcaagaagtacaaatgataacactaggacaaaatagagagggaacacaaggagagaagaaaagtaaaagtttggattccaaaaatacatcctaggatgtcctgcagctttctacagttctctaatgtacaagtgaattaaaaatttaaggtatacaacgactgattttagagataaaatcactttgcagatgtaaagaaacatggaaaaatcccagccattggtaatagtagactcaaaaatgaggtaggtcaaagtcccagtcagcctctgtctggggggaaaccccttaacttatctcagtctcagttgcctaattacataaaatggaatactgatagctacttgctagaggtggcctgcgcattttttacgctttccagccgccattggaaataagatcattggccaggggcggtggctcacgcctgtcatcccagcactttgggaggctgaggcgggcagatcacgaggtcaggagatcaagaccatcctggctaacacagtgaagccccatctctacaaataattagccaggtgtggtggcacacgcctgtagtcccagctacttgggaggctgagacaggagaatcgcttgaacccaggaggcgaagcttgcagtgagccatcgcgccactgcattccagcctggatgacagagcgagactctgtctcaaaaaaaaaaaaaaaaaaaaaaaaagatcactttcaagatccatggaatctggtgttctatagttctatatctggtatttgcaagacagaagtcaggaatagagactccagacacatttcttcccttggttgtcttaaaggggacactgtgatcttgacagcctgagtaaagggtttgagtgagtgcctatgatatagtggacagtttcctcaactatatttctaaaaaaagacaagttttatgtctttttaaaaattgtggcaaaatacatataacataaaatttactatcttaaccatttttttggggtgattgcttgagctcaggagtttgaggctggagcgagttaagatcatgccacttcaatctgggcaacagagcaaaagtgtgtctcttaaaaaaaaaaatgcctgtaatcccagcactttgggaggccaaggcaggcagattgcttgagcccaggagtttgagaccagcccgggcaacatggcaagatcctgtctctacaaaaaatacaaaaattaactgggtgtggtggcacctgtagtcccagctacttgagaggctgaggtgggggatcacttgagcctggcaggtcaaggctgcagtgagctgtgattgcaccactgcactccagcctgggtgacagaatgagactctctcaaaaaacaaaaacaaaaacaaaaaacaatcccccaaaacaaaacaaaaaaccactgccctctccccactgaatggtcctgccacccttttcaaaattcatttgaccacgcatgtgagggtgtatgtctgggctctattcaatgacattgacctatgtctgtctttatgccagtaccatactgttttgattactgtagctttgtagtaagttttgaaatcaggaagtgtgagtcctccaattttgctctttttccagattgttttgtctatttggggtcccttgagattctcgtgtgaattttaggatagattttctatttctgcaaaaaacatcattggggttttgatagggattacatttaatctatggattgctttgggtagtattgagatctttaagttttctaatccatgaacataggatatatttccatttatttatatcttttttttttttttcttgagacagagtctcgctctgttgtcagactggaggactgtggcgccatctcggctcactgcaacctctgactccctggttcaagcaattctcctgcttcagcctcctgagtagctgggattacaggcacacgccaccacgcccagctaatttttatatttttagtagagacggggtttcaccatgttggctaggatggtctcaatctcctgacctagtgatccaccagcctcggtctcccaaagtgctgggattacaggcgtgagccactgtgcctggcctatgtcttctttatttttctttctttctttctttcttttttttttttttttttagatggagtcctgctctgttgcccaggctggagtgcaatggcacgatcttgactcactgcaacctccgcctcctggattcaagtgattttcctgcctcagcctcccaagtagctgggattacaggtgcccaccaccacgcctgggtaatttttgtattttttaatagagacggggttttaccatgttggccaggcttgtttcaaactcctgacctcaggtgatctgcctgccttggcctcccaaagtgctgggattacaggtgtgagccactgtgcccggctctttttcttttttgagactgggtcttgctttgtcacccaggctgaagtgcagtggcgcgatcactgcacactgcagcctcaactgcttggactcaagtggttctcccacctcagcctcacgagtagctgggaccacaggcacatgccaccacacctggctaaattttttattatgtgtagagatgaggttttgctggtctggaactcctgggctcaagggatcctcctgcctcagcctcccaaagtgttgagattacaggcgtgagccatggcatccagccttctttctttcagcaatgttttgtagttttcattttacaagtctttcatcttggttaagttaatttctaactattttattatttttgatgctattgtcaatggaaccatttttgtaatttctttttctgattgttcattgttagtgtatagaaatggaagtattttttgtggttggcttcgtatcctgctaatatgctaattttatttgttctaatagtgtttcatctttagggttttctgcatataaaatcataccatttgtgagtagagataattttactccttctttccaatttgaatgtcttttatttctttttcttgcctccttgctctattaacttctagtaatgtgttgaatagaagtggcaaaagcagaaattcttgccttcttcctgatcttatagaaaaaggtttcagtctttcaccattgagtataatgtttgctgtgggtttttcatatatggcttttactatgttgaggtagtttccttctattctgagtttgttgactgtttttatcatgaaagcttgttgaattttgtcatgtgcttttttctgcatcaattgagatgatgatgtagggtttttttcattctcttatgaaccccaaaaatctgagacaggtctcagtcaatttaagaagtttcttttgccaaagttaaggatgcacgcccaggagacaggtctatgcctttctctgaacatgaattttagggttccaaatttaaaggggaaagggcaggatattgagaagtacacagttttcaggtaagagcagggtagggggaaatagtcattcaagcatttgtctggctcagtgaatttgcatttttacgtaaggtaacatagggcaggggaaaatgcagggaacctgcatttttacgtaagataacaaagacaaatggggcaggggaataatcagatatgcatttgtgccaggtgggcagaggggtgatgcctctgtaaagataagctatccatttacattgccgtggtgaattttatcagacaactatcttggagctcaccaggaatttccttgtgggcaaaatatgggagaggtgtgtagcttttcatcttgtagccatcttatttaggaaccaaaacggggaggcaggtttgcgtgacccagttcccagcttgacttttccgtttggcttaatgagtttggggtcccaagatttattttcctttcacactgttaatgtagtatattgcaccgactttcatatgttgaaccatccttgtctgtgtatttcaatgacaagaggtgtttgtttctgcttcctgcagagcagaaagaccatgggtttgaggtggcctccacttcccctgaagacgagtcccctggcagtaaccccgagccagatgccaccccgttccaggaaggtttgaggaccttcgaccagctggacgccatatctagtttgcccacacccagtgacatctttgtgtcctactctactttcccaggtgagcacatcagaagggctcgtcctcgcagccagtgggtcttcccgtctgccctagaggcagctgtgtggtgagagaaaagaccagggtatgagtcctggttctgtcttttgcccctctgtgaccctgagcaagttacttctctctgagcctcggctcaggctgagcgggcaaggatgcgcgctgcaaggaggcctgcgcccttgggttcctatgcctcacttgcctctcctctgcctgaccctgcctctgccttcgcatctttagcaggggaataggaatcgtgcctcaggggtttccatgggaattaaacaaggtggctggcacgtcactgagcacagtgcggggcacgtagtagttgcagcaagcggtagtttccttccttcttttttttttttttttttttttttgagatggaatctcgctctgttgcccaggctggagtgcagtggcgcgatcttgggtcactgcaagctctgcatcccgggttcacaccattctcctgcctcagcctcccaagtagctgggactacaagcacctgccaccacgcctggctaattttttgtatttttagtagagatggggtttcaccgtgttagccacgatggtctcgatctcctgacctcgtgatccacctgcctcggcttcccaaagtgctgggattacaggcgtgagccaccgcgcccagcctttttttttttttttttgagacggagtcttgctttgtcgcccaggctggagttcagtagcatgatctcagctcactgcaacctccacctcccgggttgaagtaattctcctgccttagcctcctaagtagctgggattacaggcatgcatcaccacacccagctaatttttgtatttttagtagacacagggtttcaccatgttggccaggctggtcaagaattcctgacctcaagtgatttgcccacctcggccttccaaaatgctgggattacaggtgtgagccactgtgcctggcagtttccttcctttcttatgtcttggatgagtcacttgacttttccaagccttggtttccttgctgggaaaacaggaattatagccggaatcaggggatggtcatgagggtgaaataagatcatgattagggcagagcctcaggggccaggctgctcctgttggatgtatgtatgagtcaaggtctggagggcgcccgagccagcgtgcatggccagaggggtggtggggagccggcggaggggtggctctccagcagtgttcagccctcctccctccaaaggttttgtttcctggagggaccccaagagtggctcctggtacgttgagaccctggacgacatctttgagcagtgggctcactctgaagacctgcagtccctcctgcttagggtgagtgctgccttcctctgcaaaggagaggggaggctgctgaggggcagcgtgtcctcctggggctggggatttggggtgagcagggcaggcccaaaccaagggtaaaaggtagtagactcctgcctctgagccttggagtcggcacttttgtgtctctttatgagaggcatcctgcctgtggtgacgtttgccctttattcaaagagttgccttccctgtctcctccaaggtccccaggttgacacctcccgctcctccactgatggagctggtcctcagtgccagcgcaggatggctctgtccagaccctgaaggcgggtcatgggcccctccctatatcctgtgggcatcatgtagtcttctactcttgaccctcaagaattgtgaacccctccttgtacatcgccttctcaggaggccccagtgaggaaacagatagggaagggtggcctgataggcccagtcctactccatagaaacccgactcagagcagttgcttcctctgagggtcctgtggccttgtggctgccttgggaggcagcatgtatgggccccagctgctctgctcaggtattcatgccacgagaaggggctgcgaggctggggccactcctggctccttgcaaatatttcagtctgatttgaactttatgaatttggaaattttgaattttgagttttttaaaggtaaagttgaggtgcgtattctttaagccctcctgctcaaagaggctgcagtttgagctgtttttaaggtgcgggttgagtggacattccccccagcccctcttgaattcttccttcagtccagagaactgaactcacagagctctccatggtcatgtcttacaggtcgctaatgctgtttcggtgaaagggatttataaacagatgcctggttgctttaatttcctccggaaaaaacttttctttaaaacatcataaggccagggcccctcaccctgccttatcttgcaccccaaagctttcctgccccaggcctgaaagaggctgaggcctggactttcctgcaactcaaggactttgcagccggcacagggtctgctctttctctgccagtgacagacag

SEQ ID NO: 11078 - DNA, 740 bp, Homo sapiens
ctgtggccactgcctcattatcaacaatgtgaacttctgccgtgagtccgggctccgcacccgcactggctccaacatcgactgtgagaagttgcggcgtcgcttctcctcgctgcatttcatggtggaggtgaagggcgacctgactgccaagaaaatggtgctggctttgctggagctggcgcagcaggaccacggtgctctggactgctgcgtggtggtcattctctctcacggctgtcaggccagccacctgcagttcccaggggctgtctacggcacagatggatgccctgtgtcggtcgagaagattgtgaacatcttcaatgggaccagctgccccagcctgggagggaagcccaagctctttttcatccaggcctgtggtgggggttttgtttcctggagggaccccaagagtggctcctggtacgttgagaccctggacgacatctttgagcagtgggctcactctgaagacctgcagtccctcctgcttagggtcgctaatgctgtttcggtgaaagggatttataaacagatgcctggttgctttaatttcctccggaaaaaacttttctttaaaacatcataaggccagggcccctcaccctgccttatcttgcaccccaaagctttcctgccccaggcctgaaagaggctgaggcctggactttcctgcaactcaaggactttgcagccggcacagggtctgctctttctctgccagtgacagacag

SEQ ID NO: 11079 - DNA, 19593 bp, Homo sapiens
ttagttggctactcgccatggacgaagcggatcggcggctcctgcggcggtgccggctgcggctggtggaagagctgcaggtggaccagctctgggacgccctgctgagccgcgagctgttcaggccccatatgatcgaggacatccaggtgcgcccccggccccctgtccccgcgctgcacggccgggtccccacgcccctcgaggaggcgttgtgcgggagcctagccttccctgtggcttcaaacccctcagcggagccaaagaatcccaaacacctcttagtcgggtgttcgctaaagcgattccatgccatactcagtcagcgtacactgttagtgcttgtgtttcttgtgtaaaggaaaaatgtgagacacatcttgagaactttgaataagaaacaattcatgaattggagaacatcagactgaaagagctttagtgttgcaatgacaaaacgtcagaggcaagtatttattgggaaaatgtggaagcaaaataaagaaattatttgattggtttgcagttacaaaattgccttttttttttaaggtctgttaattgactgcttttggctggtcttaagttttatttctctctaacataagcatttatcagatatgacccaagttaaattttgcttatgtttgcagtttaagcaagatttaggtcacttaggatacctgattggttttgtctgctcaggaattcttcatggttggtctccattttaatttacgttaatacttgcgaggaaggaggcgtgtgcgtttttacttttctagcatagaggtttcgggaacccactttggcatcaggctgcctggcagcgtgttcttgggccagtcacttaccctctttgagccacagtttctgggctgtgaaatgggaataagaataatactgtcataaggactaaatgaaataacggatgtgaaactgtagtgctaggcacagagcgggggatcagcgtaccctgccctctttggccagccccttctgtgttcagtttatgttttgttaagaggttttggaaatgaggggacctgatgcagaatggagaataatgaagtcaaacatttgaggttttgtttaaaagcactttcccatctttgtctcatttgaccctcatcacaggcctgtgaggatgcaggagatatttcctaccatgaggtgcagtaggtgtgagtggctggctggatatccctggccagtgccctggcccagggaaagagtctttaaataattgagtatcatatgagtaattattcattaataataaaataagttttgtgccttctgtgtggcccctactggggaacagtaatggtttgaggccacagtccttgccttcaggaatgttcacggggatcacaaactcaaatgcccatggaggaccaatggatgggcgtcatagtggatagcctttgcactgccctccgtctccagctgagtatggccatatcaacaaatggcccagtattgccacatcttacacttattttgaggcagggtctcactcttgcccagcctggagtgcagggatgagatcatggctcactgcgaccttgacctcctgggcttaagtggtcttcctgcctcagcctttagagcagctgggactttaggcacatgccaccatgcctggctaattaaaaaaaattttttttttgtacagataggagtcttgctatgttgcctagatgagtctcaaactcttggcctcaagtgattctcctgcctcagtgttgggattacaggtgtgagccactgtacccggcccagctttcacatcttaaaaaagaagctgaaaatcttgattcctctgtcaaattccctggcttaaaatgttagcaacaaattcagaaattttttaagaaccttgtgggaaccacaggttgccattttgccattcagtatggctgaaaaacaggcaggttttggaaccagttggatctgggctctcatcctggccttgttacatattagcaagttgtaaaaaaccacaaccaatgagccaaacaaacagaaaaaccctatgactcagtttccctgaaattttttaccctaaaaagttgggaagttctaatttaactctataaagttattgagggagaaaaagatgaaacaatgcatttaacacagtgttgacctcctggagtgttcagcaaatgtggagagaaacctaaacaccaccatctatttgcatgtagccaactgttctgctagtgagacttaccttctcagtggcactgtaggtctgtgctgttcccaacagtagccattagccacatgtcgttaaaggtaaatttgaagtaattaaaattaaataaaactaaaaattggtagggtcaagccttacagggcctgtgggtttttctcctcgtgtgcggagatgagagatcgtagaaataaagacacaggagaaagagatagaaaaaaagacagctgggcccgggggaccactaccacctagacgtggagacagggtagtggccccgaatgcctggctgcgctgttattggatataaggcaaggggacagggtaaggagggtgaatcttctaagtgattgataaggtgaagcaagtcacgtgatcataggacagggggcccttcccttttaggtagctgaagcagagagagaaggcagcatatgtcagcgttttcttctatgcacttataagaaagatcaaagactttaagactttcactatttcttctaccgctatctatgaacttcaaacaggaaccaggagtacgggaggaacatgaaagtgggcaaggagcgtgaccatggaagcacagcaccacagggaggggtttaggtctccggatgactgcgggcaggcatggataatatccagcctcccacaagaagctggtggagcagagtgctccctgacgcctccaaggaaaggagactccctttcttttttttttttttttgaggtggtgtcccactttttcgcccaggctggagtgcaatggtacgatctcagctcactgcaacctccaccttccgggttcaagctattttccttttttttttttttttttttgagacggagtctcgctctgtcgcccaggctggagtgcagtgccgcaatctcggctcactgcaagctccgcctcccgggttcatgccattctcctccctcagcctcccgagtagctgggtctacaggcacccgccaccacgcccggctaattttttgtatttttagtagagatggggtttcaccgtgttagccaggatggtctcgatctcctgacctcgtgatctgcccaccttggcctcccaaagtgctgggattacaggcttgagccaccgcgcccagccagggttcaagctgttctgcctcagcctcctgagtagctggaattacaggtgcgcactaccacgcccagctaatttttttgtatttttagtagagacgggtttcaccgtgttggtcaggctggtcttgaactcctaaccttgtgatctgcctgccttggcctcccaaagtgctgggattacaggcgtgagccaccgcgcctggcaggagactccccttcgcggtctgctaagtaatgggtgtctccccagacactggcattaccgcttgaccaaggagccctcaagcggcccttatgcgggcctgacagagggctcacctcttgccttctaggtcacttctcacaatgtcccttcagcacctgaccctatacccgccggttattcctaagttatattagcaatgcaacaaagagtaatattaaaagctaatgattaataatgtttataataatgattgataattgtccatgatcatctctatacctaatttgtattatgactattcttattctaactattttctttattatactgaaacagtttgtggcttcagtctcttgcctcggcacctgggtaatctttcgcccacaaaaattcagttcctcagttgtactacccaagtgcttaatggtcatgtgatatatggttactaaataggacaatacagaccaagaatatttccatcatcacggaaggttctcatagacagtgctgctgtaggatagttgaggacacggtgccatcttatccctgtggatcctgagaacctgtccagtgctgggtatctgaggacaggtggcagataaccagactcttccttcttagtgactgaccccaccatcctgacacctctcaatttttttttttgagacagggtcttgctctgtcacccaggctgaagtgcagtggtgctatcacagctcactgcagccttatctcctgggctcgagccatcctcttgggagcctcagcctcctgagtagctgggactacaggtgcgtgacaccatacctggctttttttttgttattttttgtagagacagggtctcactgtgttgtccaggctggtctcgaactgggctcaagctatcctcccacttcagcctcccaaagtgctggaattgcaagcatgagccactgtgcctggcctgcctgtcaaccttgacccttgctctgtcttcacagtccccccagtcagtgcccatgtcctatggaccctctctctttgtatctctgctttgtcctttcacttctctctattctagctgcaccatctttgctgcctcctgatctggctatggctcactcctttccatttttcaccctgacccctggatgactttttgaaaggccatatctgtctctgtcactccattcttaaaactctttggtggccgggcatggtagctcacgcctgtaatcctagcactttgagaggctgaggttggtggatcgcttgaggtcaggagttttgagaccagcctggccaacatggtgaaaccctgtcttaaccaaaaaatacaaacattagccaggcatggtggtgggtgcctgtagtcccagctacctgggaggctgatgtgggagaatcatttgtacccaaaaggtggaggttgcagtgagctgagatggtgccactgcattccagcctgggtgacagagcaagactcctcaaaaaacaaacaaaaaaacaaccgatggctggccacggtggctcatgcctataatcccagcactttgggaggccaaggctggaggatcacttgaggtcagttcaagaccagcctgggcaacatggtgaaaccctgtttctactaaaaataaaaaaaaaattagtcaggtatggtggtgtgtgcctgtaaccccaactactccggaggctgaggcaggataatcgcttgaaccttggagttggaggttgcagtgagctgagattgcaccagtacactctagcctgggtgacagagtgagactccgtctcaagaaaaaaaaaaaaaaacaaaaacaaaaccaaaaaactctttggtggcacctgacaggtctcaggatgaatttcttggcctggccacacaaaggccttgtcccttgccactatctacctcccacctcataagactctgaattcgctattcacttcatgatatcctcagccccatgtgcttccctctgggcacttgtctcttgttgtgtcattgctgatttgtctgattgcattccccattagaaatttgctccttaaggactgagactgtccatggcagcattttcagcacttagcatagtgctgggcatcttttgccctgcaaaataatgaacagatcagcaaaggctggtaaatggcacacagtgcacctgcagctccattgctgcccacgtgcctgattgtttagacttacagtagctgggaaatggggagacaaggtgagagccatataaaagtacgtggataattagtatcctgcctttctttccaaacagcgggcaggctctggatctcggcgggatcaggccaggcagctgatcatagatctggagactcgagggagtcaggctcttcctttgttcatctcctgcttagaggacacaggccaggacatgctggcttcgtttctgcgaactaacaggcaagcagcaaagttgtcgaagccaaccctagaaaaccttaccccagtggtgctcagaccagagattcgcaaaccagaggttctcagaccggaaacacccagaccagtggacattggttctggaggatttggtgatgtcggtaagtagcaagagagtgattggtgggtgggcatgacacgtagtcatttgggactcactatgagtacagctgggtgggctgagattcagaatttaattttagcattgtctttctgaatgttcatagggatggcaaaattctgggaggttttcaggaggttgaatcttggcagcccctcctctgaaaagcatgtgttgaggtctgttttggatgtcccaggttttttgtttttgtttttgttttttttcctgcctttgagatagcaggccccaggttttgatcaatgtttccagagccatctattgttttggatttgcctttcagtctgggtgggtagcctggactacctcatgtctgggggcaggagacaggcctcagttgtatctgccccatacaaacagacatctgcaaagtatttacccttaccttcttcgtttatagcaaccttgcaaggcaggtatcattagacccatccttgttgatggagaaactgactgaagctcacggaaattaaacactttgccaaaggtcacacggctacatccaacaaaatgcataaatcccaagagtaagctgggtgatttttacctatgcatacccacaggtaactaacacccatatcatcaagatgaaaacattccggggtcctgtaagaccgttgactctctttccatttcttcccactttccctttcccaaggtaatcaccgttctcatctctatcgccagagatcccttttgcttgtccttaaacttcaatataaatcctatatagtcttatatgctcttgagcctggcttctttcattcatcattgtatctttgaaattcattcatattgttgtacatatcggtagttcattctttttaatttctacatggcattctgaataatccacagtttatttaaccattttcctactgatggacatgtgggttgttttcagttggggctttgttcccatggcagcgtgtggagctctagcacttcctgtttcatgggtgtctggtggaccattgcatggtatcaaagttaataatcataatagtaatggtgaacattattgagtaattgctatttgccaggcaccgttcggagtgcttacataaatgatctaatttaatctctccatctctcttgtaaggcaggtgctttgctgttagaaaaagtgagccacagattgggagatgacttgtgccaaatcacacagctagtgaggagtggagacagggctgcagcccgggcttacctgttctgtctgctctgcagggtagccccatgtgtgctttgtgggacacacctcattgatccgactcatgctggtggacattgtgttgtttctgcagttagccttgcatgtgcgtctagttctgactgcaggatatttctagaaatggaattgtgtgttaaagggtacttgttcctgtccgatagatgctaccaacttatacttcaaaaatatgtcattttagccaggtgtggtggtgtgagcctgtaggacaagctacttgagaggctgaggcaggaggactacatgagcctaggaattcacagccagcctgggtaacttagtgagatcctatctctaagaaaaaagaaattgaaaaattgtgtcttttttttttttttaattgaggcaaggtcttctgtggcccaggctggagtgcagtggcatgatcacggctcactgcatccttgaactcccaggctcaagcgatcctcccactcagcctcccaggtagctgtgtgcgccaccaggcctggctaatttttttgtattttttgtagagacagggtctcaccatgtggcccaggctggtcttgatctcctgggctcaagcaatcctcccatctcggcctcctggatagctgtgcatgttatccctggccattttttttttttttttttaagagggagtctcgctctgtcacccaggctggagtgcagtggcgcaatctcagctcactgcaacctccacctcctgggttcaagcaattatcctgcctcagcctcctgagtagctgggactacaggcagccgccaccatgcctggctaatttttgtatttttagtagagatggggtttcaccatgttgcctaggctgatcttgaactcctggcctcaagtgatccacctgcctcagcctcccaaagtgctgggattaaaggtgtgagccaccactcccagcccatgcctggccaattttaaaattttttgtagagatagggtcttaccgtgttgcccaggctgccctcaaactcctgtgctccagtagtctgcccacctcggcctcccaaagtgctggaattacaggtgtgagccactgcactcggcccaaattgtgtcattttataatctcaccaactgcgagtgaaggtgaccactttcccacattcttgccaacagtgaatattgacattttttcctgtgtgatgggtaaaaagtgctgttttctttcaacaaaaattcaccaaaactcattcatattgttgtgcatatcagtagttcattctttttaatttctagatggcagcagttcctgttctgaataatccacaatttatttaaccattttcctattgatggacatgtgggttgttttcagttggggctttgttcccatggcagcgtgtggagctctagcacttcctgtttcatgggtgcctggtggaccattgcatggtatcagagttaatattcataatagtaatggtgaacattattgagtacttgctgcataatggtgatttttgggcaatccactaaagcagagaaacagacaaacatgataagggtaggaagctgcatttgcttgaagtgtaaggaagaagactggttctggaattggccatgtgcattaccatcctgtaaaggaggcaggcagaatacaaagctcatctgttgttatttggttctgggaaatgtcaacgtgagtcatttaggaccaacagtcagaatttgaaacttcctgtttttttggaaggtgttttatttcctgtttcttgtgaatatttattcctagtaggagcttaattctgaagggtaaataacaacagcaatagtaagatcacttaattttttttactttattattattattttttgagatagggtcttactctgtcacccagggtggagtgcggtggtgtgttttcggctcactgcaacctctgcctcccaggttcaaacaattctctcacctcagcctcccaagtagctgggactacaggtgcaccaccatgcctggctagtttttgtattttttgatagagacaaggtttccccatgttggccaggctggtcttgaactcctgacctcaagtgataaacccgcctcagcctcccaaagtgctgggattataggtatgagccagcacggctggcccaagatcactttaaataatgtgaatatcactttgtagtatacacagtgttttttcaggtcatcaaaaccaccctgtgccgtggtagacatggcaagcccgtctgtcattatatgctacttacaggggaggaaactgggttctgagagcaacagtcacaaagtgagttccagtacagagctaggacttgggcctaggtcttctggcttaatagagcgactgtcccattttccatgagctgctgagagatgtcctttttagatgctgggccttagactccagagtactgcatgggaatgtttcccaaggtaggtttcatggtgacccacaaaggaagagctgtgtattcatatgtatgggaaggtctggctgagcaagaatagggccagcagcagagcctttaataagtgaatacaggaaaggatgctgtaggtcagtgtttcacactggggacgatttttccccgacctccaagggacatttgacaatgtctagagacaaatctggttgttatagctgagggtgggtgggtgctactggcatctagtgggtagacagagatgctgccaaaacccaacagtgtacagagtagctctgcacaataaagaagaatctggcccaaagggttagtgtggtggggctgagtacacacactgcactcatacatattcattgagcatgagtgtcaatgaataataatgtggacacatcagttttattgagttgtcaagtgtgtcgggtattgttctatgtgcctcacatgtattaattgtttgaggtgtcatcacaatcctatgaggttggtagttgctcctattatcctgtaatacagatggggaaatcagaagcccagagactctgagctccttgcccattgtgacacaggtgctaagtgttggagttgggatttgaacccaagtacctcagactcactccatcactgtctcatgaagaacaaatggctcattctctttcttgtccctatatttgtgccattactcattagctcacacaaatgtttactaagtacctgttgggttctaggtgttggggatgcagcttcgaacaaggatgcccagtccttgccttcaggtggagaggggcaggtactcagttcatgcttgcctaatttggtctttattcacggctgtgggtagtgctatgaagctgaacacggtgctttagaggtgcatcattaggggacccaccagagagagtggctttgtctttgtatattcaaaggaaaatgccttttccttcagaatggaaggaactttcttagtttcagacgtgatgccttgtgtgtaactgcttgttccagccagggcctcttgcccgggaggactgggagaactgttggtggctgtgttctcatgattctccagagaaagagaaccaatagggggtgtgtgtatgtgtataaaacagcatcttttgttcaatgctgcatccccaacacctagaactcagcaggtacttagtaaacatttgcatgagctaatgattaatggcacatatacacagacaagaaagagaatgagccgttcgtttttttttttttttttgagacggagtcttgttctgttgcccaggctggagtgcagtggcgcgatctccgcacactgcaagctctgcctcctgggttcacgccattctctcgcctcagcctcccgagtatctgggactacaggcacctgccaccatgcccagctaatttttttgtattttttttagtagagacagggtttcaccatgttaaccagtatggtcttgatctcctgacctcgtgatctgtccgcctcagcctcccaaagtggtgggattacaggcgtgagccactgcacctggccaagccatttgtcctttatgaggcagtgatggagtgagtccgaggtacttggttcaaagcccaactccaacacttagcagctgtgtcacagtggacaagtagttgagtctctgggcctctgttttatatatatacatatacacacatacacacacggatatatatagaaagatatatgcattttttttgtgtgtgtatatatatatatctttatctaaaaacatatttattacaaggaacaggctcatgcaattatggacgctgagaagttccaagatctgccatctgcaagttggagaccaggaaagctggtggtgtagttccagtctgagtctgaaggcctgagatccaggagcaccaatggtagaagtcccattccaaaggcaggagaagactgatgtcccagctcaagtagtgagacagagagagatcaaattctcccattctccactgtttcgttctattcaggcccttgacggattggacgcggcccaccatcctggggagggccatctgctttactctgtctacctattcaaatcccattctcatccccaaaacactctcacaggcaccctgagaaatactgttatatttaaccaaatatttgggtaccctgtgatctagtcaagttgacctgtgaactcaaccatcagtggctttctctgctcatgccttgcctgggttggaacttccttgaaagtagaagttggcttttcagccctacctggcttcttggtctctttgctctggggctggtggctgtgctcacctcccattacaactcagggtctctgagcccccaattcccctctggcaaatggggatgtgtgccagtacttctgtgctgaagggcctgctctgaggagtaaatgaggcagtgtgtggagggacttcacatggggcctcctattgagtgagccttgggtcttgttggtcagctctgcttccttctgtgatttctaaattgccaagggctggggagggccagtcctagggcatcttcccttctgtagggtcccccagttcccctgtttctttctgtgtcctgattgaaaatcacagagtgctttgaccaccctgtgacccagccagctacaggtttttcccagcagacctgagcccaaacctgggccttaaacattctcaggcattgataaaggtatctaggtaggctgggcatggtggctcacgcctgtgatcccagcacttggggaggccaagacggatggatcacttgaggccagtagtttgagaccagcctggccaacatgatgaaaccctgtctctactaaaaatgcaaaaattagctgggcgtggtggtgtgtgcttgtaatcccagctacttgggaggctgaggcaggagaattgtttgaacctgggagacagaggttgcagtgagccaagattgtgccattgtactccagcctgggcgacagagcgggactctgtctgaaaaaaaaaaaaaaattaggtgtggtggtgtagtcctagctacttggatggcttaggagggagggtcacttgagcccagcaggcaaagtttgcaatgagttgagattgtaccactgcactccagcctggacaagagagtgagactccgtctccaaaaacaaaacaaaacaaaaaggtatctaggttatcacccaaaacaactgaaagaaaccagccttggccctgagccaaattccttaaaccctcatataaactccttaccctgacctcttcactttggaccaaacctaggtagacacctgtttttttttctcgcctccgcacctcgaggattgctttggccagatcgccctggcatttattgcttctttctttggaatcccaactggccccatcttaggacagtttggggcactcccttgtgggaactcttctgctgccacttctggggtgattccagcataggttcggagggacgaaaccccttctttcccttgggtggcagagaggatgtgcttgccctcttctgtttgtgttggagacctgggcacatgcccagtgactcaggctggaagactgattcttttgcacacacttagccatgtgtgtttattgtccccatgggagtggccatttcaggagaaactggtctcatgcaccttgtatctgaccatgtcacccaacttgaggggccctgaacatgccatgctcctgcatcctccctgcctttgctcatgccggggcctctgcctggagtgtctcctctccctctttctttgggcaccccttggttgatttgctccctccatgggcacctgtagcccttggcctcttgagagcagtcattttgctttatcaatagatatttctaatttggggaatgagtgaattcctcagtagtggatagtagttatatttttggggtacagcggaattttggaaatgagcaaatgttctcagaatgaagtctgtggatgaataggaattttcagggtaggtaaaaccatttctaactttaaaaatgggatgtgaatgggatgtgagtgcttttctgctgtggcctttaagctggcagaatagttcagacctgttctaagcaaggaatggcactgttattggaacaggagtatgggctccactgcaacttggaggtggccactgtattctccttgtttaaaaaagaaaaaatgtaggccgggcgtggtggctcatgcctgtaatcccagcactttgggagggtgaggcaggtggatcacctgaggtcaggagttcgagaccagcctggctaacatggtgaaaccccatctctactaaaaatacaaaaattagccaagcgtgatgcaggtgcctgtactcccagctacttgggaggctgaggcaggagaatcgcttgaacccaggaggcagaagttgcagcgaggcaagatcgcgccactgcactccagcctgggtgacagagcgagactctgtctcaaaaaaaaagaaaaaacatctcataaccttttaggctggtggccagtcaacttcttgctaacggaaatgaaaactcttttgatgttgatggaaaataatcatctttattcatttattcattctgcaagtatttcctgaggacctgctgtgtgctgggcccctgtggactcgcagacagtgagcatccgctctcctgagcttctctcacctctttctgctctggaatttcttctcaatgagaccacactatttctatactctctggtgtctggcttttttcacgcagcacgttttctttcttttttttttttttgagatggagttttgctcttgttgcccaggctggagtgcaatgacgtgatctcgactcactgcaacctctgcctcccaggttcaagcgattctcctgcctcagcctcccgagtagctgggattacaggcgcctgccccctcgcctggctaatttttctttttttttttttttttttgtatttttagtacagatggggtttcaccacgttggccaggctagtctcgaactcctgacctcaggtgatctgcctcccaaagtgccaggattataggcgtgagccaccgcacctggccttacgcagcacattttcaaggttatcccgcattgcgtgtatcagtgaagcggtgtcactcgtctggggtaaatacccaagattcattgtcttcacagccacggaagactaggacacggacatacagtgaggttcagagtggaagtataataggtgaaagaaagagaagagctctgtctgctgcagagagaggggttccagtgaaatgggttgctgtttctgcaatgaaatgcaaggggttttaaagatgagcctgaggagatggtgtctgatttacaaagggcacaaagattggtcagaccaggtgtttcatttgcataggatgcataaaactggttagggctaggtgtgccatttgcatgtggtgcgaaaagctggccagccccactccaatcttgtgttatgcagatgggttctctacctggccagtgccatgttgcctacttctttactgtcttgtggtaacaaaagggaagatagagcctctttgctgagtatatctggccccctggtagcccttttctattggcacagctgctggcattcactcctgtgagcttccagcttgcttatctatgtctgcagcttgatttttcaggctgctcttttttagaaaagaaatgatttgaggctgggtgcagtggctcacacctgtaatctcaacactttgggaggctgaggtgggtggatcaactgaggtcaagagtttgagactagcctggccaacatggtgaaaccccgtctctactaaaaatacaaaaaaattagccgggcatggtggtgggtgcctgtaattccagctacttgggaggctgagacaggagaattgcttgaatctgggaggtagagtttgcagtgagccaagatagtgccattgcactcctgcctgggcgacaagagtgaaactccgtctcaaaaaagaaaaagaaaaaagaaaaaaaagaaaagaaacgatttggggattttgttaaaagggaaattctgccgaggactgttttaccctcactatctgcctaaataatttctttctgtctcctgtatcatcagtagctcattcctttttaggctgtgtaatgttctcttgtgtggctgtatcacaatttgtatatctaccaaactgttgttagattggttgtttccatgttggggcgtgatgaataaggcctcagggaacattttggccaagtcttttgtgcccgtttgcactccttgctctttgatatatacctaagggtggacttgctgtcagagggtaggtgtgtgtttaactttgttagaaacctctaaacagatctccaaggtggctctcccaccagcagagtctgagggtctgagttctcgctgctccgttcttggggggctgtcctcacagagccccttgcccctcctctgctgtaacccaacattcatgtttctctctttctctgcctcttcaggtgctcttgagagtttgaggggaaatgcagatttggtgagtctccatgaaatttgggccagtagctcgggctctgggcccttccctccccacccctcaggtccttccctgcaggtgtgtcaggagcccagggaacccaaccctaggcagtgcagtgggggtctggtctcagcctccctgactccggcccagcgcctgctggggcagattgttcatctctgcgcttcctcatctgcaaagctgacagcagaagcagggcagacctgatgaggggcagtcatcgggatccagaccaagtcgccactctctcattcacaagtatttattgtgtggctcccatgctctgtgctggggccacctgggaaggagccatcagtcagttaggcgagagagaagttagacaaatgagtatataaatagaaatagtgataagtaccatcaacaaaagaacaggctgccttgagagaattacaaggggactgagcctggggagagggcagccttgggtgcctccaggtggcctgggcatggttctgctgacagagttctcaggtacaccccggcctaggtgacccgtgaggtcctttgggatgaatgctcatggctgttggatttccaggttaccagctcccttcccttaataccaagatgggggggtcaccttctagtgctagtcttccctgcagttgcttctcttttgccctggaatgccgggtggagaccctgctactccttgtgcgagagggcagaccccgttttcttcccgcctctccagactgtcctctagggagcgtggggagagcccgggtttacgtgggtccctgtgctggcaggcttacatcctgagcatggagccctgtggccactgcctcattatcaacaatgtgaacttctgccgtgagtccgggctccgcacccgcactggctccaacatcgactgtgagaagttgcggcgtcgcttctcctcgctgcatttcatggtggaggtgaagggcgacctgactgccaaggtacactcactatctgtggagggagacagggtggggggcagtgggtggggaagtatcttttgagggactccaaaagccagctgactccccaggcgagcccttacatctggaggaccatgggaggtaggacggcccagcggctacaggttcaagttcagacgcagaagtccgggtttgaggactggctctctcggccacctgctgtgtgacctcctgtgcctcagtttccttgtctggaaagcaggaatagtacctgcctccttgggttgttttgggggttagatgaacagtgcccaagcgtagcaccttctccccaaaaatggtggctattacgactgctgggactgtcagcacttcggtactggccctgggaaaccgagaaagtgctctgcccaggcgtttgggttgggccctttgttgttttattttttggggggggcgggggcacagagtcccactctgtcatccaggctggagtacagtggcgcgatctcggctcactgcaacctccacctcccaggttcaagcaattctcctgcctcagcctcctgagtagctgggattacaggtgtgtgccaccatgcctggctaaatttttttttttgtatttttagtagagacggggtttcaccatgttggccaggctggtctcgaactcgtgacctcaaatgatccacctgccttggcctcccaaagtgctgggattacaggcgtgaaccaccatgcctggccaggctgggcccttttattgttaggaacggtccagtctgcatctagacctatccgtgcttctggctcacctgcagccctctcttgtagaaaatggtgctggctttgctggagctggcgcagcaggaccacggtgctctggactgctgcgtggtggtcattctctctcacggctgtcaggtaggaagcctcccactgttccctgggcaggcattgggtactggccgtgccaagaggctgtgcaggggccatgtcccttcttgtgtccaaaacacccttggctttgtggaaaagggctgtggggccctgcccacctcctgttgttttcttgggagccatgtggtcctctgaggagttggctgcaccgtcctgggcaggtcggtgttcctgggagaagccctctgggagagggagggcagagaccaggtctgctcacgaagctcctgcacccagagtttgttcagaggcgggtacagcacacatgttgtctcagctcctgtctctgtcctgtgaggcactgccccaggccccttgctgctggtgggactcaggacaccaggcccactgggggcttggccccttacgtatttgtcactgtgattaagcccttaccccttactgggcctcagtttcctcatcttttaagttgaggagttggacagatcacagttataagctggggcctggagtccccctgtggtctgcacggtgttttgaaaactggcaaatttcacataaaaatcaggatttctagtttctcttgacaaaccgcaaaggtctggcctgacgaggccagcatcttcagccagtaaaactccagcctgtggctgggcagggctttccctttggtcctttctctcataatatggtccctagagctcatgaagaatgtggactcccaggccctaccctggacctcttcattccaagtccgcccagcaacaaggtttccaggtgatttccatgcccttgaggtctgagctgaactgatttaaagcagccactctcagcgttgagctgcctcagtcagaggggcctggaggaccatactgctgattaggaggtctgggtggggcccaggaatcacatttcttacaagttcccaagcgatattgatgccgctgctgcaggggccaaactttgagaaccactggtctagaggccgcagccagcactctccaggcacactggcccctagaggcacatgagtttgacatgcaaccccttgctgtcaaggtgtctttccagatgctgaccagggtctttccagaaccaacctgctctgtctcaatcagcctcgtgcccctggctttgaccttccaaatccttggctcccacaaaacctctgaacaggctgttggattcctactccaacttcttggttttgtaaccagggttcttggtcttctaggccagccacctgcagttcccaggggctgtctacggcacagatggatgccctgtgtcggtcgagaagattgtgaacatcttcaatgggaccagctgccccagcctgggagggaagcccaagctctttttcatcca

SEQ ID NO: 11080 - DNA, 781 bp, Homo sapiens
ttagttggctactcgccatggacgaagcggatcggcggctcctgcggcggtgccggctgcggctggtggaagagctgcaggtggaccagctctgggacgccctgctgagccgcgagctgttcaggccccatatgatcgaggacatccagcgggcaggctctggatctcggcgggatcaggccaggcagctgatcatagatctggagactcgagggagtcaggctcttcctttgttcatctcctgcttagaggacacaggccaggacatgctggcttcgtttctgcgaactaacaggcaagcagcaaagttgtcgaagccaaccctagaaaaccttaccccagtggtgctcagaccagagattcgcaaaccagaggttctcagaccggaaacacccagaccagtggacattggttctggaggatttggtgatgtcggtgctcttgagagtttgaggggaaatgcagatttggcttacatcctgagcatggagccctgtggccactgcctcattatcaacaatgtgaacttctgccgtgagtccgggctccgcacccgcactggctccaacatcgactgtgagaagttgcggcgtcgcttctcctcgctgcatttcatggtggaggtgaagggcgacctgactgccaaggccagccacctgcagttcccaggggctgtctacggcacagatggatgccctgtgtcggtcgagaagattgtgaacatcttcaatgggaccagctgccccagcctgggagggaagcccaagctctttttcatcca
